United States Patent Application Publication US 2014/0057251 A1 - sequence listing, part 127

SEQ ID NO: 231303 - DNA, 2177 bp, Cannabis indica
aataaagagtcaggcagaagaccttagttaacttctcttttactattctcactcttcctatgaatgttattacatacagaaaacttatgtttttctacttaatttccttacctcgaatgtggagaaacctttgattgcacttaacttttagaggaaaaatcagctcgaacaataccttaatcataaatgcatgaatatttgactcaggcatcacgacatcaattcaaattctaaaccaataatcttaatcaaaatacataccttatattctctatttaatgttctcgctgaaactcttgtataataatacctttgaaccttagcatatgagctataatactttatatggttttggtaatatgaagaatgggcaaaagagagaggaaaagactcgtgttggtctgtagggccagtcgtcagttcatgaatcagccagagtgacgtactcgtgtataagagccatcattccgtgggtgtaagggcccaatggaggcttgaagcagggacgttacaataatggtttcggttccaagctaaacatcttctctgcgaccctctcgccaagtttcatgtccatataaaaccaaagccttctcacgcccattttcactctttgcataccccaaaattaaggcactccaccccacaacatccctctttggcattttcacaaacatatccaaagcatctcccaacaaactacactaaacatatcctcaatctgatagcaatttagatagaaaaataacaatgcactccctacaagctcaaaactctccaaatccgacttcaaaaccagacaatgaacctctttcccttcatccatcgaccctgatcgcccgcatacactaaggattgtcgaaaaagttatctcattcaatctcgttttccctctttgcatcatggaaacaagagacaaagcctcatcatatcttccccgcttcgagtatccaaaaatcattgtgttccacgatacaaccgttctgttgggcattccatcaaacacatcccgggcaacatcaagtcgccccttacgacactgcagtgtaataaaagtgtttgtgaaaatgatgttgtctttttgagtactcaaagctcgaggaaatcccgaaaataatctggtccatagagttcgtttccaagttccaagcaaagaagatttccccaccataacaaagaaaatcgaaaatgatttgatttctgcattgctttcaactcaatgctacattttcttccaactgccaaactaagcaagcaatagcatcacttagttccaatagtaaatcatagaaatctccaaagtccaacctccaaggttttgaaatcgtaaaatttacaaaataataaaagtttactatttttttcctcccaagtgtcatagcaatagttctatggtgttcattacacaaactcagttcagaaacatttatggagaatgatataaaagtaaaggcagaacaatgaaaaatgtctatacaaaattgcaacacatagaaagtttcgtacacagtggtgactgttgttgtgttttctcaccggaagcttcaaagcaccgtttccaaagcttttgggtactcaaaaaagtttagactttggagggttccttcaagcactctttgtaaagattttcccgcttcaagcctttattgggcccaacacgagtgtttttagtgtgctttgtccaccctaacacacttcctgagaaagcttccctgggtgacgagttctttcatgatgtgctactagaaaacaagatgcaccttgttaatatagctagtatcaatcaatccatttaagctctctttaactatgtagtcccatacctacacaaccttagaatcatcccacttgactttttccaggcaatgtgggattgtacaacttactcggtatttcccatggagtaaagtaagtagggaccgaccaaccaccgtcatttggcagttggattttttatacatgtcaaagttttttttatatatatttttagagaatatattgtgcaacctacgaagcaacctaaatcgcaattcaactcaaaccgcaattcacattgcaatccatgcaccaacctaaatcacaactaacggagcaacccaaatcgtaagaaaaaaaaaagactaaaaaatagtatatgtggtgattttcaaatttatttaacatatagttgtttatta

SEQ ID NO: 231304 - DNA, 1508 bp, Cannabis indica
taaacatatcctcaatctgataggaatttagatagaaaaataacaacgcactccctacaagctcaaaactctccaaattcgacttcaaaaccagacaattaacctctttcccttcatccatcgaccttgatcgcccgcatacactaaggattgtcgaaaaagttatctcattcaatctcgttttccctctttgcatcatggaaacaagagacaaagcctcatcatatcttccccgcttcgagtatccaaaaatcattgtgctccacgatacaaccgttctgttgggcattccatcaaacacatctcgggcaacatcaagtcgccccttacaacactgcagtgtaataaaagcgtttgtgaaaatgatgttgtctttttgagtactcaaagctcgaggaaatcccgaaaataatctggtccatagattttggttccaagttttaagcaaagaagatttccccaccataacaaagaaaatcgaaaatgatttgatttttgcattgctttcaactcaatgctacattttcttccaactgtcaaactaagcaagcaatagcatcacttagttccaatagtaaatcatcgaaatctccaaagtccaacctccaaggttctgaaatcgtaaaatttacaaaaaaataaaagtttactattttttccctcccaagtgtcatagcaatagttctatggtgttcattacacaaactcagttcattttatggagaataatataaaagtaaaggcagaacaatgaaaaatgtcaatacaaaattgcaacaccgagaaagtttcgtacacagtaacataccccgatagatactggtgacttttgttgtgttttctcaccggaagcttcaaagcaccgcttccaaagcttttgggtactcagaaaagtttagactttggagggttccttcagacactctttgtaaagattttcccgcttcaagccttcattgggcccaacacgagtgttttcagtgtgctttatccacactaacacacttcctgagaaaactttcctgggtgatgagttctttcatgatgtgctactagaaaacaagatgcaccttgttaatatagctagtatcagtcaatccatttaagctctcttcaactatgtagtcccatacctacactaccttagaatcatcccacttgaccttccccaggcaatgtggaattgtacgaattactcggtatttcccatggagtaaagtaaggagggaccgaccaaccaccgtcatttggcagttagattttacaagttaattgttagcgaaatcacatttttgggatcatgccacagtttactcctaatttcaaatttgattacactaaaatttattgtaatatttttatttatacatttcaaagttttttttatatatttttagagaatatattgtgcaacctatgaagcaacctaaattgcaattcaattcaaaccgcaattcacattgcaatccatgcactaacctaaatcgcaactaatggagcaacccaaa

SEQ ID NO: 231305 - DNA, 5081 bp, Cannabis indica
aaccttcccatgtgatctcgagcaaccatgccaaagccaaaacgactctcctcttcaaagaatgctgcatccacattaactttaaccacccttatattcggcttaacccaaagctctttcccatcccctggctgctgcagatcgtaggatggaatactatcattttgttgagcttttctccaatggtgtaaagaagaagatgccaatgtcaacacttcaatgaccgagagttttttgtctttccaaatgcaactgtttcgagccttccaaatggcccaagagatcatggccattctacaaatacactcctcatctagctcctcgaaatgcttcataaaccacgaatcaatgtggtaattaaccacctcagacacttgcagaccggctgtaaaccagcaggcagcagcaaatgtgcacgatacaagcaaatggtactcagtttcttgagcttcaccacataaaggacaatccaaagagaggggaacatgcttgatatgtagttgacaccgagttggaagacaagcagaacatactctcaacataaaatttttaactttctgtggtatttttaattgccacaatttcacccaaaagcctgaattacttgcaccagacctctcttctctttgttcctgaagaatactataggcactactgactgagaactctcctgagctttcacctttccaagaccaaaagtctccctcggcagtgaagctaataggaatgctaagtattaaacttacatccctttgattgaacatatcttgtaaaagatcaacatcccaacacctcctatcaaccatgaatagagaagccactggttgattagaaagtccaggattattcgaagtaacataaggattctcattattaggtagccaaggatgagataagatatcaacatgcaaaccagtacccacaatgcgtctggccccttgccgaactaaagattgagaagacatgctacgccaaacaaaactcggatttgctccaagattagcagaaagaaagtcaccatttgggtagtatctagccttgtagattcggccaacaagtgagttaggttgaactaacaaccgccacccctgcttcgcaagcattgcaatgttgaaatcatggagaagtcgaaatcccatccctccaaactttttatccctagccatacgctcccagctcatccaaattatacctctccctctactagatgaagtcttccaccaatacttggccatcatcttttggagttcatcacatgttttcagaggcaaaagaaagacactcattgcataggttggaagcgattgcaccacagtctttaaaaggatttcctttcccgcacgtgacaacaacttgccatcccaactattaatacgattcttcactttttcctttagaaaacccaagatagatgatttattgcgaccgattatattgggcagccccagatatttactttcttcactagcctccaccatcccaagagtaccgcgaatttgctcacgaacactaatattagtattaggactgaaaaatattgaagacttactggtattaactttctgaccagaaacttcttcaaagacagccaatagatgacgaacatgagcagctacatcttgtgttgcttgacaaaatagataactatcatcggcgaagaacatgtgagagataacaggtgcacccctagccacccgaatgccttgaagaagagtgttcctcacaaactgaccgattaaattagagagtccttccgcacacaaaataaacagagaaggggataacggatctccttgacgtaagccacgggtaggagttataggccccataacatgatccccatgaacaaccgaatattgaaccgaagaaacacaatgaagaatcatctcaacccacctgttatcaaagcccattttgatcatgatagctctcaaataggaccactcaacacgatcgtaagctttactcatgtccaattttatggccataaagcctttcttacccgatgtcttcctcttcaaaaaatgcataacctcaaaggccaccataatgttatccgaaatgagtcttccgggaataaaggcactctgagtctcagaaacaacatgatcaagaatacctttcattcggttcgccattacttttgagacaatcttgtagagaacattacacaaagcaatcggtctaagctctcccatggctgtgggatttttctttttaggaattagaactatattggtgtcatttaaacctccaggaagaactttgtgttcaaagaaattcttcactaaattgataacatcaccaccaacaatatcccaatgcttttgaaagaatcccggtcccatgccatcaggtcctggggacttatccgggtgcatatgaaacaaggcacttcgaatctcattatccaacggcacaacaagtaaatcagcattttgagttggtgaaaccgaagacacaattccactaacaagttgattgatattggccgaaccagcagtataaagagaaacaaaataagaagtaatcaattgatccaaacccccattccaatcgacccaaacaccattcggattgagaagtttttgaatcttattacttctctttctagaactagccatagcatggaaatacttactattcttgtcaccatctcgcagccaaaattgtttggctcgttgacgccagaaggtttcttgttgcgatagcaccccaaaataatcctcatgagcttcttggaatagccgaacagattcatcatcgactttgcctttaaacgatttcattctttttttgctagcagcaatcctttttttgaaaccacccgtgtactccttcccccagctggcaagtttggacgcacaagcccttattttctcttgaatcgacagcagaggattgttgcaccagcaatcttgcacaatctcgtagcacattggttcatgattccaagagttctcaaaccgaaattgaatgcggctactgctatgttgaaaagtagtaggctctaaaaaaattggagtgtggtctgatgaggaaaactccatattagaaagggtagcatcattaaaaatatccatccattgagaggagactaaagctttatctagacgactctccacccaacgactagtacctcggcttctttcccatgtaaatggataaccaattaaatccatatccaccaaaccgcactcactcaacatctcctgaaaaccattaatcaaagaatttgggtagggtcttccacctttttgttcattgacgctaccaatattattgatatccccaataacacaccaagggagattagaatttcttcgcagggtacgaaccaaagcccatgtttgatggcgaaaggcacggttgggttccccatacaacccagttagtctccacttagtcgttccttccagagaaatttccacgtctatgtggttattcgaataacccaacaaacaagcttcatccttaactttccaaaataatgctaacccaccttttctgcccactggatccacactaaaacaagcctcaaagcccaaccgaagcttcagcctctcaataacatctttcttacaaatagtctcacaaacaaatacaaacttgggtttcttttgaagcacaaggtcttcaaggaattgtgaggcccgtgggttcccaagcccacggcaattccaacttatggtactcataatgtttggtgggtctgcaaagcagaacccaccttcaatccattttttgccccatttgaatcttgatccataagtacaagagactcattacttccatcagcattttccaaatccatattagtcatagagtccttctcccttggcccatcatccaagcccaacacaattcttctcctctttaaatcactaatagtcagcgtatcattctccaaaggaattggagatatgatatttaatgtagcagttgtaccatatcttccttttgacccttgactagagtgatttgtggtttccacatttagaatcaaattctcatgcaaagatccctgagaattcggcccaaaattgttgttaactgccgtgacttgtgggtcaatcccaccatttactggaccaacattaaacacaccagaatctgacatctcctccgccctccctgaccgaagccaccgtgaacccaccagctggtttgcacgccgagaagaggctatcatccacttaccatatggtttgattatagaatcaataggtatgtccaaagctttctcacaaaagcgttcagaatggcccatgattccacatagaaagcagaatgttggaactttttcgtatttgaacgtagcccaaaaaatctcagtgctatcctttttccgaatcttcattcgtcgttttagcggaactcccaaagatagtgttgctctcacacgaaggtaatctttccaaacgccaatgaaattattaggatcagtttccacaaagcctccgagataggcacccgcagcccgcactaccgcctctgtcatacaccctggttgtaaatcatgaatctgaacccacatttccatcttgtccaatttcatagccttcggattgtcaccttccttcagcctttcaaggattaaatgtttacgatcaaaggtccaaggactacctgttataactctatgtatatccatctcatggtagaattgaaacaaaaacaggtttgggctcaattccttcacgtacatacccctcactggcttccataaatcagccataatatgttgaaaaatctgaaaatctgaaactctgcctgttaagagacgccccacaagacaccatcacgtatcgataacaggttccccttccgctggcccttcgaagatatactcttccccatcttcttcatccaatctaatcccagtccatgcctcctccaactcccttgtcgtactactactcgacgccataagtgaaacaaaaacacagccaagaacaagacaaaaactctctaagatggagagactaccaacgtatcagaagacacgactaatacttattattagagttgcccttaataagtgataaattctcaaatagacaagtctatcttgagaattt

SEQ ID NO: 231306 - DNA, 922 bp, Cannabis indica
taaatcttagttaaaagacacaatttagaaatcaattttgggttctaaaaatatggcccatacatgtggagatataagtccacccgtgtagagtgacatataaggctcaatggacttttttaattattttattaattaaataaatcaaaataaataaagattattttttaattatttgaattatttataataaaatatactataaaataataaaaaattaattgaattcatttattcagttgatattatatttaaatttaaattttaaattaaatataatacatatttttattttaaagaattaaatatacaattatgaaagattatatatatgatatatataagtaagacaaattatgtaatccctcacttgattttgagggattagaaacctcaactagttttaaacccttagcttagttaagaatatttatttttggtatccaatggtgaggattgatttacttttaaagtaaggataaatagtaaataaaaaaaggtaaccggatgaaattaaaatatttttatactttatggattaaaataatactttaatttagtaaagtaagaatctcaagaaaatttaaagctaaaggagaagggggatttagatttccatagcagaaaaaaaaatgaaaaaaaggagaattaagtaaataggaaagcaggttagcaactatgggctcacaactgagaagattacatttgcatgtttactaagcttgaatattattgatgttaagacattgatgaacttagccacgttttgaattgattatatacataccacctctcatttctgtgcctattttgaacaattctcctgaatatgttaaacaatattattatgtgtatatatatttatataaatgacacctgtagctgaatattcataatctttttataatttacattttaacgt

SEQ ID NO: 231307 - DNA, 1808 bp, Cannabis indica
caaaaaataaaaatcatactttcgaaggtggtcatccgacctaagtagttattgaaaattttatctgaacctttgggcgtggtccgcccagaaggccattcacttaagagcaaatgttcttttatttcatacttgatatggtcatctaacctagtacctttattggtagtattttcttaaatgttccccgttctaagaccttggtactagaacgagttgcattttttcatcatatttacccaacttgtatgcccctgattctagaacttcgaccacttgataaggtccttcctagtttggtctgagcacacctgccgtactatctttggtgttcaaaaatactcttcttaggaccatatctcccacaaagaatttccgtgctttcacatgcttgttaaaatactgagctactttttactgatgggctatcagttttttgtttgctacggttcgcttttcttcaacttcatcaagtgattctgaaaggagtacatgattggcctcttggctatatgttaatcttctgtgggatgctggctcgagttctaaacgcagcatagcttcatatccatatgtcatggaaaatggagtctgtcgggttactgttttctcaattgtgcaatatgaccatagaactttaggaagttcctctggccaatttcctatagcatcttcaagattcttctttagggtgtcctttaatgtcttgtcgtctgcttcaacttgaccttttgcttggggatgtgccactgcggagaaactttttatgatcccatggttttcacagaaatcagtgaagaattaactgtcaaattgtttaccattgtccgagactatcttgtatggtaatccaaaccggtaaattatgtttttcacaatgaagtcttatacttttttggacgtgatggttgctagtggctcggcctccgtccacttggtgaagtaatcaactgcaaccattgcgtactgcactccgcctttgcctttgggcaactgttggatcaggtcgattccccaaatggaaaaaggccagggagtttgcatctgagtcagttcgttgggtggtgcccgaggtgtctttgaaaatctcttacatttatcacatttcttaacgaaggccttggaatcttcaatcattgtcggccagaaataaccctgccttagaatttttcgagcttcgtttctattgtctgggagttcttcggtgttgaggtaggccgctattggcgtcatctagtttggggatgtattaataatttcaacctcttctattccgatgatactaggttcttcgagaaactggataggaatcaaattttctttatcatttacgttgctactcgcaagtcgagctaatgcattagcaatcatgttttctttccttggaatttgcgtgagaacataacttttgaactgtgtgagaagatcgtgtattttgctcagataagctatcatcttttcccctcgagcctcgtactctccggatacatgatttacccggatacatgatttaccaccatttgtgaatcgctacagatctcaatatgtttggccttcatctcgccagctagttttaggctggagatcagagcttcatattcagcctcattgttggatgccttgaatctaaatttgacttcagcgtgcaggtgttgccccccaggcgtgacaagggcgattcctacactgcatagttgatctatagccgacccgtccacatgtagcttccaattcggctaatcttcactattactcggttgaagcatttgtactggctctgggttgttttctgaaatgctctcttcttt

SEQ ID NO: 231308 - DNA, 760 bp, Cannabis indica
tccaattttccaacgaagaccgggtgttagcaaatcatgcccccatagtataccttgccatgtcattgaaggtgagtgactatggtgagcttcaaagaaagaattgttggaaaaatagcgattatttttaaaagaactaattattttttaattacatgttagaatgcaaatatacaataaaagtatagtgacacgtagaacaatttgtattttctcctcctaaattgaatttttaacactcgaattgtgtccttaaaagatactcttttaaaaatttgtcttgaaatataacaattacattaaaggtaggcaatattcaaaccaatctacttatactaaatcagtccaattcaattacaaaaaattaaatatctaattacaataggattagatttaaattttcttaaaaaataaataagttttaccaaaatatcaaaataaaaaacttatgaaactagtaagtgaatgaaaaatactaagcatcaatacataaaaggaatatttcaaaagaaaaatatataaaaagaatataaaataattaactaaatatatagtatatataacaaaaaggtgacacttatagaaaaaaaaaatcaaaagacatttgtgtgactgcacataagcatcatgttatattatataccgcattttaaaatataagattttatatttaactatttatttaattctaaaaaaatagaataaggaaaaaaaaatgaagtaacaaacaatttatacaaaaaaaataataatataataa

SEQ ID NO: 231309 - DNA, 1812 bp, Cannabis indica
ttagacataaaaggtttatgagctagaccaaggttactataaaagtaatcagaaacatgagaaggagtgttaggggaaaagagaattgatgatttgctaaaattaacctgcttcccagtggcttggttatacatttgaagagctgccttaatagcattacaagaagtttgagtagccctagcaaacaaaagtgtgtcatctgcaaaaagtaaatgagatatgacaggagcattacgcgtaatagaaataccttgaaagttgccaattctttgctggttgcaaagggctgcagaaagcccttcagagcatagaagaaataagtaaggggacaagggatccccttgccttattccacgagtaggaaagatttcccgagaaaaactaccattaatattgaaccgaatagagaccgaagataagcatttatgaataagcttgatgatcctctcaggaaaattgaagtgtttaagaatagccaaaagaaaattccattcgacacggtcaaaagctttttccatgtccaacttgagacctacccacccaattttacctaacttcctatggttaatcgcatgaaccatttcttgagcaataaagatgttatcaaagatgagacgatcagacaaaaaggcactctgagtcggagaaataatatcctccataaccaccttaatcctattagctataacctttgcaacaatcttataaagagttgtacagagactaataggtctgaaatctttaagagaggaggcattagcttttttggggataaggacaataagagtgctatttattgaattcatgctagcattattattcaggatgtcaaggatcaccatgcagagatcctcccccaaagtattccatttttttgatagaaataagcattcatcccatccaaacccggggctttatctccagaaagctggaataaagccgtcttgacttcatcagcagtaaaaggggcatccaggaaacaaaattgttgagcagaaagtttggcgctaatcgcagacaaaagtaggttagtagcattgctgctgctaccctgagagcaaaaaagagtggagaaaaaacgacagacttcactttcaatatcagcatggttagaaatagtactgccatcctcaagggtgagagatctaataaagttagttttcttcctagaagaagctttattatgaaaaaatttcgtatttttatcaccagctttaagccagtggactttggatctttgcttccagaaaatttcttgcttataaagaaggctgtcaagttgagattgaagattagaagcttctgacagagtctctttagaagcaggaagggaagaaaaggtatcattaagctttttatctacgtactttatttgagtagctaaactattatgcgaggcattccaagctttaatagcagtaatacaactaacctgtttactaaggaaattagacaaaggacaattatgagaacagagccacaccaagagttactaacagtattaaagaaagaaggatcagtaagccaatgattttcaaacataaatcttttatttttcaccctactcatgctatcatcaacaagaactaattttagaaccctatgatccgaaccataaaaactaagatgatggagaatggcttggggatactgttgaagccacttatcattggcaatacaccagtccagccgttcataggttgaactgtgtttccaagtgaacttattacccacaaaatggaccggagttaaagagtacttattaacaaaattttggaaactaagcatagcatagtgaggagggggagaatt

SEQ ID NO: 231310 - DNA, 1183 bp, Cannabis indica
tcttataactaccaacggttttatctaactgacagttatgactgttaggatcgttttcaacctcaaggctatatatagccaattgctattgctttgcaacacagttttcgggagaaaatttcaagttacaagagctagtttagtgtgcaagagagatagagatttgaatttgttgtataggcctatgaagtgattaatcatagtgtcttttgtgtgacgttgattgtaaatgaagctatgcttcttgagtgattgtgtcaagaacacattaataatcaacattgtaattctctcttctagctcaataaagattcgagccattggggttgttctggctgtggagtaaggatgtgattcagcatcacttgttcgaacctcgtgattggttgtgtttgattctttttctccctatattcttgtctaaatttgttcattgttcattgttcatttgttcaaatctgatcaaattgttggtttatcctttatttgttttctggtttgattaatttcaagttgttcataattctgttggtatggttcttgatcgattccttgttttggtttgtgtatgaggtacatgatcaagcattgatcacatcaaatggtatcagagctcaatcgaggggcttcatcaaagaattgaatcaagaacataaagagaggaacaagaactaatttgcaatgatttcaagttgataagttcaatggcacaaatgatttttggtctatggaggatcaaaatgaaagctttcctagtacattaaggaattttagaagccattgatcgagaagagtttgctgctcttggagatgacatgaagaagatcaaggaaattcagaacaaggcacacagtgccattctacttagtttaggtgatgaagcactcagggaagtgtcaagtgaagaaactgcagtggggttatggaaaaagttggcttcaatttacctgaagaaatcattggctaacaagctttatataaagaagaagctatacacaatgagaatggatgaaaccaaggatctaagtaagcatcttgatgagttcaataggataatcttggaccttagcaatatagttgtcaagattgaagatgaagattaagggacattgctgctcagtacattgccaaaatgttataagcactttgtggacaccatactttatgggaaggaatctttgac

SEQ ID NO: 231311 - DNA, 1368 bp, Cannabis indica
tcaattccattatctttttttttcttcttcataacacaattaattaaaaagactagttaattttatttcataatacctgctttgtgattcaaaatatccaaaatatgaaatacaacattctaataaactcaatctcaaacacaccaactgatttggccttataaatgtaataaatctcattacatcgaaacttctctgaaattctgatgaaaaaatctgcaaaatagaatatataacacgaatatacatgtatgtaaagcatcaaatacataattgagaagttcaaatagaaaaacgagaccaaaccacactttgagtatatatttatgagagcatagcaaaccaagacatcagtatcaggtacctatttaagagcacaagcatgaatttcacaaccatgattcacatttaccatctcaatagtggctgtcaagatagaatctgctttttacttgagaaaataaatttcttaaacaaaacatttgcattaactcattcctttagaaccacacagagtacactattataatttataaagtcacacaacaacatacccaaaccaaaataaactactgaccaagacattttcaaatgataaaataaggtagcattaagaatcttacagtttcgatgaagcatccctgagaacatccaatgcttgaatagtgtcttaagcagactcatgttgcttgctctttaaaaacggttggagatgaagtaaatccatccaagttgatgtggtggtacaaacaaacaagtatataagtgaatctaaaccagacacgtagaatagagaagcaaaaacttgtatcatatttggttctcacctacttttgaggagcatatcactttgcacgttctttaaaaactgttggagataaagtaaatcaaaccttaataaactaagcccaaaaatatgagatcagaatagatggattgaatgaaaatgaaaaaacaaccaatacaaaataaaatctaactaactctaaacagtaaagtagtatagattaattcaaatgtgagaatgaagggcattatactaaaatttcataactactttgtgctgaagaaacaatgagtcagaaaacactcctatctccaaaattaactctatgaacttggagttggtcttagagaatgtaaaacacaaatccaaatctcaatagttaaagggaaaattctctgttcataaacaagttactttacaacaacaacaagctctcattctagttattcgtaaactgagtcggtagtactcgagaacaatagacaagaaaaatgaaatttcaacggtttcaaaagagaatattgctagaaactcagtcggtagtactcaagaacaataatcattataaagcaaattatgaa

SEQ ID NO: 231312 - DNA, 1537 bp, Cannabis indica
aatatggcatttttgagaaaatgccatctccagagactccttaaggactcctcccatcactaactccagagaaagatcgttatcagccccagccagctactcattcaccttagggaccgatcaagtcatgtagtgggtgagcatatcattgcctcttttagtctctggatgcagcacttgaggtttggcaggggccctgatctcttcagacccgcttctgaccagctcggatctaccctttgattgctcaggcctgtccgagctccctcctcgagagtctttagacttagtcatttttgggacagaagggtccacgatggttggttactcggagagatcaataactcctttggtcggtgctttctctctagacagggttgtctcaccgcccctggacttcttggtcggaggagataggcccaagcttcctcctactctcttcttcatagcttcgagcattttctgagacatgtctgtacggaatgaaagcaacattgttaggaaaaagcatgataaatacgaaagcataataatcaagaatgttaaaggcaagatggggtatcttgcacattggcagaagcatctggccgggcaagatgtgatgaatcatcgtcatctgacgagtctccttgctcctccaggacgtctttcccctttcctactataggagtggatggccgagcaggtagactgggcaccctaatctaaatcgtatgttcgataggtcggtgctcggccgtaagcttcttcctccttttgagtggagtctcctgctctttctcaacttagcttcacgcttgagttgaatgagttcattctcctgatgagctccctcagcccagccagcactggatttcctcttcttctccttcataggctggggaatgaaatcctttgggtagagcccgtacgccacaaagttgtcctctgagatcaacaaagtgatattccgagcatcaccaaacagctgagtgattctttgagctctatccctgaaagctagtgtgaagggtggacgttaatatatagggatctgctggaactgagtaaaggtggtgcccatgccttccaccatgtaatactcatcaacaaaattctcgattttgctcacggccttgtccccggtgcccgtcaaccacttgaagtctggctgggaaaaataaaagtatcccgacctgccctacttgggtgtagacttcaagtcaaaaaactagctaacctcgtgtggggatggcttaccccacttctgggtggcgtagagaacgaacagggcagagaaatacttgatgcccttgggattgagtggggccggacagagacgagagaagtctaccaccttcctaaagtacggttgcaaaggcagtaatgccccttgtttggaatgagcacccaccagacacacatccccttcttcggttttgtgactcgattgtttgaggcagggacataacaattcagctcgcctagatagcggactggtccagaaggcgtgtctaagtgaccatagacagatggctacccacccggcacccaaggc

SEQ ID NO: 231313 - DNA, 1315 bp, Cannabis indica
ttggtttaatcttattaatttcctaacataaaagaaatatattttttaaaaacaaatataacttatcttagacaatactcagccataatataaacccataaaagtcattatttaacttagtaaaagactaaattgcccttccaaataagcacttataaagtaaggcctagcggtattttagtaatttctaactaacccactaaatcgacatcttgaaaattctaaactagtttggtataattccaattccaaataatccatctcatattgtcgtgacatctttgaccactcaatcaagtttccacagccgccgaaaccaaaagtactttattttggaaatgatatccacgttacccctatagtcgactttaatcttactgttcatctacaccactttagctaatgatatagtctttgtttcacagtactttctctttgcttgctcataaacttgaatcgactattcctcatatgacaagtttattcaaagttccatattttcgttactcagtatacgaatcgtatctgcctcatacttctgaacattgaatgacaagctatgaactctaggtaaggtagggcgtatgtagctgataagctacctaacctccccttcccagaactcaaacggactgatactcctgggacttaactttcctttctttcctaaatttctaaattcccttcattggaagcacatgaagaaagataaaattctcaacttggaatttaacatttctacactttgaatgaacatagatcttccatccactttataaagtgaaaatatgaactcgaatattttctatggcctcaattgttccttagaccacatcaggtccaagttcctccgttcactgacttcattttaatgaatgggtgaacgacgtttccttccataaagcatattatacggtgccacatcaacaatactctgataactattattgtatgaacacttaatcagagggagatgctattttaggaaccctcaaatctattacccatgttcattataaactctcattattttgatataaactttaaatctcaatctgactgataaagaaactgtactgactttatatatttaagtcaatatcactagttaatcttaggtctatagatcttaatcatgatatggttatgttcgattttaattgtattatttatgttcttaaagttgttcgttaaagtttggccagctgaacagttacatcttggaaacatgatagtgtaattaagtgggagcgcaaatcatagatatggaatctatagcttctataagtatttagaagtgaaaaaatgatttcct

SEQ ID NO: 231314 - DNA, 3509 bp, Cannabis indica
aaagcttatgatacagttagttgagaatttctagaagcgctgctgaatgactttaaattgccatccagatttatcatgtggataatgacttatttgaaagctaccgcttattcggtcttgatgaatggaagagtgtaagggagtttcaaaggcatgaagggattaagacagggagatcagttaactcctctcttgtttgtcatgataatggagtatttgaccaggagattattgctagcagccaaccaatccaagatcaggtatcatcctttatgcaagaatcttaagattatcaatttttgttttgcggatgacctgatgctattctgcaaaggatacttaagctcaattcaggagtcaaaggaggttctggatgaatttagtgcaacatcaggtctgaccatcaacagtaacaagtctcacctctattttggtggggggggggggggggtgaaagagaaagacaagcaggctatgatgacagaattggcccttcatgaaggatcctattctctaaaatatctgggggtccctctaagaccaacaaaatggaaagctgaagattgtggtgtgataatcaagaaaataaagcaaagacttcatacctaggaaacaaggcatctctcgtttgcaggtagagcttaacttattcattctgttctgcttgggctaagaaactattggatgagcatttttatattgcctcatagtattacaaaggaagttgagaaactatgcagagggttcttatggggatggaatggaaatagaagcaaactccatgtggcttcttggaaaaaagtttgcctcaagcttatggtggcttgggtttcaaagacggagtcaaatggaatcaagccatcttagctaaatatgtttgggctatttcttcgaagagggatatcctttgggtgaaatgggttaataatatctatcttaagaacaagtctttgtgggactatgaactttagaatgatactagttggtattggagaaaattatgtcatctaaggggcaaattcactcgggaagctattgaaaaggcaggggctggtatgcatagattcaaatcgacattattgtataatagctgccttcctcaaactcagtttgagttcagcaaaagtatctggaattcccttaacatgccgaagcacaaattcatttttttggcaatttatcaatgctcaacttttaactcgtgacaagtttgagcaatttcagagcaagcttgacaacattaattgcccggtttgtgagttagcagcagagagcaatgctcatcttttttttgactgcaacttttcttagcaggtggtggagaaaatctttttatggctgggtcatagatgctggccgactagtttttctgcctggcagcaatggctgctgcaaaccagcacagacaagaagcaaagggtgcatatctctataatggctgcaatgatttacaacatatgaagcaatagaaacaactgtctcttcaacaattactcgagtacaacaactaaagttacacaggaaataaagaaaatagtttctataaattacaaatagcaaaaaatagaagcttgaaagctcatgagaataaatatatagagaatatttttgtgtaaaaagtaggttatttttcctggctttgcattgtatagattacatttgtttttgattaatgaagatagttctttcttgataaaaaaaaaaagaagtattttggtagaatcatcaagatgatcttcaatgccttttctagattgcatcttgaaggagtacaccttttgtttcaagtagagactgcaagggatttagtcatgtatagaccttcgagcttcgaccatagaccagtagcagtgattttctttgaaatctcactcaagaccttatcaccaagactcgaaatgattgcattgtgagccttctccagattttcgatcttttacttttcagtcttgtctttaatcttctgagcaccaagtaaagcgtcttgaatcccctgttgcacaagcagagccctcatcttcacccttcatacccaaagtcgttcttgcctttaaacttctccaaatggaactttgcacttcccattctttccctggatgttcttcacgttctgtaatgcctggcttgcttcgaattaaacctaagaacacgttcaactctaataccaatctcttagaaaatgtagcttcatcctagctatgcacaccaaagttcttagacagaactatcattgtgccaaaagaagatagcttatgaaaatgtatatgtaatctttattgaattgaatactttgtatttacaatttgtatttagtcttatgaattggattgataaaattagataaggctaggtcctttatatagtagcagcagtagccctaggggtggcaaaataggtttcgacacagcacacgaacatgaacacaatacgaattttatgggttagggtcgagaaaattagacgtgggttgaaaacgggtcgacatgacttgacacgaaataaaaacaggccaaacgcgatacgactcagttaatatgaatttgacacgattttttttttaatataataaaataagaaattattattaataatataattatataaaaatatatatttagtgatttaatgttatgttaaaaaaatttaaatttaatttttttaacatgaaattgaaaatatgataaaatttttaatttttattatatataacaaattatatatacataaatgtatataagttttttaatggaatctaaatctataatttttttctacaactttagctttaataatagcaaaataaatcatagtgggtcaatacgaacacgacacgatcttttatgggtcgggttagggttgagaaaattagacacgagtcaaaaaatgggtcgatacgtcttacacgaaatatagaaacgggttacataaaatatgacacgaatacgacacgatgacacgttttgccactcctattaaagttagttggctttgtcaactaatcttaagattatgacagttagaaataactgttaactgccgatagtaataataaccatttctcagtattccttggtttgtgattattcttttcttatgaaactgcagagtacaacgctgtctaaattgcctagggaagggctacgattgagatgagagaggtgttactttgtcttgtaagtgaacttgaattccatttgtattgagcctttattgttgatcaaatactgtaataagctctcgaacttgaatgtacgatttcctctttataactagctatttattaccatgtttcatttggttacattgaaagctgccttgagtgtggtttaaattattataaccaataaaatactaatatattaagttaaatttcaatattgtccatttatgatgattttttttttgttggggtaaccgataaaggttaagataacaaatgtaacaaaagttacacagtaggtgggggatttcttccatccaagaaagttcattgtctatcataagggcat

SEQ ID NO: 231315 - DNA, 1015 bp, Cannabis indica
gaacttcgatcagacctggaccccaaataatcccccccacggccctggcgctgaacccggcctctgacctgaacccgattccgaccccgaacctagacctgacgtaaataaaatcaaaaaatgaaagtaaaaatgagttttacagaacacacttttattttctgtttttaaaatgaaaaacaaaagtggttacagaacgcatttttatttttcaaaaacaaaaattttactttcattttgtgattaaaaaattagaaaacaaaaataatttcattttgtggttaaattttttttaattttttttctttcaattcatattcttaaaaaatatacctatcaaacaaaaataaattatattttaaatattatgacaaaaaaattatatgaaatcttcttagaaaaaaaataaaaaatatatatacatgagttacaaaaaattatgaaaataaaatcaaaataattattaaaattaacataattttatgtgagtaaaaaaatttaaaaaacatacattaaaagtaattttaaaaaattatttaaatttatatttttttttaaattaataaagtgtgtatatcattttatggggtgtaaatagagttccttatttactaatgatttttttttatttttttgaaagggttgtaatactcatttttatttatggaattatgtataaaatatagaaagttggacattaacaaaaaaatgacaatatataaaaaaaaaattaaaaaataatcaagtttttaagggtatctttcatgctgctacatagcattcaagttaaaattcacaatttaaggatcgaaagtaattgtagatagggatataatgacaattaaccgatctaattataactgaccgttaaatattgaatatttaattgtgattagatttaatagaatgttactttttaatatctaattggatgttatttttttaatacctaatcggatttgttgctcctaaattcgcccaatatacgtggaccagtcaagaggggacacgtgga

SEQ ID NO: 231316 - DNA, 1741 bp, Cannabis indica
tatgtcagggtattttgggtacaatacatataaaaagaggtatatttcaaataaatataaaattagaggtaaatttgattaattgattaataaaagagacattttttaacttaccccttttgggtccgtaggctaggtgggctctaggcacaggcctcagggtcgggcccgctaacaccctcatacgtgtcaattttgctattggtacaattaagtatcaggtctcatataatttaatgtaataacttttaaaaaatatcactaactaattgtaaggtgatatgtctagaaggtgttaggtatgctaatagcgtccaataacaatattaaataaaaaaaattatattaatttacaatactactatttttttaataaaaagatagaaattaatcgatttaaatgagatgacatgaaaaggaatatcgttccctcaaaataggtggtaagaaataaaatgagatactctagttaaactatgtggaactcattaattgtaatttaaactaaagacattttaagttgagattttaacaatatcgtataatcctcaaccgacacactaaaataaaaggacatacgaccttcttcgcctctagataatcggtgtcgaagtgcttgtagttgtaacaccaaaagattatccatctcgacaatcatcctttgtggcgaccaccttaattttaatccaactcaaaattttcttaaacaacttacaacttttgatctaacaatttcatacgagcatcaactaattgtccaagaagaaatccttgataacgaaagcaaaattgtacttctttaatttaacactactttgttaattgccaatagaaaagtcaattttagactttttaaacttcaaatattactggacaaaaatatttaaattatcttaatatacgagtcaatgtttacatatttttattttttcatttcttaattaaaaaatgaaaataggtacaagtaaatacttggggaggaaattagactctatactatttttatattgtattatttatatttattctcttttttaaagtctattacatttacttttttttttaagcttttactaattttgtcactgtcacttcaagatactctccgtgtgactccttatgtcaagaaattttaggtacaatacatataaaaagagatatgtttcaattaaaaaaaattagaagtaaatttggttaattgattaataaaagaggcattttttgacttagttcctcatagtggcggatccagccctcgttaatattgattttttttttcttaaaagaacaatattaaaatatatatatataaatttaatattttttttccccccaaaacttttgacacattactaaatttatgtttccccttgaattttttttttgccgtttaaaaaattctcctgaactattgagattgttaaattttaaggactttttgtctaatttcattcaattttactgtttcagtgatggtttatgtacttaaacatgctctccagactttgatatctaccaaatcatgtccctcaaattttgatatgtactaagtcatgccccgtaaactttcattcatgttaaattttttttactaaaattagacaaaagtccttaaatttaataaacttaatagttcaggggaattttaacggccaaaaaagttcagggagcatgatttagtacttgtcaaagttcggggagaaaaattactaattggcttaaattttattaaaataaatat

SEQ ID NO: 231317 - DNA, 4432 bp, Cannabis indica
gagttgttagtgagctatcaaagccggttttgcgtgagttagtgatatacatagttgattcttgaatattctaactaacgtcccactcattttgattcttgatagaggtttttctctgcaacggtagaaatctttttcttttccttcttctttgtttcttgtcggttcctccagtgttgaagaggatcttagggtaaattgttgtaagaatctttactgtattgttttacatacatttgatttacaaactgaagtttgtatcttgacattgatttttattggaagttatttttcctcgtttggggaacccaagcactagctgcctaaaatgtgtttctagggcagatgaagcttgtaaatctgtggtgttcattttgatttacttttggcgttttagcttttaataatccttacaaatttatagtaaaactacaagagtttatattgtgtgattgaatgtcattatttcaattagtagcatccgattagatcagttttacaaaaactaataaaaataaaattaatcactaaaatgtaatacgggaaaaagttaataagtattagaataattttctccctcaataattttttagaaaacagaatcatttatagttatattatatgttaacaagttatattttcaaaatatttgaaagaataaaaaattatctaatttcaactatgcattgcggcatcaacaattccatttggcagtgttagttgacttgaaaactattctaaattttctcattagtttttcttcagaaaaaaatatataaataaaaacaaaacgaaaatcgcaagttaaacgctgacccagagaaccttaactactataatatttacttattttattaccactagaatcaattagctaatgacaatttagcacgatagctatagttgagctcttcttgtattaatttgctcaaagtaaacttttttgcaatataatatagtcaaataatggactaaaagacttcaaacaaatgattcattcaaagataaatgaactgaaaattcacattgcccatttaaattaattaaacatacccgtatttggtggtaattagtgacaatgtcaataatcaatatctcatgaaacttcttagtctaacgtgtaattgcggtcaatattgggagtcaagtcaagtaatgacattgatacagaagaataatttaggtggtgttccattagaagtaatgaaagtttaagaaaagagaaataaatagaatggaatcaaaatcaaaatgtataaaaaaatttgataaatttttttttctcataatagtctttcattccatttcaaatgaaatagtaataattgagaaaaattaaccaaatcagtgacagagtcaacacttaagcagtatttaacttggccatgctcgcatatgacttgcaacaaactcatttcaccttgtgtattttcttaaagaatggccataatgggcatgaattattctctcatttatgagttgcctttccttctcttacttgttctcttacagattcatacatgcatggggtctaataccatttctgcaggtcaatctcttaattggaaccaaacaatagtctctaaaaaccaagtgtttgaaatgggattcttcacaccaggtaactctaggaattactacatagggatatggtacaaaaaggcaggtaaccaaacaattgtatgggtgggaaatagagacaaacatgtttctaatccatctctttcatcattgaaacttttagagaatggaaacttaaccttagttgcagggggctcaaatgttatttggtcaagtaattcattctcaaggcttccaaattcaacagtaggagtgttgcttgacaatggaaattttgtcataagagatgtttcagattcatctattgtaatatggcagagtttcactcacccaactgacaccatcctacctggtatgataaatggttacaataagattaagaatgagtcaattgtttatatttctgtcaggggcttggatgatccagcgccagggaatttctctattgagatggatgaaaacccaactagccttttgttcaagaccaatggatcggtaagttggagtgcttattggatagggagtggtttcacaacaggttatgttgacaaaaagtggaccaaatttccttatggtttggatactacttatgttgaaaatgagaaggagagctacttcacttttgctcctacttccccaaccgccttgactcgaatgaccgttgaagcatcagggaagctatgtcaatacatttggagggaaagctcaaggaattggacagagaattggtgtatattagctgatggactgcgtgagttcaatatgttgtgtggtcctttcactgtgcgtgacatatacaatacaactctatgtgtttgcttgcaagggtttgaacccaaaaatacaaaagcttgggagttaggtgatggcttggatggatgtgttaggagagctcctttgcaatgcaatgcacgagatgatacgtttgtagaggtacgaaacattgtctttctatcacaaccagaagagataaaagttaagaacattgaagcatgtagattagcatgtttgagtaagtgttcatgcaatgcttattattttgatgatagttgctttatttgggtggatgacttggtcaatattgtcccaagcgcacctcatgaagttggcccatattggcacataagaatgggagcatcccatttgtctgagagcaaggttgcaaatcgaaaaaccacttggattgctatatcaatactactggggtggttgttcttaactttcttaggcattggtttagtgtttttgggaatgagatattttgtggattcacttgaaagagtggaggattctctagtgttgtataggtacaaagatttgaaacttgcgacaaagaacttctcccaaaaacttggggaaggtggctttggttctgtttacaaaggggttttggctaattcaacttgtatagctgtgaagaaactcacgagtatgcaacaagcagagaagcaatttcgcgcagaattgaagactattggagcaatacaacatgttaacctcgttcgccttcgcgggttttgtgcagagtcttcaagaagatgctttcgcgggttttgtgcagaatcttcaagaagatttctagtttatgagtacatgcctaagggctcactagattctagcctttttgggacaagtctgactgtcttggattggaatgccaggtgccgaatagcgattggagtggctaagggactatgctatctccatgaagagtgtagggaatgcatcatacactgtgatgtcaagccagagaatgtcttgttggacgaagataataatgcaaaacttgcagattttggacttgcaaagcttgttgggagggatttcagccgggttttgacaaccatgagaggcacaagaggctatcttgcaccagagtggatttcaggcttagcaatcacaccaaaagcagatgtgtatagctatggaatgttgctatttgagctcatatctgggaaaagaaacaacacacaattggagcaaggcatggaacattacttcccttttcgagtttcgaagtcattgagccatggagaagatgtttttcctttattggactgcaggattgaaggaaatgcagagaaagaggaggttaatagatactgcaaagtggcttgttggtgcattcaagaagatgaaaagagtaggccaaatatgagtcaagttgtacaaattttaatgggagttaaagaaattgatttgccaccagtgccactctttttggagcgccttgccggagtctctatggaagccatgaactactatcaagttaccacttctggtggtaccactcaatactactcattctcaagttaatgtttcatcttagtctctcataataataacaaaaaagtttacatatttcatttcttgagtaattattgatagtaaatgtttgttttcttttaaataaatgtgatgttgcaaataattttattttcgtaatttcttactcacaaaatctcttctttttttttttttttttttttatattcttttttattttaccttaaacttatattttttttaccattcaataacttcttcatattttttttctaatttattaaaatattttatttatcaaataagaaaaaacaaataataacaacaaaacaataaatatacaaatatatatttaatgagggaaataaataataaataattagaatatttgagctcactttcatactttagcaaaatgtagctaagaaaatgaagtgagctattatacataatttagcccacctattagagtaccgaaaattgaacatttaggtggcgtttgattggaaggaataaaattataagaatatgaatgagaatgggaataacaataggaatagaattg

SEQ ID NO: 231318 - DNA, 934 bp, Cannabis indica
aaataattcaaattaaattaattaattatcttttaattattaaattaaatatattatttaataatttatttaattaaaatataataataaaaaaaaaacaatttaactgatttctattaatcagttattagatatttatatttatatttgaatttgaattctcaattcaaatcaaattacatatttttttattttaataaaagattaaaaggttttatttataacaatatatatgatatatagtatcataaataaataatagatacaacaatcaagtacaagagaaacaataaagtaacaagagaggaaatatgaattcatttttctattcctctatctctctctctctctctcctcatctcacacgcccaacaccatctaaggtggtgtgagattatgatcaacactatcttaattacagtgtctcatgggttgagaatacactgtgatacataaatttgttcatcctataggagttaatagcccactctattcctgagtgttgaggctggcttagaagattgcggtgtgaattcttcaacaatagttcttggatttaattatcgtacttatactaaaagatagcgatgatctcctgatagactacaagaggtattgtcttcttttcattagtctagatttaatctatatatatcatgttgatatcatttggcttatggttcatattggataaaaactatgtttatcaaatctgcttctgcttttccaaccttgatataaaccataaaaactaacatatgtaaacttgcaaaagctgctttacctttcaataaaagtacaacttgttctgttgcaccatttgttttagtacactgatgtgtggggaccctctcatgttgttacaaaagaggattctcgatactatgtttcttttattattgatcacttatttttgttgggtttttcttatgaa

SEQ ID NO: 231319 - DNA, 684 bp, Cannabis indica
aaatagccaaatgaagatgaatttcaagtctctaatttttttacacaaattcaaaacataaagggggacattcacataccataacgccttgtaactccttggcgcctagcaaagaaatctaaggtttccctcacagtcatttctttaatatgagaatcatgctcacttacatacgatgttgttctttttgggataaactcatccaagtcatgcccattataagtcacctttccacaaaaaaaaacactaattcacttatataaacatacataaataagttaaaaccttgaaaattagttaatttaaataaaaaaaaaaatctcactttcaatcttgggtcaagctgtccagccaaagccagtaaaagagttgtctttccagaacttggaggacccaataacaatgccattgtaaaaataataaactagcttattgatttatttgtttacttttctttcacatacccaaatgaaaagatattaagtcattcacctgcatggttttataatttcactaagcccatctagtatagcaatttttttcttcttgcttcgaattatatgtagataatttaagaatccttgaaaataaaatcaaataacaaaatagtgatagaaaattattaaatgttatggtttaaaaacaaattttttttacctctatgacattcgttgtgaagttaat

SEQ ID NO: 231320 - DNA, 563 bp, Cannabis indica
gtatgcctgtgattattatttttagtacattttccttgatcttccttatcagttgatcaatgggttgctgttttccaccctataattgctcatttcgatccctccaaatatggtacacaagacttgctagagcagcagccatcaccaacctttggaacctggagccttttagtctctgcatccatttaatcactctgaagagagttatatcagctggtctccactataaccaactcttaactctctgcaaacattacctgtagcagtgaaaaacaagatggtcaattgtttctacctggtgtctgcagcttatacatgaagaatcttcaatgatattcattctgtgcaaccgctttcttgtcttcaatctctcctggataacaagccacaaaacaaaattaagggtgaaaatcggtcggttatggtcggtttttacaattttataaccgacgagtcagttacggtttttattttacgaaaaccgtaaccgaccgtttagaaattataaccgtataaaaccgaccgtacggttgttgacagtttttggcagttttgacgttttt

SEQ ID NO: 231321 - DNA, 870 bp, Cannabis indica
attttttttcatatttattttcaagtcttatggtatttttgacaagtgttgctcaaactttgttgtatttgggatagtttaattatttaatgatggtccaaaccgcataaatcgcaccgcaccatttttacggtgcagtgtttgcgattttttaatttcgcagtgtgggtgtggtttgagaaattgaaaaaaattcatgtgcgggttggtttgaaaaaatagtcaaaaactgcaccacccgcaccgcgacacccctattaaaaacttaaatttagtgtgttttttttgtaatttatagtgttgtagttagaattgaaaaaaataattagtgtgaaaatagtactttttggtctcttttagtacgtaggattaaactgcattagacatgctaatttgttcaatctaatgtttggacatgtcaaaatctggataattaatccagctaatctcatatgtctgagattatttttcaataactaataaatagaagtgttaattaaagtatctatttaaataaataaataaataaaattaagtgttccatttttaaaattattatgatattttaataaacaagttattatcataataaacatactagattaataatagcattataaatattaataatactaatcaaatgtttaacaaacatatatatggattgtttataaaatataaataaaatttataaatgtatttgtattgtaacgcccgtatttaaatatttttaaactcaaacgatattttaatatatttcatatcttcatacttatataggtcgggatcccgagtatcaaaatacgatttaaaagtactttactaatatgtacatatataatttttttttaaaacttgctagcatgcaac

SEQ ID NO: 231322 - DNA, 2808 bp, Cannabis indica
aataggaatccccgaaacatgttttagtgtctttatgatgcccatttttagtgttttattatagtaaagtttttaatattatcacatattttaatgattaattaatctattagtactaaactagttgataaaatcacaaaagtgtcgtccctattgattagggaattacaacacaggtctggccgacctccaccatacactctctcagagtatggcctgctagaccctgtcatatgagaatctgcaacccctccaaggagggccagttagtcaagtccctatagcaaaatatccttatgtgaaagcacacttagaccaactaagggacatgatttaggacatagctagtcccaacgctttagatcttgaactagactggtcaaggggatcaccattctcggcatacataaatgccttgcccttgcctaaattcaagatgccggtatgaaagatgtataccagacgagaatacccgtcaatgcacatcaaatatttcgagatgagctcgatctttagaaggttactggtcatgtgcgatgtcacatattcccaacgacattgttggaaacaactcaacaatggtacttcaaactggccctaagaaggtttaattcttgggccaagttctctcaagaattctacactcaattctcatctttgaggcttgtaccatcccagctagaagaccatgtcaaagtcaaacaacgaaaatgagaacctttgaaggattacatccagaggttcatggtcgaggccacaaaggtcaaaagccttacagaagagggctgatatacgaccacactgtgggggcatactcccattgagtgacttctggaaagacattcaaaggatctcaaccaacaacatgaaggagttccttgatagagctgatggctttatcaaactcgaagaagctatttgacaggcccagacggggcatgtcaacaacatgtaatcacaagacatcctgtagtctcatgacctaccaggcacgcgggcagacacaaataactctgcccaaacttctagtggtaagaacactagaaacaaacgcagcaccaataactctgggagaaatagttgtaaaagggggaagtttaacacttctcccatgccacaaagaacaaggaggagaagtatacctactttaccatctaacagagaaaccttatgccatcttcatggccactcagggaacagtcccctatacgaagccctttaatcaaaagggagttgagaaagaggaacatgtcgaagttctaccaatttaacaatgacttcggccatgacaacaatgagtgtcagaatttattgagggagattgaatacctgatcaggcagaacaatctcgacctgcatcgttatgtgcagaacaaccaaacttaggcacaaggtgcctagaacggagactcaatgccaccaccaggggtaggacacttaggggtaatcatttgcgtaccccacattataggtgaaaccagcaaagccagggagcgctatgctcgggcacttcgtcacgagcctaaagtgacatcctagcagtcaaagaaaggggctctaagcaaccaaagcttggagagctcatgatttccttcataaaagaagatgccgctcaagtcagtttcccgcacaacgattccctggtcatcactacacaaatttggaacatgactgtaacaagatgcatggtggatgatagagcctcctccaacattcttttcaagtcaacatatgaaaagatagggctccaactcaccgacttggcaccctacaaccaatgtatggattctttggccaaggcattgtgcccatcgtgtatatcagattacccctcatagttggagaaaatccaacgaccagaactgtgattgcgcagttcgtcataatcgatgttccattggccttcaacagcatgataggctaaccatcccttagagatagagttctagactacgagtcactctaatatattctacgttgtattcacaacgcaaaggttcaaatcgaaagatacctttgtttatgcttaatcttattgcttaggatactgctcgagtaaaatatttttttaaaatttcaagtggtggattgttggaactttgtgaaatcttacaaaaataaatagtgaagtctgtgagtggttggagtcccacatgggatagaaacacttcattagaagtgtataaaatagtgcaagtttgagatttgggtatgggccgcaaggggtatccagttttgtgtgcatgggtgaggacgcacacatcggaccaccacacgtacgcgcgcactatcgctgctgtccgttcgttcgtctgaccgaccgtgccatgccgagccgagttggcgagtgagtgtggtgtcactttattttttaaggaaaatttatttattaaatttttattcatttaattaattaaaacagtttttttaaaaatgtgtttgattaattggtaaatagagacttcctgatttttagcatcgttcccacaatcgaatgttctaacgtttccttcagtaacatctttcttctcgttactaccttcagtgcattgcctatataatgcttctgaactaacgggagaaatacatctctttttcactgaaaatatataccatgtatacattctattatatcacatatatattctgagcagtagtgagtttttgtgtgtggtatttcaacggtcctttatcgtgcaatagagttctgatacagtgtgtttgactgggttgttttatccgggggacaacgaggctaatagtctacttgcacatatctgggcactgtcgcgaacgtcttaaagagag

SEQ ID NO: 231323 - DNA, 710 bp, Cannabis indica
aagatcagctcctcctctcttggattcggcttcaatgtctgaacccattcttgcttcggtggcaacattttacacatctttctcggtttgagggctcttgaacaaaggttttccagccaactaaggctcgtcttctgcaattaaacggtaatttctctaaacttcaaaagggcaccttaccgattgcagaatatgttgagaaagctcaagccactgccgatgctttggcaattactggctcaccagtcaacacccaagatttggctctccaactcttgaatggtcttggaccagaatttgatccagtggtatctagcatcacttctcgtagtgatcagctttcttttgaggacgtccaggccttgttactctctcatgaatcaagattagaacaccacagcagtataactgatctttcactcaagatgcaagccaacttgaggttaaaccagtcaagaaatgggggaaatcataactctggtgttcctttttcacgtgctccaaacagtgaacttggccgtactacagggcgtttctttgggcgtggaaatgtctcaaaaattgatgtgtcaagtttgccttcgctttggtcacacagcggctatttgtcactaccgctctgacaagaacttcatcacccccaagtatggtagttcctcttcctctcatacttttttaactgaaattgactctacctatgatccacaggc

SEQ ID NO: 231324 - DNA, 1222 bp, Cannabis indica
cctaagggatgaaatttaatgatgatagatttagaattacatctggagtgtgagacatgacttgatagatcattgaaaaaaaattaaatactcaagttgaatcacatcaatcagagaaaaattaagtgagttatggttgttttactaaaggaagttcaagtcccacaaccaggttgacacccagcgcccaggttgacatcccacgcctaggttgacatctaacgtaaacttggaagatgagtaagtataaaaacgtcaaaaggatgtcctttaagattcctaaattatagtttgaccccacgtagtccactaatatgttctggtgaagctggtcaccagttcgcagagatgttgctatttcacggaaatgtgagactcaaaactcttcatttgtaggtgtgctggaaatgagaaatgcaaagttgtgaatttgattcttctaactttgtagatcttggattcgtaaaaactagactgacggtcaaaatgacatcagtgacagataagtaaaacctagtgcatcaggccatttgttgacttaagcattgggccttttcaactgagctcctgggattctatttttgatacttccaaggtttttgaaattgaggatggggtctcctagacagtttttgaccatgctagattcaataggttcattggatttggcatttgagtaattaaaggtagcattttaggttgcttgtcaacctcggcgctaggcccaaccctaggtcaacctgggcattgcgccttatttctatggactcaaccttgtatttttctccccaagtttacttgaatcttttttatttttaatgatggaaaagattctcggaatactttttgctaaaattgatctgaaatagcccaggttgacaaaatgtcaacttgggcactgggccgagccccacgtggtatttcctctcaatgtgtttacacctcttgtggcttcgaggctctttagtttttgctatagcaccagtgttgtcacaaagtaaaaccagtgggttttccattccaggaacaacaccaagttctacaaagaactctcttagccaaataagttccttagcagcgtcagcagcaactatgtattcgacctccatgttagagtcagatattgccgattgcttgacactgttgggttttatggcctaaataaaactcaatttcaatgtaatctctattactcaatatcaataaagaaacataagtattt

SEQ ID NO: 231325 - DNA, 840 bp, Cannabis indica
tttatttattttggtatttgaaaataaaaattaattttttttacgcttgtgtattgtagttatttaaaatatttttgcaaattttaaataatttaaaaaattatacaccaaaaatatagtttaaacagtctattatacacataataacgtgtgaaatagattgtttgaatattagtttttatattatattttattaaaaataatataataataaagaatattatttttactataatttttaatattgtgttggagttgagacaccaaaattaatattgatgtagcactaactttagtattaaggttggacaattgtttgtgattgccaagtgttaattaagaaaataattaaaagcaaatagagggataaatcatgtctttcaggatctagttcagaagatagattcctttttgtcttgttttcttaatgtctccatgtactatgtccctaacaattctaatgttttggctcctaatgttacgttaggaaccgataaataaatggtttatcttaatgttacatattattcaaaccaaaaaaatatgaggttatgatatatttcccttttccagcgtgaatatcaggatttttaaatatcaattataatttaaaaaaaaaaaaaaaagaaaaaagaggtgggcttatttggaatatgtcaaaatcaatccaacccccctctcctacaacctcatgaatataagatagtggattcttttagtcatggatctttctttcttttctttaatgtctttatgttacagtacctttcttctttataatccatttaattaatttcctatggaaaaaaaaaaaaaaaaaacaaaacaaagaaagaaagt

SEQ ID NO: 231326 - DNA, 865 bp, Cannabis indica
aaattctgaacatatcattacgacaatcatccaataattgtaacctagtaagttggtcttactaactctactcatgagttgttacagggttgacctctgagttgcacggatgtaccccaagacttgtaagcatgaatttccaagatcagtgatccttaggctatatgcattgactcattcattctatgactggctcttacagtttatgtctctcgactgccggggatgattgttcactaatctcaaaaatagttgatttttggggttaacacttgccccctaatctacaagaattcttttaagtgttcttgtagactgaattagttgagggatcttccttgccgaggcatgagagaccttcttggttttctctgagacagtgccccctttgtatgggaggcttcccttggttaaacttaactttgcgccaataagtcaagcaacaattttacttggccttggctaaatgactctaaaggtggctctttcatccaataacttttgtaactggtgttcatcgagtgactctagggaccattctttggccaaacccttcataattggcattggccaagcggctctaaggtcactctttggccaagccatctttgtaatcggcgttggccgagcgactccggggtcactctttggccaagacatcttcataactggcattggccgagcaactctgggggtcactctttggccaagccatcttcgtaatcggcataggctgagcgaatctggggtcactctttgtcgaagcattcttcgtaatcagcgttcacctagcaactttggggatcactccttggccaagccattttttgctacggtaggcacacatatactttgggggtgtttt

SEQ ID NO: 231327 - DNA, 690 bp, Cannabis indica
cacttagtcgataagtgttacttcctacaaggatttccacccggttatggagataaaaagaaacaagaaaagggcaaagctaaggccaacaatgcctcttccagcaaccccaaacctgacttggatggaccctctatcaatgctgatctatcttctcaatgtcagcatttgatttccctcctcagtcaataattaaacaaccatacccctactgatcttaacatcatgcctgctgcagcatccaatcttgcaggtagaaactctaattcacatcctataccttggataattgatagtggtgctacacaccacatgtgttctaatattgcatgtttttccacattcacaactatcccatttcctaagaatgtgctcctaccaaatggacagcaagtttctgtcaaaaacattggaactgtccatataaattcacatattactctccataaggtgttatacctaccaagtttcaggttaaatcttttttctatttctgcatacatggccgaaacacctaattccattttgtttcatgatgattcttgtctaattcaggatcctactcggaatatagtgattgggacagctgaaaaacatggaaatttgtacttgcttcaacaagtctatctccctactgcagctgccactgtttcatcttttttttttccaataaaacaagtgtaaaccaat

SEQ ID NO: 231328 - DNA, 852 bp, Cannabis indica
tgtatttctcaagtttttgaaaacattttatgagctaactctcaagttcagtggttcactgtattcaactagcaacctttatttcttagaaatttgtgaggtgaaacaagaattgaatgttttatctaaagactcaaacaatttgctaggcaatatggcagctagcatgcgaaggaagtttgacaagtattggggtgatccagaaaagatgaatgttgtcttatttcttggtgtagtacttgacccacgatacaaattggagtatgttgctatttgttttagtatgatatatgaggaaacagttgccaaaaacttgttgaaatctattgagaataaattgcgtaggatgtttgatgaatataatgatatcgcgcctccaccaccctctacaagatcaatagatgaaatttctcaacctatggagatagaagcttctacaataggtgctaaaagacaaattctttcaactttcatgagacaaaaggcagtaaagagaggtgggagtgaaaagaatgaaattgatcgatacttgaatgaagataatgatgatctggtgatgactttgatatactagcatgtggaaacataatgctagtaggtacaaagttttgtcaagaattgctagggatgtgcttgcgtctcccatttctacagttgcctcagagtctgctttttcaactggaggtcaaattctcgatctatttaggagttcattatctcgtaagatggttgaggcattgatttgttcaaagaattggttaagttctgaaggtaaaccaattgttattcaagaatatatggatgaagttgaaggttacaaagattgtgttgaagttcttccaggtaatagac

SEQ ID NO: 231329 - DNA, 2074 bp, Cannabis indica
tatttatactagctagtctctgtacccctttcattaacacaaatgttttaaatatgttcatacgaaacatcacattcgtgtgcgttaatacattatttatttctacttaactacacaatttccttatcccataaataatatatatgtgtaacagtacaataaaaagttgtaacctgggtcaaagaaacaaactttatgctggttttcttgtgtatttctaatttgtgagtataggttgtggaactagagctcattttgttataagcatatcgtttagatgaaatagtaaaaataaattagcattgggttactgtttctccttaaccttaactggaaaatgtgttgtagatgactaggcaagaaaatcaggaagatagcgaggaagaagattggatgataaactgggatcgcagacgaagaacagctgcagctcaagttctttgtagtgtagtctatgccttgaaattgtaccacttatatcatagtaagcacaatgtaaataagcctcaaagaaatgtgacagggaaaaaacgaaatgcaccaggaaacaatgtatgcaggagagagtttgaaagtataagagaagcgattcacagtgtggcagaagcaataagggaagcaaatgctattgctaaaaggaatcaagttcaagtttatagagaggaagaagtttttgcagagttagtgaatcttggtgttgataaaaggctgagatataaagcatacacctttctcactcaaaatgcatcaaaggtgagagcattctttggttgccctgttgaagagcgcaagaattttctgctgcaactcatgcatggaccgcacaatctttgactacggctcttagtgtttgatagactgatacacaaactcttgctatttggtaatattttctgtttcagcttttgtgctgtgatttttctgtctctaaattgtgctattgctgagtggtgttgtaatgcaaagttcagtctcaaaacttctaaagtcaattttcatctcattagatagactttcaactcatagatactctttaaggttgaatccatcatatttgtattatttctcttttctgtttcacaagttttgaaactgatatttttgatgactctgtcagcacacacatgataataagaatgaaatgaaaccccagaatactaaagatgaattcaagggaccccatatgagttataactcctataggcccttagctttttcaattctaattgaattctcaatcttttgtattagttacttcaaagaagagaataaaaagcaaggaatgtaatggaatgtagtagtgattgttgccatctttacttgcagtattatcatttaataagtatatttggcatatctccattatctctaagaaaaaattggtgtcctatgtttggtagagttccatgatctgttctgttatgataaattatgtgtacacacttggccgtgatttgaaaaacaatcattcttagtattgtagaatgtgggacaatgtaatgaataatagtgcttcagctgttcacttgatgacttttgatgtacggcattcttctttgtccactccaatcttaacccattggttcttcttgcactacaagttagtgactagaacctaatcatcttttatcatgatttatatgccatattattaatatatggaagaaaatatgctgctctatatcttagttggactctattagtgaaattatttgaacaagtgatcaaaactcttgcacatggtccactgctaattaagctagtggaattattccactttccatgaagtttctgggttatttgttatactccttttattgttagaatgctacagcataactcgtcatcatatatgattatatatgtgtacatatatatatatatatatatatttatataaacacataatggtcttgttgattagattagtggggaagaaaataaaaaagagagaacatgggcttggcgggtacgctatgttacatcttcattgattctgtctcggacaaataagcatgtgaatatcaacacctctcctagagacatgatagaattattattattattattatta

SEQ ID NO: 231330 - DNA, 526 bp, Cannabis indica
ccctatttcacataccatatctcactcatgtataaatcacgctaaaaactgatatcatccaccaaaaaatctcttaagggtatgtaatgcttctatgcattacgcttaaaataaagaaaacccaactaataccaacacagtagagttgtcactctttctcaaatgggaattaagagatgcttcacaaaatctatctttatacgtatgaatgatatttccaatatcatatcaccatcctctttttcctctcttctcaacagcttgcaaatcaggggccatcttctttatttctctcattgtgcccaaatcataagaagaccctaaatcattcattaacgtttgtagtttgtgctctgggtttgagtttttatttatgtgtttttggaggttttggcttgggcgtagacttaatagacatttgctcttcatctacttggttcaagagtttcagaatcagggttttggcttagatctgatctacttggttcaagagtttcggaatctgggttttggcttagatctgatt

SEQ ID NO: 231331 - DNA, 690 bp, Cannabis indica
gctgaggtgaaatcttaatcattctagctacctacccagaacccttcctgcttagggcatcagccaccacataggccttcccatgatggtaaaggatttcacagtcgtaatccttaaataactccaaccaatgcctctgcctcatattcaaatctttctgggtaaagaagtatttgaggctcttatggtaggcataaatctcaaatttctctccgtagagataatgctgccaaatcttcaaagcaaacactaccgcagaaagttctaaatcatgagttgggtattgctgttcatattcctttaactgatgggaggcataagtgatgacctggtaagcctgcatcagtacacaccccagaccctgtctggatacatcgcagtaaactacaaacttttctctatccgatggtagggctaatactggagttgtaatcaatctatgtttcacacttgtctatccacaaaaactgctaattctttttggtgagtttggttaggggtgtagagatcttagaaatccctctagaaactgacggtaataaccaaccagacccaggaagcttctaacttctataattgtcttcggtctcggccgatccccgacggactcaatcttccttgggtccaccttgattccatctttactgataatgtgcccaagaaaagacacctaagatagccaaaacttgc

SEQ ID NO: 231332 - DNA, 1407 bp, Cannabis indica
atacctgcggattactaaatttgacaaataaaattaattatttttttttgttcttcattgaatcactataaattccaagattatatcctttaactttgtaactgaacaacatattgaaagcttcataaatattaaagcccaacacaattttgttatggatttttttttttctaacactttaaacattttttttgtatttaaaaatcacttgaagtaacacaaattgtaaatttaaaaaaaaaataaaaaaaaatagtatataaaataattctcttttgtttttactatagtcaaattgaaaaaaataaataatcaactcttttttcttttttttttttatatatatacttttgatttagtattttactataggcaagcacatgtacatgaataattacatataaaacagaaaaatcaatttaaaaggaaaaaaaatcacaagtatttctttcctattcaataataatttacgaaaaagtattatagtgcatgtttatttaaaaggaatcttgtttagtaaactttgtaacaagaagattagctagcgggccaacataaattaagaaaaaaataatctacatttttataaagaatgagattttctttcctaatttatttatttttaatgattaaaaatgaaaagttttctaagataagttttttgcttaccaaaaattataacgtgcaatattttttagcactagaatttatattcttattttaacaaatattattactttatagtgtgatattaactaaatattatatattttaaggaattttaattcagtcatataatactttttaattttattattcttcttgtcttgatattatatatatttttttaatagaaaaaataaacttcattaaccaacaaaatcaatcaccaaacatggtaacaactcactaggaatagactccaaacagaatataaattagagattctagcaaagtaataagacactatattagcagatcgctaaataaaaattatagcaacatcacataattcagcaagtaaatttttacaactttaaatattacttgatcaaacaaagatatcatactaatagagccacgtaatgcttgcacaaccccaagacagtcaccctccacagttatatgttgccatattagttgctcttgaatccaagttgtagcttccttaacacttatagcttcggccaaaacaggttcaatcgtgcctatatggttcgaccttcaatgagcatacccttcttatgcaaccatacccataccaaatgaacgacccccatcgaacaaagtcgcgtctacattaaccttaataatgttagcgagtggtggagaccaatgctctataccatttatttttctgaatatcagatcgtaatgagcctatgatagaattttgagcattattcc

SEQ ID NO: 231333 - DNA, 3400 bp, Cannabis indica
cgcctaagatagttagggtgttacacacgcgtgtcaacatccaggcaaataccaaaagtttacattcggacaggtgttcgcacgaggacttgggggtaaatattatcccaatttttgtccatttgatgtggcaattacatgtgattttattcagatgaagcttggaataacgtggagctttcggacaagatcatgccaggaagttcttgcataaggctaatatcgataaaatgtatgtaaccttccaggaagcacgtggatgagttaataatttgacggtcagggagagagaagatcaacataccctgcaagattgcatcttgttaaaaagacaagtctcaaagagagcttggctgggctgttaacacaccggctaagggaaatgaacctaaaaagtccgggcaggactaaacgcgcttcgatttcttcctcaacaaactccacgaatatgtccaacaacatcctacaaatacaagttcgactcttcagccaagaagtatatgagtttcaaacaaattgtaactgcatcctagaatatagggatgttttctttctattgctacctttaaggaactaattataacaatctccccttataaatagttgatgaattcacagggagaaaatacatgaaatcattatcttgactttaagagcacttttgtgaataatattctttgtaagcatctagagagttgtagctagaattcactttgtcttctttagtgatctgcacgacattatcttaatatttatacaactaaaatgggagtaggttattactaatatttaaggggctaaacctctacaatttcttgtattctttatatttacttattatttctaactctttattagtgattaattagcatttattagactcctagtcagttggcaaattctccagtcaatagatcactcaaatgtcaattttgctccaagtattctctccaaaagggtcaaaaacagggtaggtaccttgtcctcaagctctataaccttgaaagtatcaaaaccacatcctagaagctccaaaataagtacccaacgcccaggttaacatatggcctgatgctttgggtttcgcttatccgattctgattccatctcggccatttgtctagtttttcacaatcacttagagccatgaagtcagaagagtcaaattcacaacttcatatttttatttttctgacaagggatttactcaaaaagcaggtagtttcaagtctctcatttccacagaataacaacatctccaagaactggtcactagcttcgcaagaacacaaaaacaggctaagtgatgttcaaatatcacttaggcatcaaaaaatacatccctgatatgttttcccactcacccaacatctaggttgacatcacatgtcaacctggacgctaggccgagaacaaccttcagtaaaatgaccataactcactcaatattaatcgtattgacacaattcaacttgagttttagagctatttaaaaactctatcaagtcatatctcccacttcaaatgaaaatatgaagctattgactcaaattttacccccaagggagttacaaatttaagctacaacttacccagagtgggtcccgttgttgtaacttaaactccaaaaattgacgatcaaactcagaagttaatttttaccgtttgataataatctacgatccaaaatagcctaaatatattcttgcaatttctttggataatgttattcctatttaataggacctctttcacctataaaaggagagttagtttagtttatttttcaagttcagaaaagtagccataaggttagagcatccaaacttagctatttttctgtaatccatctcgtgagaattaaaactcgaagtagacgtagctccattactaccgcgagagagggaatgaactactataaattgttgagtctctctattcatacttaacatatatctcattcttacaaatctagtgagtgagtgtgacttagaagtctctgtctaaatttttcagtcaacatggttaaatagatataatcatatagaacatttattttttcttatctctttctaataagtgatctaatttattaatatactattcaacaatctaattatctacaaccaatatatattataagttatttcttgtcacttcataacttgataaaaactatacatctgagtacatacaaatatatttgattacttctataataattgtattttagacttcatcaagaaaaatttcaaataatctttttatgattctttataactttgaggaatatagttatattaaattatattgggtcacttactaattttactataatattagtaatttattattcacttcttaaaatatataaaatgagttaagagtaactatatatgtacatattttataccaattatagtttgaataccatttgttatctatatttctaaaaagaagacacgtgttataaccgaaaggtaatcgccatctaaaaatgggcctaagccttcacgcttatagaagtccaaaccaaacttggaatgggcctaagcctaactaaggctaaaggttttgcctccaaaacttaacattttttcagagcttagaaggcgcctaatcttttgggacacaaaaggaacaacgatctcctaatgaaaataagagtatatatggaagcaagttgcacaggatgactctcggaagcctaccataatcaggagccagatgtctaccatgaatgggaagcagatgtctcccctataatgacatgtccatcgctctaatacatgattgaatattgtcccatatgtcagaccatggtagtacgtgcactacatatatctcttttgtccaatgactcctttgacacctttgtctgtcaggcatagtctccgtgcaacacatgccttacactaagcgatctccttgccagtacgaaatcatcactccatgagttgaatatctttagtgggcctcatactcatgtgtttatgtattttactttaatagtgggattatttttataaataacctgaatgggtcacgggtatgccgggacccaaactctagcctatagaaacttcactatcccttcatgcaaggtggacaaaattttagccaaggctctgatggtttaactttaagcttttgcttttccaagagaaacctagaaaactactttatagcaagggttcatgttccttaatgtaaaactcatttgtaatacatttaaagcctaaaaggccattacactaactcgtggactaggaatattaaatttccgaactacgtaaaaaacctccatcttatttatttaatcactatttaatttcctaaagctcttatttaattagtttcaaaaaatatcagaaaatttttttagagcttttattgagag

SEQ ID NO: 231334 - DNA, 1007 bp, Cannabis indica
caaaaattagcactgctaacttttgagattagttaactgacagttgaaaagaataaaaagaatgagccaagagagtcactctagaggagtagcgatgcatggtccccggcatggtttccatgcaagccatttgacatgcatgctcaagagtcactcaatatgaatgctcaatgtcactcaacatcgatgctcaagagtcactcggcatgcatgctcaatgtcactcatccatccgtgctcaatgtcactcggccatgcatgctcaatgtcactcaaccacacatgcttctcacaaatttcactcagcatgcatcttccaaatgtcactaggcatgaattttcacaaacgtcactcggcattcctcttcctaatgtcactcgacatgcattttccaaatgtccctcggcatgcctcttctaaatataactcgaccatgcatgctcaatgtatctcgtccatctatggtaaatgttacacagccatgcatgctcaatgtcactcagccacgtgtgctcaatgtcacttgttcagcatgccactcgacatcgaatttccataacaacatgactaaacttagtagaattctcccaagaaagggaagatttgagcgacaaaggtagggtcccaaggacaaggcatgcatgcaaggaatgtatggccacatcttttacaagctctaaaagcaaggtggtacgagtagtggaggaaccaaacttgtaagacttgaggacccatccaagggtacactacagccactacccttgcgacctgggacaatctaacaccacacaagggtacaaggtgcaaggccacctcttgcagctgcgatttgcaacttgaaagtgacatcttgtctctttgggatcaccatgtatctcagaccactagagcctataaataccctttttcagatgtgagaaggggttggaaaatcaatcttgtaatcaacacattgaaaacaatagaaagaaatttttctcaaatcaaaaatctcattaacatttga

SEQ ID NO: 231335 - DNA, 829 bp, Cannabis indica
tttgcacgacttcttctaacaattttccattatcgtctttaggtatttttcctggaatgaactgatcaactgtttccaattgttttaagatatcttcctctgataatattttaggaggaggacgactttcaattttaccatcgtagcgtttatcttttcgccatggatgatctaatggcaaaaaacgacgatgccccatataactaattttacttaatatgggaaacgacaaagcatccacattacaaacaggacatgccttgtaaccttttgtgctccatccagatattgtaccataagctggaaaatcatttatcgtccacaatattgcagcacgcattataaattcttttttatttgatacatcatatgttgttaccccttcctcccataattgttttagctcatcaattaggggtcgtaagtaaacatcaatgtctttacctggagagttgggaccaggagttaataatgccattatgaaattattttctttcatacatttccaggggggcatgttataaggcactaatacaacaggccatatgctatagcttgtgctcatgtttccaaatggattaaatccatcggttgcaagtcccaatctgacatttctggggtcttttgcaaattctggaaattgtttatcgaattctttccaagcttctccatctgcaggatgtctaagtacaccttcagtatttacacgcttttctttgtgccacctcatttcatctgacgtatgtcgtgacataaaaagtctttgtagacgtggagtaattggaaagtaatgcatttttttcaccggtacattctttttcttctttcc

SEQ ID NO: 231336 - DNA, 2315 bp, Cannabis indica
tgtgtgttgcatgcatgtgtgtgtttatgcgcgttgggggctaacatgcgagcccatgtatggggcttgcatgcgagccatgcacgcatgcgggtgtgtgtgtgttttgcatgcatgtgtatgttgtatgtgtgcgttgagggctcgcgtgcgagcccatgtggagggcttgcatgcgacccgtgcatatatgcaggtgtgtgtgtgtgttgcatgcatgtgtgtgcgttgggggcttgcgtgcgagcccgtgtaggggactcgcatgcaagttgtgcatgcatgcaagtgtgtgtattgtgtgtgcattgggggctcgcatgcgatccgtgcatgcatgcaggtgtgtgtgtgtattgtgtgcatgtgtgtgttgtgtgtgtacgttgggggctcacatgcaagcccatgtgggggctcgcaagagagtcatgcatgcatgcgcgcgcgcacgcgtgtgtgtgtgtgttttgtgggttgtaagtgtaaggtgagattttaatacatatttacgagaatattattggagaaagaatcaaaagacaagacatgcaagagaaaagcgtacaagtgcgcttcctgcaagctctgaaagcaagaaggtacggatagtggaggcactccacgtacaaggtatgaggactcgaccaagagtacgctgcaagcaccatctctgtgatctgcgatcacctaataccagacaaagctgcaaggcacaagaccacctcctgcatccatagtgtgcggcgcaaaagtgacagcttatctatttgagacaactatataactcaagccattagaccttataaataccctattcttaagtgtgagaggagattagaaaattaattgtgtatgtcacatgtacaatgttgagattttatgccctaaataaaacctattttaatataatcttatttgttattaataaaatattagaagtcatttatgtttacatgtctttttcatgcttttggtttgatatacaatttctgttaaatctagaacatattgtgactcacaattacagtgatgtcaacacagtggaaggtaattgggattatctgctttaaaattttatgtctcattattcatcaatgcactaaatttacactaatgtgatagttagtgataaagtttacttacaccttggataagtgttatgtcctttctaaggtattggtaaagtatgctagtaatgaatgtatggagtatatattgaactggaccgatattgaacctggtaaagatattataaatttattactattgtatctttctaagtcaatatcaccaagttgatcttaaatcaaaagatcttaatccttatatggttaggttcgatctcaagagtgttatttatgttcttagagttgttcgttgaagcttaccaattggttcgagcccagacatacatcttggaaatatgatagtacaattgagtgggagcactaatcataaatacagaatctatagcttctatttagacatagaagtaaaatgatgaattcctttgagcttggcttaataaagataaatggaagaactcttattacagtaattatattagtttattgaaatatcatttataagaagctaagtgttttaaggataaaatacattgaggggtagaatggtaaatttgtcactagtcgatgtaaatcatctatagaggatctttgattatttgattagaacgatgaataattaatagtgtatttatatcttgaaacatatcgagcattctatataattaagagtacaattttgaatctatagtggcacaatgaggaattaataagttagagaatttacttggtaaattctagatctacttattggaagtttgattatatagacccatggtctccacactagttgaaataatactgcttgtagactgatcagttaattgattttaattaatcaattataattccactactataaatattacattttgcgtcggttatgacatcaaaaagagtacataatcgacgtaaataatcaatggtcaaaattagcgttggttattggcagccgcaggtttagcatcggttcttagagaattagtgttagttatgcaccgacgcaaaatactcactttttgcattggtgcacaaccgacgcaaacttcctaaattaaaaaaaaaaatcacacataataacaggctttgagcccatttaagaaaaccctaaataaagatttaatactcacatgaccccaaccgtctcccctatttctaaaattctttctttttctgtcaacccttgttctctctctttattttggtaagtcccaaatcgctcagccc

SEQ ID NO: 231337 - DNA, 609 bp, Cannabis indica
tatcgtcacagatatcgttaaacgtcactagtcagtacataacaacaaatacaaaaaaccaattcctaggtgtcgtaacatgtcgcaaacatatcgccatatatcgctaacaatatcacaaaagattgctatttagttacaacaacaaagcaacaatgccagtgttgtcacatgtcgcaataaacatcgctatatctcactagtcattaatatgtataaccattgtgcatgatatcgttcaatatcgctaacgatgtcgctaaacgtcgataaatgcatgaagactagggaaaatgaacaaacatcatcaattgtttacccaaacacaaaaaatcaacttaaaatcgaacaaattttcttaacctcaaccataatcaacaaaaccaaccaaaaatttcatttcaaaccttaatcattgaaaaaatcactcaataataattaaacttaccaaaatttgtgagaatcgtgggtgggtggcttgggtgttgttatccacgtcaatgacggtggagatgtaggttgtgggttgttgattttgggcatgagtattgattttggggctttggggacttatcctaggttgtcacgagatgtcatggggaactgagt

SEQ ID NO: 231338 - DNA, 783 bp, Cannabis indica
agtccatggcattttttacttcagttagatgagaaactaaatacgtatcataagcagggcaggtaaataattctcttccatcaatatactgataattaattaccttggccaagcataaacttgaaagtaatcctctataatggctagaatttaactaagtcccatcaagcaaagttccagtgtaatgaggcgctaccccatcaaaaacctaattaaataagaaaaatttacaagcacacataaacatatatatacatggtgaatgaaatggatgaatatatacgcatatatatacgctgagtaaaatttcctacataattttttttctgcaatgtctggatgagaaatattggggttgagagacacaagcaacaacatatatcagattaggaaataaagccatagaatcattaagaaactgaaaatagaatgaatagtgaataatttaacatccaagtcaagacttgatggttttgtgatttctcatacctgtagcggtagagtgaaagtgaatccgccgccacatactgagttgatgtcgtcaaagttaggttgccatcattgaggccgtacagagggaagaaagaaagaaaatagcaaacaaaacaaatagctaagagagagggaggcggagtggctatcgacagtggagaggcagcggaggtgcgtcgccagtggtggcggaggtgcgtcgccgtgagagagagaggcccgagtgagcgagattgagagagagagagagagagagagagagagagagagagagagagagagtacggagga

SEQ ID NO: 231339 - DNA, 965 bp, Cannabis indica
tcgttttaaaagcctcacgaatgctttatgtggcgttttaaaaccgacggtaaagattttgcgagtgtgagaaaacgacgcaaatcctcctatttgttcacttacccccaaatgaagaacaggccagtctcgatcccaacttttttccctctctttcatttttattttcgaacagtggcgcctctctttccctctctttctctaaaggtttgaaggtctcccaacagggatgcgatttctcagctctgaaggtctcccacctccgtaagtctctctcgtcctcagctagctctgaaggtctcgaacaattaccctctcgtcctcagctctgaaggtctcaaacacataccctctcgtcctcagctctgaaggtctcgtccacctctgtaagtctctctctttccctctctttctctcttgcgttctctcttgtgttataacagttggtatacatgctctattttcatcatgaatggataatttctcattaacagttggtatgttaattttttcgaaatgggggttttcgattcgaatgttagaaatttagattggagatttagcttctattagcctgattctccgtttaatccaaaattagggtttttatcttgttaataattttgactatcacttttaaattattgaatgtattatactatatgtgatgagagtttggtagatatgtctgtaaataaggcaaacagtagagtagtagacatggattcagtactcaaaatgctgtaaatttacagtgaagtaaatcattatattgctaaggagaagaaaaagctcctcaacaactaactgtatttttatagccttattatattgatgtaccgagggaataagcgtcaaaatctccttcaaccctaccatcttgttcctgcaacaccaaaacaattacattattattaaagctctgatttgaggtgcaaacagaacatgtagatcagatatgtgaa

SEQ ID NO: 231340 - DNA, 1333 bp, Cannabis indica
cgggactactgactgtcacaagactagaaccaaaccccttacacatacaagcctctcgcaattcacaagggatggcggctgtgaatattctttgcttgtaacttgctatgtgaacgttagggtccgttgttccgtcatacatcttcattgatgggaagacaaacttttttggcatctccacgagagctatagtatccacgaatggagagtctatgaagctacttggtaagctctttttgataggtgcagggactcttgggattctgtgaatcatagcctccatgccttcaagcttccttgctaccatttgttcgatcatctcctcaagtgtcattgcgacggcttgacctgcaaatgaaacaacatgaacattagatatcaaaatacttggactgattgggtcagaggtcttgagttgtccttcttgagtagttggtgcgggaacgcttctgtctagaactgatgtgacttaggcttcggtcatggtctcgtcacctaccaaagagggtccatgtgttagagtagatcccctggtaccgatccatctgctccaataatcgttgtggttgaatgttggtgtgttgttggctttgtggtgttcctatgccgttggacattggcctacgtttttagtcggagtggaatcaagggattgcatggatggaattggaacgtgaaaccttgactgagactccatcctactacgttgaacggactctagtatctccacctttgatttcagcagagcattctcttcccgaatgctttattctcttcttgtagtgttctgaggctttcattgtttccctcatctgagatacaagaatagctatctaggcttggacgtcgatctctccttcttccaaattggccatggtactggatacgtgtcccttactcgtcagggccccacggtgggcgcaaaattgtagagggccaaatctacaatgatcggaatggaaggatcgcggacactggcaacctgtagaacaaaagagaaaggggatcattgagaccttgggacaccgggatggtgccagctgaggggactctgacgatcaagtcaataaataatttgaataaagaataataaaatataaataaagatatttccaccgtaaactgatggggaaggactggtaataataatagtaatgtattgcgtgagtgcttgagtgagtgttcaatgagtgacgatgaggtgatcctttaggactcctgggttctccttttatagagcctctgatggttgaatttccctattctgaagaacgaacgtgggaagtggtcttccccttttccaggaggaaggatcgattcttatgcttcagtt

SEQ ID NO: 231341 - DNA, 1745 bp, Cannabis indica
tttattatttttggtaaaattgaaaaatatagttgaacaattaattaactagaaattaaaagacaataaaataaataataaacagtgtagttgactatggatgaatgattaggaatatgaatccttatgtcagttacccagttgtaatgtaaattattaattctctccctttaagtgatgacaaattataaaagtaacctaaactgttctcagatcattaatgtcctaaatcatattttatctactgcatctttgaagtaaattaacaaataatttgcattaattacagaatttagatatcacataagctatgtaaatactctcgttttacatcaaaacctatgtttgttctattagagcattcccaatattcacttcttagatttcattttaggatcattgatcacattaaagatggctagtctaaaacatgtattaaagtaaataagaataaattgtcaatccaggaaagaaaaactaacaatcacattaactaaattgggaaatatcaactaacattcttcatatccttaaattggaaatttagttcatgatatccttgttcatatccataataaaaataaaaatagaaattaacatataaaaataaaaggagaagaaagaaattgattatggaatagatccgggttgccattcttgctctagttgtcgtcctttactagttctagggttaattttttgagttcccactttctaactcaaagttcctttaaatagaatcagtttaaacaaaaaatagtacaaaaatacaaattttcccatgagtcgtataggctctctcgctgttgccaccaatagcctcgccgcagcaagatcactgtcatgaaatcaagccttctctacccaaattttgtcacgaccgtaagtgagctcgccgtggtggtgaagaattatccgcgaccacagtaagcctcgccacagccacagtaagcctcattgtgaccataaatcagctcaccgcagccacgaatagatgaaaattaatttttcagtttgattcttctcgcctcgattctttatcagattttgatgctctagacttgtacaaattacgggatacctgacaacacagaaaacaagcttaattctatcttaaaaacattaaaagcgactaaaaacaactctaaatgttacataaaacctaggctaaaaatagcctaacaacatgttcatgtaattttagctcttggggcttcgattaggttgtttcatgtcttcatcgtacagaatactgaaagatagttggttcaattcaagttattgaagtccgaacttccatgccagagaccctaaagtcaacctcggcacagggttaggatcttctcctaggtcgattgctatgacccgggtctactcaactctatgatgtcatccctcacaccacatgtcaaacattgatgttcacgtcaccagagaaattttctaggtgaacagaagccttgtaaatcaaaaataactatttataattaataaatatatatgaaacacgaagattttttacgtagttttgtagttaaaatctacatactccacgagtcattattatttttgagtatttcttagtagtgtactttgattacatgataataatattcactcaatcttacagggtctttccttcctataatgattgatcccactcttcttaggttctgcccctacttattggtgtttttcccctcacagttattctttttcgatcttatctatgttgggttttatgc

SEQ ID NO: 231342 - DNA, 1942 bp, Cannabis indica
ttactattgactgaagtggttgaatatgttggggaagaaatcacgtgtggaacccgtgtctcaggcatactcaatgaactgggccggttatgaattaatctattggacccggttttatagtttctcacaagaatttggtttgcttcaattgactcagcaagttccatggccctaatgagcccattaggatgcaataggcgtaatgggccttggatttccattctcagcccattaacaaacacagcctgcaacccttggtctcccattgttcccatagcagctgcaagagattcaaacctccgacgatactcttgcacggaatcggtttggcggagagcgaagaaccgatcatagattgtcccttcatgagcagatcggaatcggcgtacaagcattaatttcaattcgtcccatgaaccgatagtattcctggaattctcccaacgaaaccagttaagcaccgccccctctaaacacattatcgccgcctctaattgctccgtcggcgtcaacctctgcaacccaaagtaacggtcggctctgtaagtccattcgtcggggtcttcgcctgaatacacaggtaattctatcttccttgcccgaaactccgaacgccttcctccgtctccatctctcccattcgacccaaccactgtcggcgatggaggtctttcgtttacagatcgccgaccggagctctgcgtcggcgcctggctctctcggagtgcacaaaactcatcggccatcctcgcctggccattcaagcacaatcggatttgttcagcaagtcccgtaacagttcgttcctgggattccttgaattctccgagaatcaacttgatgttatgaatgtcctgcttcacgctatccaacccgacttcaatcccttcaacttttttctccatcctcgtccacggcattcaccagattcggctggctctgataccaaatgatgggcacctggagcagttcaaataataaccagcacacacacagcaaagtaacagtaggtacagtagtgaaattcatagtaggagctattattgaatatcaaaacaaaggaaataagcttccacacaaggtagaaagctatggcagctctcacctgatgcagaagaagtagttttctcttacaaattgcataactgaaaatcacaatcctttcccatataaaaggtagctcactactaaagacaattaccaaaataccccttcctaagccaacacatcattgggtttaccttgcttaccccttctagtataagtaaacttaatagaaggcctcacattcgtatcatcttgacaataaaaaattagagcccaaagattgacggcataaaaattgagctttgaataacttaaaccacaactaaagaatcagtctcaacaatcgcactaatttaatgtttttccgcttgatctaaatgagtgcctccttgataccaactccttaattattatactatcaactttatttatttttttaataagtgatatgagttacatgttatgtattatgtgttgttcaaagattttataccatgctatgttttaaatataataaattaatatttcgacgattattaaattttgttaaatttagctaatttaaattttgttatcatttttagttcattaggtgttttatcgtataattttgttcatagtttttgagtttgcttttatgatttaaaatgttatttacatatagggcgattaagtgctaattcaagtacatcacaaaaatttttatttttttattcacttaaaactttaaatctacacaatatgtagtttctctatattttatttagagattatttatgtattataaatgaaaaatgagattaagaaagagaaagaatatgagaaatttacacaaattattatttttggtaaaaaatttatacatttacgttaaatatttttttttttatatttt

SEQ ID NO: 231343 - DNA, 1845 bp, Cannabis indica
ctgaaagtttcattgaagtcgaaaccatcttattgatgatacccttttgctacaagtcgggctttgaaccgagatagagacccatcttcattttctttgattcgatacacctatttacaaccaataggtgtttttccagcaggaaagatgacaagaacccatgtattattcttaaccaaagcataaaattcagtccccatagcagcaaaccacttgctgtcttctaatgctgattttaatgaaagtggataaagagatgccattaaaacctttggtttggagatgcctgacttggaccgtgtatgcatagggtgaatattggtggttgtagcaactggtatatttatgatgggttgtttagtagtggtagttgaggatggtaatgattggtggatgggtgcagagttggtaggtgattcgagaggtgatggggcatgtggtataacaggttgtgatatgggtgatgggttattttggggtaaggaggaagatgtgggagctggttgttggatttgtgatgggactgggatgtcttggtgagcagtagatgtattgttgtggagattgagtaatgtagtaggagttggagtgtgggtgggtgatgtagattgggcagcttgagagaagggaaagatagtttcatcaaataatacatctcgagagatgtacaactggccatctttggataggcatttatatcctttatgtgataaactatatccaagaaaaacacaaggtatggatctatactgaagtttaacacgattataaggtctcaagttgggatagcatagacaaccaaacacccttagcatggaataattgggtttggtattaaacaagacttctaaaggagtcttgtattggagttgaggggttggcattctattaatcaagaaaacagctgttctataagcttcatcccaatatttgagaggtaaggaggcatgagcaagtaaagttaaaccacttttaactatgtgcctatgttttctttcagccaccccattttgttcatgtgtgtgtgggcaagaaactctatggattataccatgctcttgtaataggtttgtgaaggcttgatattccccaccccaatccgattggatttgcttgattttataccccaattgtaattcaacttgatttttgaaggtgataaaggtaggtaatgcctcatttttagttctaagcatatatatccatgtatgtctagaaaaggcatcaatgaagctaatataatacctatagccactcgaagaattgacaggagcatggccccataggtcagaatgtaataattgcaatggttcagtaaaaacagtatttgaaatgggaaggggaagtttgtgatgtttccccaaacaacaagctggacacaaatcagaaccactttgttcatttttagtactcaactgtatgttacaagattttaaggcacattgtacaattttagcactagggtgtcctagtctattgtgccaaatagaaaattgagtattatgaaaaggaagttgtgtattattacatttagtagcagtagagatagagatagaggatggggtagatgatggttgagttgggaataaagcttgagatttgggtagatgagcaagttgaattgagtaaaaatggtacaggcccttgtcaagcttcccaaccagcaaggtcttcatagaggccagatccttaacacaacaataaaatgggtgaaactcaaaaaacacattattatcttgttcaaattgagaaacacttaataaattctttgtaatgtgaggaacgtggagtaagttttgtaaatctaattgttgtgtgcaagggagagttgaaaaaggactgacc

SEQ ID NO: 231344 - DNA, 1455 bp, Cannabis indica
gaggcggcggaagtaatcggagagtttgtcgagtccgatccgaagaacagtaacggactatggcgtgagttttttgcgtgttcggttagagtcaatatcgatcaaccgatacaaaaggagaatgaaacttaaaaaggtggtggggactggttttgggtgccatttaaatatgaatttcttccaagcttttgctacatctgtggaatcattggccacacaaaaaacttctcccataagcttttcgatacgccggaggcggctatggtcaagccgtatggggaatggctgagggctcaaactcgtcggaaaagctatttgcttcattctcaatatcttcggactggtacggatgtggatgatcgaacatttgggccaagggaaccggcggctgctgtcaacgccgatgaagatcctgtgccagctactggtacgactagcagaggcaaagaaaagttacctgttttagccgatggagggaatcacggtcatacgaaatctcaaccattttctcctaatatcatgggaggtaatcaagccccactattttctcattcttttaatagtaattcttttattgagaatattggtcaaaacaatttaaattttcctaagactactaatttgttattggtcaatggggagaattcggaccacaagaggagaaggccgaatgatatttatcttgtggataatgggccgaatgatgtggacttcatggatagtgggccaaatgatggtatggaggctgaattgattatttcttccaataatgctactctcccaaaaaatgggcttttggtgggttctggtgtccaggcccaccacgaattatgagtgttcttagttggaattgccgtgggcttgggaaccctcagaccgttcaattccttaaggaccttgtgatccaaaagaagcctaattttatttttctttgtgaaactttgtgtcgtaaggaagttgtggaaagaattcgagttgctattggttttgatggtttatttgcggttgatgctattgggcgtagtggtggtgttgttcttctttggcgtaataatggggatatcaaccttctccgctttgctcataattatattgatgttgaggttacttctttcgatcaaggtgtgtggcggttaactggtttttatggggagcctaaccgaagtgcaagggtgactacttgggatcaattgaaaactttggctaccgtttcttctttgtcgtggtgtgtcattgggaatcttaataacatcttgtctcatgaagataagcgtggaggtattccttatcctaactggcttattgagggttttcagcaaacaattcaagagtgtgagctgagtgatatggagcttgttggtcaccaatttacttgggaaaagagccgtggttcggatgcttggatagagtctcgcctagattgggcgcttgtttctaagcaatggttggttattt

SEQ ID NO: 231345 - DNA, 1678 bp, Cannabis indica
cttgaatactgctgccattcggttgttgttcttccaaatctgtagcaagtttgtaccccgatttaaccgtatagaacccatgagaatcatgatgccatatgagttgatcttgctgagaagtaagtgttaatggcaagctgattattttggtgacatccgattcaagaaagagcaatgaaagcttgtcatggtcccattgtcgatcagtatttataagatcagcaaccttcatattgatatttgtcccattaaaaaccaacggcttaaatgaagtgattccaggtagccaaggacttgatgcacaacaaatgttttcaccattaccgaccttccagcgaagccctttttgaagaagttctttaccccaaataattcccctccaagttaaagatgggtaagaacccaaagtagcatcaagaaaggaattatgcttaaaatatcgaggtttgagaatacgggatagaagtgaattgggatttgagaaaattaaccaagcttgctttgccaataaagcttgattaaaatgaacaaaactcttaaaacccatacctccttgaacctttgattgtgttaaagctttccatgttttccaatttatacccgaagaggaggaattagagccccaccaaaatttgttgcacatggtttcaatctgaccaataagagatttggatagtttaaaacagctcatagcgtaagttgggatggattgtgccaccgctttgagcaaaacttctttgccgccaatggagaagagcttctcttgccaagctgataataaattccaaagcttatccttaatttctccaaaaagtatttttttatctcttcctgaatatgaaggtaagcctagataacgctcatgacaaggtttgatttccatttgaagaacctgttgtatatgttgctgaatagcaggaagagtattctgagaaaaagagagaaccgacttatcaatattgagactttgccctgaagctctgcagtaataagcaagtgatcgcttgatagccatggcggatttgtgattagcacggcagagaacaaggctatcatcagcgaagaataaatgagatacactcggagcacctcttgcaatactaagaccatgtaaattaccaccttgctcttcaaattgaaaaagtctcgagagcccttccgcgcatatgatgaataagaagggggacaaaggatctccttgtcgtatacctcgggttggaattaggtggccacgtgtagaaccattgaccgaaaaagaatatgagaccgtgctgatacatcggtaaatgagatctgcaattgctggagcaaaccccattgtaatcatcatgctatgaacaaaatgccattcaactctatcaaaggctttgctcatatcaagcttaatggctgcatatccttccttgcctctctttaagtgctttaaggaatggaggagttcaaaagcaaccaaaacgttatccgtaatgagccttgattggaggaaagcgctttgagattcggatataaccattgacagataaggttttattcgaatcacaatagctttagagactaatttgtatagcacattacaaaggctgatgggacgtagctgggacattgagttcggcttcttaactttagggatcaaagtgattagagtttggttgaaacaagaaggatccgcaccattatt

SEQ ID NO: 231346 - DNA, 747 bp, Cannabis indica
agggatctttgatcactctccggttgtctttatggttcacaacaaggtggtgactggtaggaagccttttaaatactacaagatgtgggaaaatcatccaagttactctgacttggtgaagaaaacatggcagcaggggcaattcaaagggactaaaatgtactatgttatctctaaaatgaatgctttaaagaggactttcaaggagttaaacactcaatcctttggtgacatttaggctcaagaggctcaagcaaagaatatacttgaggagtgccaaaacaagcttcatcagcatcctctagacgctgaattacagctttcaaagctagcggctaggaatgattatatctccaagcacaaaagtctcttatcattcctacaccaaaaggcaaaattaacatgggcaaaggatggtgacgagaactcagctctgtttcacaccactattcgtgaaaggagaagccataatcaggtgtggtccatcaccaatgttgacgggcagagggttgaggaaccaaacaatgtcaaagaggctttcattaactattatgttggtctactaggtacatgtatgcacaataggctgaatgtaaagaagagcatccttaatgaagtaaatgcattgacaagagatcaagctgaactacttatggcataattcacaagagaagatgtaaaaatgatggtgctggcaatcccaggagttaaagcccctggtctagatggctttggaagctatttttt

SEQ ID NO: 231347 - DNA, 684 bp, Cannabis indica
attttattttttaatataaccaactttatgacaatttttaacatgaatgaatacagaaaatgaaaccagttttgtcataacatctccaaattagattattattaagttttattttgacaaaaaatcagtttagggtcatatttgtacaattttagaaaatacaaggtccattttgtcatttaacataacagaagatccaattggtaacttttgcaaaacacagggtccaaaatagtatttaccctataaagatttgtaaagacgaaaaactcacgctaactccccttgagcaacaaacctaagaggttgctccatatacacttcttcctcaagatctccatgaaaaaaaaaaaaaaacgcattgtcaatatcaagctgatataaaggccaatgatgagtagcttccatggaaattaacagtcgaacagatgtgagtttagcaacaggataaaaagtatcacaatagtctactccaaaggtttgagaccattggcaacaagacgtgtctttaagcaagcaattgttccatcttaattaaatttaaccgtaaacaccaatttgcaccctatgacccgttttcctgaaggtaaattaaccaagtcccaagtatcatttgcaactaaagcattcagctctcctatcattgcagcaagccaaccagaatgagacattgcttcacgaaca

SEQ ID NO: 231348 - DNA, 2110 bp, Cannabis indica
taaactttctctagacaagtttttagtggtgtctctggttaagaaatttctcctttttaaaattttctttggtcaacttggctttctctaaaggctactgatcattagtttttggtgtggtagttatgggggacaaagtggaggattcacgtgaacaaaggaatatggaaacttattctggtacaggggctcctgaaattaatacgaatagtaattattctcaaccacctcaccctcttgacaacaggaaggaaacaaatgatgcagtaaatggggagggagaagtggattcccaacataaagattcggatgttgacccaaaagaggatctcgaagtattacgaaacaactttcttgaatccatgactctggacttagaacctgattttgaacatactgccgagattgttagtacaggggttctagtcagctttcttgatggcaagggggtctctaaatctaggctaaaagccattctcagtcagatttggaaactcaaggggctctggaagttcaagacaatgaagccaggagtttggggtattttcttcgataagcctgaagactgtgctcaagttctccgcaacagaccttggatcatcaatggaaaactattaatcatacgggagtggcctaaggatggagattggtacaatgcagatatgagaaaggcgatgttgtgggtcctgacttttggactaccaactcgttatcttaatggagttaactctcatacggtggcaacaaaagctgggagatttattcggaatgatcaagttgatacaaagacgaatatccaaagaggttttcttaagtttcaagtagagattgataccatacatcaactctcttcgggcttctttctagatattaagaggggaaaaaaggaatggatacaatttaggtatttcaagctccctaagttgtgttacaatagtggctacctcaaacatgataaaagagcctgttttcgttcaacaacatttgcatatccacctgtggggcagcggttccagcttatgggccgtggatgaaggcaaaattagcagtgttcagttgtttcaatactaaaaatcaacttgaatatttcagagaagaagctggcaggactcctttgccggagagaagaccaccggtgtctggcgcaaatatcaaagacaaaggaaaatgaccgatcgctgcaaacagtagggagccggtcctgcaatcggcacctattgctaaacatataagggaagtcataagggtcaatgataactccccaggtgccattttggggaaaaatttgaaaatattggaaaaacttccttcatgcccgatggtcaatagtaagcactccactactggaacactccctttaagaagtattaacaggggaagaaaagctcagtcagcttctcctagggtgcgacaattacacaatcaaggtaattcaagtactttatctgaaaatgacattttaaacaacttttcttcaaggccccctccaaatcctgctgataatgggattctcgcaactattatggcccatattgggcccacttatgagcaaatgatagagaaaccccatgttgacttatgtacctctaggcagcctcacaaacaccctgagcccactcattttccctggaccatttatgctgaagaaattggtttgactgaggaattgatgggccctcctcaagttgataaatttgaactattacctacactttttcatgacccagaggacgtgtctaatttgatgcacccttgtcctcaatagaagaagaggaaagctagtcttacactaattccttatgtccaacacactgctgaaaatactatggaattctcccaagaggtgcctaaactccatgaattctcctcttcgttggatactccctttaatctgggttcgggcatgtcttcttcttccttaaagaatgataaacgaagaaggaaagggtctcgttctagacaaacctcagtaaagaaaagggtaattcaggaggcaacgacaacttcacaagatgaaactagcagaaaccttattgaatatctcaaccttgttgaggtacaagtggaaagctcccaaaaatttttctcaggcgaggaggcggcccttatc

SEQ ID NO: 231349 - DNA, 1327 bp, Cannabis indica
ggtttaaaacccagaaaaaccagcaataaaccacgaatttcagcccttaaatcacatccaaacaacccaattcttaaccaaaactctgaaaccatcaaataggtttttaatcatcatacacatagtttaaaatacatattctatgcatcaaatccatccataaaatataccaaaatttagattacaaaaccataaacatcaagcttcattcaagaacataactcaaccaaacttcttatttgaaaccttaaactttcaagcatgatacaaccttattttccagcaatcaaaacaataaacatacatagatttaagctaaaaaacactccaaaaatcccatccaaacctcaaccaaattccaaaacaacatacaaccataaatccaagtataaatatgcttaactcaacacaagaatatcaacatgctacataccatcctcatcaacctatttcatgctttcaacctttaaaaaaattcagcaacaataacagaaattaaagctataaaagctacctcaaaatcactcccaaggcaagctcaaagatccaccaatactatgcttcaattcaagccaaattctcaccaaaccaaagatgaaatcaaaagagggtttgagaaggagaggggggatctattggggctgaggaaaaatgcaggaaaattaaatctcttttcctcaataattcattttacaacaaaatgatatacatgccaaattaccaaaatgcccattgggccatataacatatacataaacaattaaggttgtttaagtcatttctcacatagttaaacccaaataatttcagattattcaccaataattaaaatgccaataattcaactcaaattgcatttcgggcccgaacccagttcggccaaaaatacacggttgtcactataccgcgccaacctgcctgaacacaccttaaaaagacaacaaaggcatactatataataatgtagttctataagcacgtaaataaattaatttcattgttttacccttctcgggtcataattactaaaatgtccctggcttaccaacggggtcttatcatagcataaagcatataagttctcaaatattaaattatataatgttataatttctaaattattcataataatctagttagggttttgctaatctattttttaactctagggtattacaattaccccctccttatagaaatttcgtcccaaaatttacttgaacaacttcggatatttctgctccatatccgtctctagttctcaggttgcctcttccactttattgtttctccataatacttttaccagtgcaatcgtcttgtttct

SEQ ID NO: 231350 - DNA, 2145 bp, Cannabis indica
tatggcttctttgtgactcttaaaaaattgtaccaatttttcttcttgttctttgtctaacgcagatgcgatgataatagggaaggtttctataacgccctattccataaggacaccacatgtaattttataaactggataaatactactacattaattgattattaaaaattatgagaatattaaaaacttgactaaaataaaagactgaatatggacattataatagcagtaaaactgtgttcccgggatccatgttataaaaagatttacccgtaagactatagacaatagaaattcaaaatacagtagagacagccagtctaaaataactcctgacaactcgacacacagggcagtggggccaatatgtacattgctggagaaggtaatcacctcatggcaactctaacttttccttgccctaacctgtaccacaaagcacccgtgagtgacaaggactcagcaagaaaagcaataataataatcatataatttactattcaaatattatcatttatacacaatcggaatcaaaccattatgcattgttcttaagatgaaatccaaatcactactcgcatctgccatgaataagtatcagcatacagatatttggtaatacaaaatcattataccactaataggaatcatattcattaaaaatataaatcatatatatgttacttcataaagtaaccatcttcattatatcacattgcctaattaaacaagtcgatgctttaatctgataatcctgtattgcattgcctaatcaagtaagctcatgcgatagcttggtaccatttaacacataactacatcacctaattaggtgagcctgtgccaaaaatttacacacatatatcatataattgtatcgcctaattaggtgagcccgtgctacaacctggcataaatatatcacatcgcctaattagacgagcttgtacctatgcctgatacttatcatatatcactgatgcccgtatctacacatcgctaggaggacaccctacaacagtttcattctatgccataacttggcaatttttatatcacagacgtcgtatctacacgttcctaagagaatcgcatcacctaatcaggtgagcccatacctatgctcagtattcatcatatgtaactgacgctcgtacctacgcccaaaatattgccaggaaaattgtatcacctaatcaggtgagcccgtacctacgctcagtactcatcatatgtcactgacgcggtacctacgcttggtacttctccaagtatatcgcatcacctaatcaagtgagcccatatattatatccatagtatcatcacattatcattgcttaaccaatcaatcttttcattatataacaatattaattgtattacaatacaacatactatgtagtacaatatacttttcttacctttaatccaggttcatacatttcggccaacccaagcgaagaactatctccgatgatctcggccttatgtcacaacaacggtaaaccaatatgtgtttatcctaaaacactgcttaatgttcacataagataatttaggattttctaccaaaccccgcggtataaatacactaaaataaaacttatattttgtctctacaacatacagcgtatggtagagctcgttgcatgcttcgaaacggtatatagaacgtccaaaatagacacccgagtgaaaaggtatgacaaaaatacaattctagatctcactagaatttccataaacggcaggccatgttgacaaaacggcagaccgtttttcggcaaaaatgtcaaatttcgcactcaccgaaacacccccaaaacctatccaaatcattccaaacttcacaggacacatatatatcatatatacagtaatccttaaataacaaaaattatagagtccttaaacggaaaacaccatcaaagctcagacctaagctttaaaaaattctaaactcgatttcccgctctgagaattcgctatcccactactactggagcttagatcgctagattttggattgaatatcgaagaaaataaatataaaaaggagagggtttcgtcgaaaggggaaaataagggttcgttcgttttgttttcatttatgtttagtgatataacttataatatatata

SEQ ID NO: 231351 - DNA, 693 bp, Cannabis indica
gtgacttgggaattagtgccatggtctctagtgtgaataatagatttgcttgatcaccactgccttttcgataatgcatgggaccttttccttttgacacatcacatcttgatggtggttgagctaatggacccttgacaaaataccatataatatatcaaatttgatcctaattctttcgaatttttgacaccataacagttgtaattgaacgcccccaaaaattttaaacatgcctaataacaaataaaacggataaaacaattgatttcatccatccgaccgcagcacatgtattcgcagaacctacttcactatgattgaatatttaagatattcaaactccactaatcattaatagttaatttataacaaaccattacctcaggtgttacaatgaggtatttaggccaaggagggaacatgtttgctacttccttaacgtatttgtaaccctcaattgagattgggtttcaacatcctcttgtagcatttctaaaatgagaacacgggcatgtgaatcatcgtagggcttagtatgaactgtgatttcaccctcatgttcgtacatataagctcatgccactatgttgtcgatattatctgagtaaaaaaaatactagctgattagctgccctctgttcagtgaaattgtacatgagaggtggctcatttagggaaacaaactcctga

SEQ ID NO: 231352 - DNA, 795 bp, Cannabis indica
ataaagaagaaatcataccttaatcgtttgagttgttgtgtttggacgattctagaatgggcgagagtcactcggttttggcgagggtttctggcgagaggttaatagcagaggatatatatcgagggtgtgtataatatgtgtgataatctgtcgcgagatgggagaagtgtttttagagaaatactttttatcccagttattataaaaattggggtaaaagggtttcacactaaacaatttattttcaactaaccatcgggataaaagatttccctaaaaaccctaattcctatttagctaatccataaaaatcgaatcttgaacttaggttttacctttgatatttttttaacatttctaccaaacaggatcttgtctaaaaaaaatttcctgcatatttgaggtgccaaatttaaaaataggataaaaagtttcaatatatcttttatccttttttttatttttgttaactaaaaaagtaggataaaagcttgtctcctttcttgtattgttttaaactgaaaaaataaattaattattaagaatttggggtcagcttgtaatctgctgaagttggttattagtgtatatgacattttttatttatatataaccaataccattgtgtatatatgacgtttgttatttgataataatcgatgctatagtgtacactttagcgtcaattgtttttaattttatagcgtcgttcggatcgatagtgaattttgtcaaaactgacactaaaagactctaaaatataattaaatctctaacatgtactaggagata

SEQ ID NO: 231353 - DNA, 1461 bp, Cannabis indica
tatcaaaacaatagcacgaaaatacttaacttaaattttaaataaaatcacatttgaatatgaccctttcctttaagctagtgaaaaagattgaattctcatgggcatttcaccaaacacctagcaggtgtacttttatatgtatatatacaaaaactcaacatttagaataacaaaaaaaattcataaaatctatgagtaaaatagaaaaatcaataactaatataaacaacaaactctaataaaaactatcaaatctaaacttttattcttgtaagtttagcaaaagaagaagaagacgaagaataagaagaggaggaagaagatgaagatgatcttacaaacattatttgaacgacaatggtggaaaggtaagggttagggcttgagagtttggcttcaacagattaattgtgggaagaaaagaaagagaaaaatggttatggagatttggagatagagaagacgcgtgagacaaaatgagagaaaccaaatggtgtgctgacatcatcaatgtagtatttttgtaattttatacctttttttttttgaaaggataattttaatactttttgaagcttaaaaaggtaaaaatggttttgtaaaaatgtttaaaaaattgataagcattgaaaatgtaaaaaaatagccaaatttgacacctagtgtaaaaatctctaagattttttttttgaggtagtaaaaatctctaagattaatgtgctgtaaaagtaaaattttagttaaatattttaaaaataaagtaaataacagtttcaaacactctaagcaattttattagagttagtcttaaaggagtgtaataaatacttttcatttaatatctataacattaatatataaagagacattataataaaataaatgcaaataacttatctttgtcgtttaggaatttttatatacatataccattttttttttactttttgttttggttttttatatactatttattggtaaatattttttttatatttgttattggcactttaagatgttcaatgttatacttatgtaatacttaataactagaaaacataaccgcgctttgcgcagtttttctaacaattgagaatcgcatatatttaaagaattatatatattttaatatttctctttaaatttttttaaaaaaatatatagtttatacttgaggctacaatcccccattattattatttaaagcaattttactactctaataaaaaaaatgattttactactattgaaattcatggtgaactttatggttatggtataacttaaattttttttttttttgaaatctataacttaaattattataatggtaataaattgttatttttttttctcccttgaacatttgcccaataaaattgtatttatgaactattatcgatactaaataaattgtcgcacattataataatttgacagatgaaataaaaatagttg

SEQ ID NO: 231354 - DNA, 636 bp, Cannabis indica
taagttttagacatatgccaatatacaaaatacaataagccaattgtaatatatacacaacatatttactacaggtttatctatatttactacatgtttatctatttagtatatagtggataactctacataaatttcactaaaagaaaggttctaaactaataatgtgtgactctaatggctaaactgtcgcatttttatcgttaccgagaaaaatcacaaaaatataaattttcacatgacatatataatatacttagaatttaataaaatcttaaaacttgtgaaattataatcctaatgcctatttattaaaaataaggcccaaataataattaatcacatgtaatcatgaattatgcttaattaatgctaatttctctactaaatcatattcaaagtatgtggtcattacacatcatctctcctccctccaggttggggacaaaaattgtgatgatcttctcttccaaggtagtgattaggtagaacttgatcatctacgggttgccaacagtttaattccagggctaggaattggaaggtttgtcatgccgaggtgtttgcacataattagttgggcgctcctccaatctgtactcctgtcccccagagggtatgtaagattcttttgcc

SEQ ID NO: 231355 - DNA, 929 bp, Cannabis indica
ttcagcgatcttcggatttcacattccttgttccactcccgatcgcccacaggaagtctctggaagctatccagtttctgctccaggtctttaatcacccaatcaattctaccatactgagttctattccattgcataagagcaatcctagtagcacccacctttttaaaaaatcgggcaggagcccaatagtgattcaccgaatcccaagcattggcaactaccaatttacttctatcatccctcgtccagccctcttcaaacttgaagcatcttttgaaattaggagggtgaccactagaattcagaaaaagaggtctatgatccgaattacaagtctgagaagaacagataacagctttagggaacagatgaagccatgcttcattcacaatccctttatcgagagccgatttcacatgacgattcccagacctatggttgtcccatgtcatcttatcaccctggatattcatgttgatcagccctctcgaatcagtgaggttagagatgaaagggataaacgggtccctaccagatgaaccttctctttctgagttgctgaagacaaaattagtgtcaccaaaaattaaccaaggacccccaaacctatctccaagggccatgacatccgaccaaaactttttcttcgcatggaggtaagggggaccatacacacacgagagaagccatgggttggaagggggatccgagtagacaattccagttatatgatttcgagtacaagcaatacattcaaaactaaacccaactttccacgccaagataatacctcccgcaattccaatagatggcacacatatattaaaataaaagtggagggatttaagaatacgtaccagaggagtcgcatccacttttagctcagacagaaacacaaaatcaggagagcgcgctctaatcaggga

SEQ ID NO: 231356 - DNA, 948 bp, Cannabis indica
gttaagggcaatatggtcattatgttaggctgtcgtttgtcattttgtggcattagtgtgtcctgtaagtaaggtaattagaggttaaattaatattgcttaattcataatttgaaagaagctagaaatacacacattttacacacatttctctctcttattattctctctctttgtcgaacaaactataaccagcaaggggaaggaatttttcagctgcaattcaagggtttatagcaaaattttggtgcttcaacctaaggtatacccttctagcacattaatcctttgttctcttaagtttttatttgtgtattgtatgaattttgggtactaggttgttgtatatattaggatggtttgattttgcattatggagttagcttgtgtttatttatgttgtcctaggctgaattggttgatttttgtaatgtttgagccaagttagagtttgggaactcaagcttagtgctctaatggtgttttgattttctgagtttgtttttaaggtttgttgcttgaattaggtccattatggtatttataggtattttgagattattggaaagtttggagttaaattcaagtgttggggacatttttgatggttcctacactaaattggaattccggttcagagggacctgaagcaaccgatcgaccggttggtccccgggaaactccaccgaatcggaattcggttggggaatcggtctaccggttgggacaatttttatgaatcatagttttcccgtttttgagatatttagggtatggccatgttattcatcgatagagaaatttctagttttgattttaagtccccgaaaactattttagcgtgtctctcatcaaaattacgaatattgtgatatagggccctgtaaaaagtcgaactgctattccatcaggctgaccagcatacctgagcacagaaacgaggtaaga

SEQ ID NO: 231357 - DNA, 2417 bp, Cannabis indica
tgtttttatgcatctcttctcaacatattatttttgttttaatatatgtggatgatatattagttacagggaattctgccactgctattgactctcttgtgactaagctacatacttcttttgctctcaaagacttgggtgaaattgcctatttccttggtattcatgctcatcacacttcctcaggtcttcatctcagtcaaaagaaatacattcaggatttactatcccgggtcaatatgcaagaagcaaactcactacccacaccaatgcctggaggagaaacgttgtctgcctttggcagtgatgctatgtctgatccttatctttatagaagcactgttggtactcttcagtatgctaccattacaagaccagaaatagcttttgctgtcaacaaagtttcgcaattcatgcaaactcctctggaatcacattggaaggttgtcaaaaagattttaagatatctaaagggtaccattgactatggtttgcatctcacagcagcaactaacctctccctcactggtttttgtgatgctgattgagcatccgatcctgatgatagaagatctacatcagggttttgtgtctatcttggtcctaatttggtttcttggtcctctaagaagcaaagaactgtctcatgctcaagtaccgaggctgagtatcgaagtttggcaaatgcaacagctgaggttatgtggattcaatctcttctttcagagataggtcttcacttgcagcagcctcctaccatctggtgtgacaaccagagtactgtattgatgtctgccaatcgtgttttgcactcgaggacaaagcacatagagttggatctctatttcgtgagggaaaggattctgtccaagcagctaattgtcaaacacactcctgcacatgatcaaatagcagacatacttactaaggctctgtcaagttccagatttctgtttctgcgagacaaactaagcttaacttcattagctcagcttagtttgagggggggtgttagagctattacttaagtttattatttctgttatttcctttgactaagttagttactgtacagctgttttctgttattatttgtttgctttgtaactgtattaggcttgtatatatacaatgagttattactcatctcaatactgaaaatcattcagctcaaattctctctctctctgttattcctcacaagaatccctttatatttcctcaaacaaattaagcggatcacttccaacaagttttggatctctctcaaatttagaatatcttttcattgattcaaataatttcaaaggtgatgatgtgtctgaagttcattttgccaatctcacaaagctcaagtttatatatgcttccagaaacaagctaagcatgaaagtaggttcaaagtgggttcctcctttttctcttgaaaacatagaattgagaaattggaacttgggtcctcattatcctatatggctgaaatcacgaaaagatatttctcaaatcgacatctccaacactggaattttaggtgttattcttcaatggttttggaataatttcttttctaatcgttttattacggttgacatttctgaaaaccaaatctatggtgaaattcctaattttccaaatgatatttcatgtttactaaacatgagtttcaataatttaacaggtccagtaccacgtattccaatttcggacatgttagatctttcaaataattacttgtcgggtaatatttctaattttctttgtgatccaacatcttatcaaagagaggtgttaattaagccttaatcttaacaacaatttattatcaggaaacattccgattgttggatgtattggaaaacaataatttgaatggaattattccaagctctattccctagatcagaatcacagatcagtataaaatgaagtatttttttcagatatagagccagagagaacgacaggctttttaagaaatttagagtcattgcatcttcgcaataataaccttgttggagaaataccagattctttaaagaattgtttagctttatctggacttgatcttggtcttaataagttggtgggaactataccaagatggatcggaagtcttccaagtttgggccttcttgtcctccgttcaaacaacttgacaggtcttattccagcttagttgtgtaagcttctaaaacttcaaatattggatgccagtaataacaatttgatgggggaaataccaagatgtttcaaaaatttaacatctatgacatctaaatcacatcgaaaaaatttagtgcatgtttgacatcataactaaaaaactgttttttgtttttaaaaacagaaaactgttttttgaaaacaatttggcttgtttggcattgttttttttaaaacagttttcagaaaacaaa

SEQ ID NO: 231358 - DNA, 1173 bp, Cannabis indica
tgtcaaaagtatcatcgtacgaacgttagagactcagtaccgtgtgggacacggggattagggttatggtcaggggtatgggcgtctgatcataatgcggaatatatgtatgttatatgatttatgcttttcttactgagtctgttgactcacagtgctatgtttatgtgtaggttagggcaaggctaagcccgaggaaccgtgaggacgagtagatgaagattgtacatgtcggggcagttaggcttggagcgtacgatcctcaggacatcagggcttttaatgttagtagttgggcgacaaataatttataaatgaatatcaatcttttgtaaagtattttgtaaacgggatcctgaaatactttgtatgtaatactataagttttaattaaataagtaaattttaattaaacacaattttcattaacctcgttgattagcaatgagctgcacagtatgtttaaaatcacgtcaacacgcctatactagttagggtgttaccactggtgtaatggattccaaagtctgataagagagcaaggagccaagtgatttcgcaagtagcttgggccatggcacgatactcagcttcagcggaagactttgaaatagttggctgctttttggtctttgatgaaaccaaggaatggcctaaaaagacacaatatcctgtgatggaccttcgggtgtcaacgcaagagccccaatctgcatctgaaaaaattttaagttgtggttctgcatctttaaagttagattcgaaaaaaagcacacaaatggggattagaattagcataaaaaatcagtccttgtccaggtgtgcctttgaggtattgaagaatcctatgtgcagcatgtaaatgaggtgttggtggctcatgttaaaactgacttaaagtgttgacggcataagagatgtcgggacgggtaatggacaaataaatgagcttaccaatgagtcttctataaattgttgggtccggaagaggagtgccaacatctttgctcaatttaacattcggttccatgggagtggaaggaactttggctcccaaaaaacttgtatcatggagaatttgaagtgtaaaaggccattgagaaacataaattccagccgaggaacgacctatttccaaccccaaaaaaaatcggagaggaccaaggtctttta

SEQ ID NO: 231359 - DNA, 1195 bp, Cannabis indica
aaaaaaaaaagataaacttttgaattctgaaactgcgctcttactgcggcgaaagttgaggctcgctgcggcgagagcctcttgctgaaatttttttgttgcgtgttcagattagtatttaagccataacttttttaatacgactcggaattagacaattcaagatgatttggaaagttgagaacgagttctaaaactttcacatttagctccaattccagttctacttccaaagttgtaaaaaatcatatttatgttcaattttgtcaaaccgaccgagctcgccaactttcactattttctaccaaaatgtgttaaaatgcctctaaatgactctaaatgaatgattagtctttaaaatagcctaacaaattacaattacactaatcaaaaatttaaagaatcaatttaagaatattaatacatacattggccatatttataagacaaaatatcaacttatcaattagaaagatgcgagttatggtggatgcagctttcttgaagtcctgctgctgttagagttgtggtcgtggatgtggaaggccgtgttaaggcagtttaagttaagaaagttgtggtgacatcggttctccataatgaattgttggcgttgtggtgggatgctacggtcattcatgacttccatggcaaggattgggacttgctctcagattgtttgtctctagttcaagcaatcaaaaatggtaaacctccagagtggaaggtgactcttgagttctttgatctgttggacctgctttcttctagtaattatgtgttttagtttaagaaggattgtaatgtggcggcccatgcatgttattgatagtgggatttatccaatagctgcaatgagttgcttaacttttgggaggtgatctccatgtgctcaccaaaattttagcttctgcttaatgaatttgaggcctttccagaaaaaaaaataaataaataataatattgcactttattttttgcaaggtgactaataatactatacaaccctcttactatatacatgtgccaactaaaatcaagttataatattcaaatatatataaataaataaaaatctaaaattagaatgatagcagttaaggccaattaacaaactttgtaaaaaccacaaattaacaaggcttacggaaaccaatattattaatgtctctaggctctagccaccttcattttt

SEQ ID NO: 231360 - DNA, 1643 bp, Cannabis indica
aattagtttaaatttccaattcaccgcccctcttggaaacatatcttgtgctaacaaggatatgcgaggccaactcgaggtcgtgaggaaagaacttggggaggtaaaccagaagcttcttgctgccaacaccaaagttgatgagctgactaaagagttggaagatatgcattcgaccgagcaactggaggccgacgatgtttctctatcctaagagatcaatcgtcttaaggatgagaaggagagtctccgggctctcttaacaaactggaggaggatgtaaagaacaaaaagactagggaggaggaacttgtgaaggaggtcggagacaagaagtccagggtggaggagctcgagaaggaggtggatatcttggagactcctggtcttgaggttttctatgacttctggaaggccaatcctaaaggaaactttgattaccttggagattccaaggacatgtatcttaatttctgtgcggcccaggcagccaaagaaaaccttaaggcgaccacctctacagctcccaccgaccagagtgtcgaagttcctaccgtccaggatgatgatcctccagctccttcagaccgaattgatccataccaagagcatgggactcctgctctctgaatatctttctttttctttttttatatgtgtgttcgacctataggccttcttttgagacaaaatgaccggccaagcagtttttaaacttggaatatatttttcatttttaagacaactggctgtccgcagcctttaatcccaagtttacgtgctttgttatctttaatgaatatcgttccttgttatgatcaatgtgcaactgtgtttgttttattttttcatgcttgttatttgtttttaccaatgctttgtacgggtatagttgcccccaagtgacggagcagacttttgactcttgtcacttgcatttaacaagtacgatttttgtctgttcagatctatgggttcgagtagacctatgtacgcatttaatggtaaatttataacttgctaatagaattgacacaatttgaattaaaataaacatctttattcatttattggtcagaacacatttgttactgtagttacttacataaaagctagtatattgatctaacttgatctttagcttaatttaaacaacacaaattgcattaaatggaaattgtactttcagaagtggtcatccgacctgagtactttgttattttattcgaacctttgggtgtggtctgcccggaaggccatttacttaagagtaaatgttcttacattgcgtacttaaaatggtcatctgacctggtacttttactagtagtattttcttaaatgttccccattctaataccttggcaccaaaaccagttgcatgttttcatcttacttacccagtttgtatgctcctgattctagaacttcaaccacctgatatggaccttcccagtttggtccaagcacacctgtcgtgttgtctttggttttcaaaaatacccttttgaggaccatatctcccacaaaaaactttcgcgccttcactttcttgttaaagtaccgagctaccttttgttgatgggccaccaactttaggtttgctgcagctcatttttctttgattttgtcaagtgattcta

SEQ ID NO: 231361 - DNA, 1309 bp, Cannabis indica
gggcccacaacaatatataatcatgaataattataaaatacaaataattaatgctaattgccattacttatctataatctaatatgcggtcattacaattattcccctattaaaaggattttgtcctcgaaatctaacttgaataattttgggtattaagccttcatgttggactctaattcccaggtggcttcttctaccttactgttcctccagagtaccttgaccaaaactatggtcttgtttcgaagaactttttctttactatcaaggatttgaactgaccgttcctcataagacaagtctggctatagttctagggcttcgtaactcaagacatgagttgggtctatgagttgggtctaaaacatttttgaaatatgaaatacattatgaacagccgataacgctggtggtatggctagcctatacgctacttgcccgaccttctcaagtatctcaaatggccttataaacttagggcttaacttgcccctctttccaaattggtgcaacttgcaggaaaacatgttctcctacttgaaatgcaatgtctctgcgcttcagatcagcgtaacttttctgcctagtttgtaaagcaaacatccgagcctagatcttgtctattgcttcattggtcctttaaactaactaaggacccagatacttcttttctcctattttgtcccaatgaattggagaacgacacttcctaccatacatcatttaatagggagccattcctattatactttggtagttgttgtaggaagattctatcaaaggtaagtattttctccatgaaccctcaaagtccatgacacaggctcgtggtaagtcttctaatatttgaattattctctctgattgtccatcagtctgagggtgaaaagttgtactgaattttagctttgtacccatagctctccgaagatttacccagaatttcaatataaactttggatccctgtctgaaacaatggattttggagctatatggaggtgaactatctctttcacatacaactctgcatactgatccaccgtataggttgctttttactggcagaaaatgtgttgacttcatgaaacattccactatgacccatattgagtcatacatttcagtgattctgagcgaacccacaatgtccattgtaatatcctcccacttccattcaggagtgctaatggttgtagtaaccctgtcagcgtctagttctcaggttgatatgatgacatgttagacatttagacacgtaatccactacatctttcttcattcaacaccaccaataaaagggtttca

SEQ ID NO: 231362 - DNA, 663 bp, Cannabis indica
ttaatctcgtttagccaagctcgaagaaaattattgttttacatctatatatttatagaatctatagattacatatctatgattagtgctcccactaaactgcactaccatgttcccaagatgtaagtattgggtcgatccaatgggtcagctttaacgaacaagtcaaagaacacaaataatacacttgaaccagaatctaatcatcttaagatcaagatcattgatctatgatcaactaagtgatattttcttagaaaagatattataataagtttaagatatcttttccattgtaaatatcgatccattttgatgtataactatacatccagcataagtttactttagtaatgccttagaaaagacataccagtatataagtttaagtaaacaaaatttttttattttatatcagtgtaaatcttgtgtactgataaattgtgagaccaataagtaaagcgacagcaaaaattctttaccaaaaaaaacataaataaataataattaattatacactaatataagcatatatacattttcatacatatatatacacataatatatactccatacacacatatatatacataggccatggattcaatcccctcacccactttttttttttctagaccggttcactcacttaatataactca

SEQ ID NO: 231363 - DNA, 1943 bp, Cannabis indica
attttaatttagcccctcaacaaattataaattaactaatagtatttacacgttattttcatgacaatttaatatctttttgatactcataacataattggtcacgtaattttatatcacactttatcatagtatatacattatacatatgtgcctacaataaaattttaattcaacattgatttcatagaattatgttttcaaaactcatctatacgctatttgtgtcaatctttattcttaattattccttttaactaatcttgtcgttcataataacaacaatattaatgttcttattttattatttttgatttaaatccctttcgttatttttattattgtcaatttttatgtgttcatactctattaatcttgtgttagaatcataagaattgtcctaaattcccaacaacaattggtgcggaatttgaaattaatgataatatagatgatggcgggaatgataaagatatgagcattgctattgggcaccagtggtgcctagcaccttctaaatatgtcgacttacaattggctagcgatactctataaaaattattatattaaactatatgggacccgatacttaattgcaccaatagcgatattgacacgtaggagggtgctaggcaccagtggtgccctttagcatttctctaaagatatagataaatttaatgatatcttaatgacttcgatcgtagatccactaagagtgcgcacaataaccaataatgaggacaaaataaaaaaatctaaagttatgaatagtatttctacaaatattgatttatttggagaatctgtatttaaaattgtcctgaagtttcaaagtttggtcgatgcattatctaataagaaagtaactgacaacttatatgcagaattaagatcaatggtctttctgtaatgcatagtattcaagccaccaatatattattgaaaaaccttcattcatgcaagtgtttcaatatatgatgagataaaaatataatacattatgaaaataatgcataattatataattgttagacgtttgtttttgttttaatatattagaacattgttattttaagattttatttaggatttaatttgcctatttgaataatatgtttataatttttttcttttgtaaaaaatatatacatatttagctatatgcaacgtttgaaagtggcatatcattattgtgaaataaaaatcagtcatagtatataattttttaatgaattttgcaataaataaattaaaagtaatcatttttatgaaggataatttggtcaaactaaaagattacttttcttaattatataaataaaattattacaattcttttttcaataaatttattaaataacatataattctgtcacttaaatattgaaaaaatctcttgggtgaatagaaagaataagtataattttgattgttttgctaatgtacaaagtaacaagcattatatataatttgatcagtcgatctcctttcaaagagaaccaaaatataccacataaaaactctactttgacaaaaatgggccgtcaagaacgtaaaggatgtagggtggacagttgtggatcgtacatagatggtaatatggattaaagcccgctagaggatatgacattgatacgatttcaagaattatgaggttctatcttaaaatttattatgatgagtgaagtagttcatattcacatatatggctcaatattttttatatgtaatgtatgttagacaactttatccaatagaagtaagagtcattatagctgttgaccgaggttttcggcaactaataaaatatgaatataataatgagctgtaagaaagcgggatgaagactttttacgtggttggggcgttaatgagccttagtccacgagccactgatatttatggatgtctttaatacagattctacacttgggagaatg

SEQ ID NO: 231364 - DNA, 794 bp, Cannabis indica
taattgatcattacataatacattataggtatgtatatgattcatatatgtgcagggtcattagtacataacaatattgctcaaaacttctttacaaactagcagcacgaaccatataaatggcctgagtattataatctctatacaattataattgttcaaccagtctattcatactaaaaatcattatccttctattcttaatattctgtttcaaacaatgtaaaagttttggaatggacgaaattttcttctcccaaaaagctaaattattacggctcctccacccctgatacactaccgagacaattgtcattgtataaacctactttcgaaaagaagaaatgcaagatctacaaatctagctatgtcaataatttctccaatttccaactatttgaatgccaaccaagccagatttttacagcctccaagcatccgttgctataagagcactcaaagaacaaatgcttgtcttgacggatattaaagcatattgcacaatattgtcccacatggatcaaatgtaaaaatattgagccatatataataacataagctactccactcattaccaattgattttgagatggaacctcataattcttaacaaagcaacataatctttcattatagcttgcaatctagtaacgatagtcagctaaatctatatttagaaataataaatcaaacccaaaccacaaagtaattgacttaaacaaaatatagactccctttaataattttacctctctttcttgaatgaatctcctcccaaagatagcggtgcttgc

SEQ ID NO: 231365 - DNA, 1066 bp, Cannabis indica
aaaatattaaattttgcatcatattttatatttgtgaatttaagtacaatgctaaaaattaatacatatattacaaattattttttattttcaaatatattacaattttgaagatggtataataggttaatgtgaaaataatgacttgaatgaaaaccacgtacagttaatctaccattgacttgaagatggtataatacaataatattgtgttgttttggagttgtaggttttgttcattcacaagtacagtggtaaaatggtgattgatagtgcaattttgataagcttcagttacgtcttctccacagtcaacatgatttattgtaactataaactgtaccccaacaccattattcaaggccgtactactaataatattgacaatgaccaatattattcaactaccccaacatttattgatatgaaatactttggagctgtcctatttttggtaggcacaagtgggaacttctaccaccattgccttctttcccaacttaggaagaaaggagatactaaagaatcatcatcatcatcctacaagattcccaagggaggcctctttggcttggtgatttgtcctcactacctctttgagattttaggctatgtgggaatttcactcatttctcaaactttgtatgcttactctttcacattaggcactattttctacttggtgggaaggagttatgccactagaaattggtacctttccaaatttgaagacttccctaaacacgtcaaggctctcgttccatttattttctaataagcttaattagtttatgattgatacgagtactcatattgctattatatacactgtattggactatatttaattcatttaagtgagtgtgactgtaacctgttgtgtgttataatattatctgtagaacttctacttaattatttgtcatataatgagtataattgtgtagaagtactcagatatccaatacatcaataaaattttgcaatataggaagttattggagaatattgttccacatggatcaaatgtaagaatattgagctatatataagaacatgggctact

SEQ ID NO: 231366 - DNA, 1115 bp, Cannabis indica
aatgttcgtacgacagtactattaaccataatatcagcctatactcggcacactagtcatactctagctgtaccgatgtgatactgtcaagtagtacagtactatcgaccataatatcagcctctactcggtatgtaagtcatactctagacgtaccgatgtgatactgtcggatagtactaaagccaacatacatatctaatgtaatctaacaagcttaactaacatgtactcttaacatgtatatacataagcatacctttatactaatcatacctcgtttctgaatttaagtgtgccagccaacctgagtggaacaactgctcggcgaattacaagctcctaaatcacatcaatcataacataggtaagtgacacgctaaatcactttccggggacatagacttgaaactaaaagttttcctctcgataaataacatagagataccctaaacatcacaaaactgggaaaaactagtgttcccaaaattgcccaaccggtagaccggttcccaaccggaattctggttctgcggggttttttggggaccaactggaattccagttcctacaggtccctaggaactggaattgcggttcagtgcaagaatcactcaaaattccattaaaacttcaattcatccccaaactctaccaaactttccagacctattatttagaccataaagaacatatcccaagcaataaaaccacctatcatgctcagattcaagattcaccatgtgagagaaaagtttgagctcttaagctcaaaacttgaacaaacctcacaaaaagccaccaaaacacatcaatctaacttagataacctcaaattaacttcagaaacaaacttaaacaacagcagtagctacaaaactcaaacttacgatttcatgcaaaatcacaacttaaagctctttaaaccaaagaaagagaagctagaaatcttaccatgacttggatactcttaaagcttgctaaaatctccttgaattgctgaagatcaatctcaaaccctagctgttctatggagctcgagagagagagggttttggagagagaaaggcatcttggtctaattcttattttttaaactaagtgagtaaataaaa

SEQ ID NO: 231367 - DNA, 1075 bp, Cannabis indica
attacttgccttttccatggtttcttttgcctccttttgcttcttttgaacctgctttagctgtttttcttccctttttttctgaatttcagcatgccaacaagttgctttggtatgtccaaatttagaacagctagagcactttgatgggagccattcatattcaatattctgttcttgtagctgtccaaactcattaaagtaaggaatgaaccgtggtggtgcatccgtgatttcaatttcgactaggactctagcaaattgtaatctcgttctatctttagtgtgttggtccaccattataggttttccaattgcgctcacaagtgcacttaaaattttggtgccccaatattgaaggcctaaatcgtgcagttttatccacaagggaaccgaatgtacaagattcaaagcatttaaatccattgtccaaggtcgaattattaccggttttttgtcgaattggattactcctgcttccaacacttgatcactggttgcttcatctcaaaatctcaccattattagccccattgacatcttagatacttgctggatccccaaatgtccccagactcgtttgatgaagccttcgaaaatgggaacaggaggatttgctccaagaactttgcagattaaagctgatttccaacaattcccctcttctctaacctcctccaaatcaacttgtgctatcttgattccatcccttatcattggttctatgaaaagaagcttttgatcccgattcattgcttttccatttgagaatgtttcccaggtcttcttcgcagacattggagatagttcaaggttcgaatgcctgctctgttcctcctcaacctccatcggccggcttgtggatctctgaatctcgccctgaacaacatcttcagaagacagaatatcttggtttttaaccaagtctccaattaggtttaatccctttgtcgaaccattctcgtcgacatcctcagattcctcacatcctgcttgtcaatcgtcaataggggatcgaatgactagcttacgtcccaccttttacttcctcgccatgggagaagaaagcagagca

SEQ ID NO: 231368 - DNA, 1485 bp, Cannabis indica
aatttttactttttctttagaatttttcaaaaattcatttacaaaatgtctattgtaactataattaatatacattatcaactctcacataaaatatttaattataatttcttcaagtgccgaaaatatatataacctaaaaataatcaacaccatataagacaacatatttattagaattattgtacggactaatataatcccaaatattaaattccataatcacaaccattaattaaggtgcctatcaattgttaacaattataatgggatgatttatactaattgattatattagaggcatgtgagagcacccttttgattataattggtccatcaaattatatagtccaccattaattaaaccgtataggcccaattagcccataaccatttagggttagaagggtgtaatatatatttgataaaggttttaattaatggtaatgagatatagataagaggattgctccgcattggcttctcttcaagattcaccattaaacttgttattgcattcatcttattggaagattctaagtgtcaaatggctcacatggacaacatggatttaagagatatgctatattgctcattaatgctttaaataaaatattagatcttagttgatatttatgagcattgttgatggttattaactaatgatgtggtgttcaatgctcatataataatgttatatcattcaacaattagtatcaagagctagtatatttgattttaaggcttgatcttttttatcaaaatctatttatttaatatgacttttgattaaatttttaggtggaatgtgttatttttggagaaaatttgattgagtgttttttgaatgggtttaccttgttttcgaatggttattatatggtttttattgtgaaatatcgagtttattttaaaactcattaatggagaaaagctcatttttggttcatatttttggccattattttgtaattttttgagctgaatggatgttggaaattgatagagagtttaaaatggaacaaactccacatttttcatcaaaaacggttgtcggagaaggctgttctgatcaggtcttgaatcgggtcccatgggcccgagatgtagacccgcttgacgtgtcgttttgcccctattagacaaaacgacatgtcgttttgcacaaagttgaagcctccttacagctggaaacgatgggttgtttaagacccaggagaaagtcatttgcgccaaacgataagtcatttccaaaaaatgacatgtcgtacatatattaaagaaagaaacagggcacatggtggcgcgtggagggtcaatttttggccattttcactattttattctatttttagcattctatgattttcacgtattgtgtttatgcacaatattaattcataaattttattcataatctttgtaattaattttattgtggcataattttttgtttatttaattatttattaatttcacactaat

SEQ ID NO: 231369 - DNA, 781 bp, Cannabis indica
tgagtgaggactcacacacgcgctgccgccattcgtcgggccggtgaggtgtcacttaattttttaaagaaaaactatttaattaaataatgatttattttttacttatttattaattaattttaacgttatagtaaaatgcgatcagtcaatgatccactttttactgccatgatccaactcctcctccacaataatattactattttcttaccatttattcttggatcgacttccctatatataaaacaacggaagaccacatccttttcaacatcaaaaaaaatttctttcttccctatgatttttcttaaagcaaaatttagggtgtaatagagcgatatagttcggtgcagaacatatcgtacgtatatggagtctgttttatcctggagacgccgtgattgctagactgtcgtgcacacttcgaacagagccgcgaaacgtcttaaagaaagcgacattgtccgcgactcagccagaattttctatgagtaattcatttcagtttcattatttttaattttggtttaacaaaaatgtatagtatatgtaaaaagtgcatatagtatatatataatattatatagtagagatataatataaatatatgtgtctagaggagaagaagagaataaaactagagaatagaacaaaataaaaagagatagaagaacaaacacttgaattggagatggagatcactaaaagcttgaacaaggtttttacccctttgtctaagaaaattatttccctctctataaaacacttaagactttgt

SEQ ID NO: 231370 - DNA, 1183 bp, Cannabis indica
tctcactgttttcttgaatctgcatgactttaagtttttttaagctttttgaaatttttgattctcacgttatagtgtagtctttttcacattataatatgcatgatagctttatgatgtataatgtatgactttttgatgaaaaatattatgttttaagcttcgtttagattcttgactctttaagtcacgaagaacacaaagaaaactatttgcatttttgaaaaataggattttgatccttaggaacccttggccggcacacaaggtttgtttatgaccctcgccggcacatacttttggcctaagaacctggccagctcatgcatttgttttaggaacctggccagttcatggcttcaagcatgagaacttggccgattcacagtcttgtcctgggaccctggctggcatgtggctttggacctaataacttggccagttttggccttaatgttgactattcattgctttttatgcttattttgcctttatccattactcgattcccataagaactctgtatggcatatgtcgagtctatcttggccaattagcagcctaaactcaatgttgtttgatttcttgcacctagatcttgtactttgctgattaacgactttgtacattgactagtacccttaggtttagttgactcatatcttgtctaagtctctttattttgtccagttgctcacctccctctacctttttttgtacatagatgaacccgcatgacttttggggaggtgacaaccgaatcgataaagacttacttagtcttctcttggaagaccatcgtccaactccttcagctagttcttcttcctggggttctttgggtaacccctctcctgaacctaaggtccaacaccatcaaattcgaagcgaataggcgatgaattttacggtcagttcgtttgggaactgaaccaggggtggaggcaattcgtccccaagataatgctaatcccaacatactgttcaacaaacttaataacattaatacgtgaaaaaagtatttatcttatttctgcattaaaaagagtcgttaaagctttgtaaaaactagtttttttttccaactgcatttcatgttattcaacaaacttaataacattaatacaatctgaaatcaacagttttatggcgtaggtgtaagagagcaagagcttcaatcatc

SEQ ID NO: 231371 - DNA, 1554 bp, Cannabis indica
gttagggcatgtgagtgaaagagacctaatgaacttgacaaacacggcctgttaaggaacaagttgaatggaaaattagagttttgtgaagaatgtgtactaggcaagagctgtagggtaaagttttctactggtgtgcatgtcactaaagaaccactcaactatgtgcattcagatttgtggggtccttccaggacacaaactcttggaggtgttaattacttcatgagtatcattgatgatttaagtaggaaggtttgggttttcatgttgagaaacaagaatcaagcttcggaaacattcagcaattggagaaagctcatggaaaaccaaacaggcagaaaactgaaggtattaaggacagataatggataggaatactgctcagatgaattcaaggactattgtgctaagactgggatcaaaagacacaaatctgtggtcaagacacctcaacagaatgggttggctgagagaatgaacggaactattctagaaagagttagatgtatgctgaagggtgcaggattgcagaaacatttttggggtgaagctgtgaagacaacatgctatttaatcaacaaatttccctctgttgcattaaatttcaaaacacctcaagagatatggattggaaacaaacctaactatgatcacttaaaggtttttggttgtcttgcctatgctcatgttagacaagacaaattagaacctagggccctgaaatgcttgttccttgaatatcctgatggtgtgaaaggctataagctttggtgcttagaggatggttacaagaagtgcattattagcagagatgtagtattcaaggagaatgaaatggcaatgaaacctggacagaattcaattgtgaatggaagggtacaagttcaggtggatccaaatgaaacaaggcaagacacacatactcaagaagcacctctaccagaaacaggagaagcacaaatcgaatctgatgatgaaacacatgccaatcaagaaaatttgagaagttaccaacttgcaagggatagagaaaggaggcaaacaaaggctcctgaaagacttggctatgcagactactctgcatcagaatgcactgcctttgcctttgctgctgcagaagagattgacaatgcagaacccatcagctatacagaagcaattcaaggcaaagcaagagagaaatggctaatggctatcaatgaagaaatggattctctgatcaaaaataaaacatggattgtggtgaaaaaacctaaagggcaaagagttataggctgcaaatggatatttagagaaaaggaaagtgacaatggaattggcaaggtcagatacaaggcaaggcttgtagctaaggaattcagtcaaaaagaaggtatagattacagtgatatctactcctttgttttcaaacaaacatcaatcagaattatgatggctctggctgcaaaattcgactatgaggtggatcaaatggatgtcaaaattgcatttttgcatggcatgttagatgaagaaatttatatggctattccagaaggtctggaggttgaa

SEQ ID NO: 231372 - DNA, 994 bp, Cannabis indica
aagatttttttgcagttgaaaattttcattttttttatttttacatcaaactttttactttataccatatatagctttcaccttatggtataaacagggctaagcatatgcctagtatttatatcaaacctagggccctaaaaaagaatttttctcttttaaaataatacattttccaaactaatttttttaaaccatcacaatttttttttctaaactaatggctaaaaataaaattttttttggcccactaaatttcaataccaactttatttttttactttaaaaaaatttatttagaacatttattgcgagtgctggtaaaagtgtacataaatttggtgttaatgattgggcttgctttaatgatgattggatgtatgtgtcaaaattctaaattaggttactattaaaaatataataaacaatacgctagaaggaggggtcgaacctccgaccttatggttaacagccatacgctctaaccaactgagctattccagctacatatcatcatgcaacactaaataaaatattataattagacattcatttccacgtcaatggcaaattttaattttactgaaatatatttcaaaatttcaaaataagcacacatattcttgttttttccattcaatatatttccaaatatattctatacattattgtgccatataatccctttaaataaattataaattatatattacttgttttttctttttcaattcatctaagtatacatgtacatttatatttatatatttatcttattttacaacatattgttaatttgaaaaaatttcatagacatgaaagtttgacacgtagtaagaaagataatatctcggagttgagtagtcccaacttagaagggattcttagccctacgcccaagttgactttgggaactctgaaatggaaattcagatttcaattactcgttttcaactcactaacttttagcattatgtaccatgaaaacatggag

SEQ ID NO: 231373 - DNA, 906 bp, Cannabis indica
gaaagtaaagaattttctgtggagaacttgctcgaaatgtctcccaactaaatctcagctgagaattagacatgtgcaacttcagactaactgcccatggtgtaatgcagatgcagaaacatccttccacttgtttgttcaatgcccggtagcacaagcttgctggtgcaacatcggactggcagtgtttaatacacaagctgtcacgtttgctgcttggtttcaagcgggtttggaaagctgggatgcagccactaagatagaggtttcaatgctttgttgggcgttatggaagtatagaaatgacaaagtttggaatgctaaatctcctacggttgatcaaattgtcacttcagcaaaacttactttagctaattggttagatgctcaaaaccggttccagatttcatcactcaatcatgagagtgaggaaaagaatgagcattggtctccccctgtttttccacagctaaagattaacgttgatggtgctctttttcaacatgaacacaagttcggagtaggaatggtggctcgaacagcagctagtgccgtgatagaagctcggcagatcctacattctggtgtggtttctcctttgttggctgaagcagtgggaataaaagaggcgttgagctggataaaaaataaaaggtggagtgacttagtgcttgaaaccgattgcctcaatgtggttcatgattttaattctaataaaccaatgatctctccttatggttttgttattaaagattgtaaggcaattttagaacatcttgttaatgtttcaatagtttttgttaagcgatccgcgaacaaagttgcgcatgcattggcacgtaactctgttcttatggctgattgtactttcagtatggctaccctgccaactgatatttcatcctt

SEQ ID NO: 231374 - DNA, 856 bp, Cannabis indica
aaaccgaaatttatattgtaatttcaaaattacataaaatgtcgtaaactaaataaaagtacttttagttcataaactataatcttatgtacaatgtaaattaaaagaaaaaaaactacagatccacagcaacatcgtcgccgtcgtcatcaccgggatggccagtttgagaggaggacccagtagcatagccaggagactgaaatggcagaataagtggaatcagaggcattgcgggcatgttaaatcctgaaacagtgttggccaattggatcatttgttactgaaacgcactcatgatttgattccgagtcttcatcaattgttgttgctacttccttctcttccacccttcacttcagtgcctcatattcctcttgagtgacagtgggctgctcggagggacttgccctgggagttgctctttttgcccgtgtcttaagtctcagtaactggcccagtcctttgtggtctgaccgctcacccaacacctgtgtcataacaggcatatttgcgagaaattaggtgaggctgacattgtactggcactgacattggttggcgctgattgagtttcacgaatctcaacaattttggccttcaaaaaaatttatgaaactaatagagttaaatagaaattaaaatatacaaatagtttattataaatataaaattacttacaagcagttattgtgtgtgctcattgcgccatttattgtccttgcagtggaactttgcaagagtatccacaacattaggaattcttccatgcatatggggacaacctatttttatacaatataaaaattagaaaaatattattaaaaatattatcatgttgaaaatatcatacccc

SEQ ID NO: 231375 - DNA, 1654 bp, Cannabis indica
aataattttcgctagtctttcaatttgatccaccacatacatggagtagtgtgagctactaggataaagtgtataatttgttcatgttaatttcttaatacacgagcaaggaaattttgagagagaaaaatagtttttcttttctccctatttatttcgaaaattatagtgtaaaaagcatcttctgatttctcaaatcagaattctatttacaatagttaattctcaattaattaaattatatttaatcatttaaataaatatttataaccgaatttagttattgatatttctgatgaagaaatttctcaactaacttcgaggaaatatctcaaccaacttaaaatatctttagccactttttcaaatttaaatatttgtctaattaaataatcaattaacccaaaaaaataaaaccaataaggtcaccttatattatggataggcgcctaccttgtcttagttaagacaaggattatcgaacatttgtgatacgaaccacaccaacagttgtgatgaaatccgaaaccaaatatggcagactctaagaattcttgaaatttgaaagtggaaccgcggcccaatgcttagttaagcatgaactttggtatgaaggaagatgccacaaacggtggtggaaatctggttgataagtcaggttgaacgctacaaggaatactccttgataagttcgaatagttctctcaagaacttaagaagaaaacctctcaaaattttattcaaaaataatttgattttccaaagtgtttacaaggctttatatagccaacttacaaccaagaaaaaataaaactaaaagaaagacaattttctaaataaaacaaagatagaataaaggaaacaaaattaaaaagaaaaagctgttaaatgtctagaaaaacgtgatcagctcaatttagatctaaattgagtctactttgatgagaagcacaaatctttgttctccttgaatctcttggctcgcgcccccgtcaccgggccaactggaacttgacttgtttatttagccttagtgttctcatcaatttgtgttgtaattttttttattatatttgttgaactaaaatttatatgttatattttttctttgtatatatatgtatatcaattttaatattttagggcttccaaaatggtgggacctaagcccgatcttgacaggcttgattaagtgtcacaaataatatagttaagtaatattgttgctagtattcttactatttaagttagttgaagatattttttataattttttaaaaaatcaatatataaaggagataaatgaggtggtgatataacactctaaaatctctctaaagttatttttctcttctctccttaattctctcattttcaatattttattagagcataaatctacaaaatgatattttattaatattttaataattttttttttataaaatatctatcataaatcaattattatttttttaaaaaatactatatataatatcatatcacgttattattattaataataataattaatcaaccatcaatatatctatatatatatttatatgaggtggtaacatgacgctctaaaattttatatttctattattattattatatctatacatctatatgaggttttttaatttttaaa

SEQ ID NO: 231376 - DNA, 1174 bp, Cannabis indica
ctagaacaattatctataatagtgacgaaatatttgaaacctaggtgttatagtattgttaggcccacatatatccacatatatcaaatcaaaagaatgttttgaaatgttatggttcgatatgaaagaaagttttctttgcttagcataatgacatatggaacactgcaataaagaattagaatttgaatgaaatttcaactagcgcatagattggctctcaactggatggtgttatagtattgaaaggcccccataatgacatatgggcagtatccattgtaagatacatcctctggaccaactagcgcatggattggctctcaactggatggtgtgttcagagtaccacatcgatcaaggagtcgtactacctctttatttgtactttcatgatattgtcgcttatctcaagatgtgtccaacacaaatcaccccgaaaggtatcaagtacctttcagcaatgttcgttttatataaggagctaggctagccctagcccacttcttatgagattggatactatttcgacttggagtctatttcgcagtaacatcggtctgaatatttctattttagccaagttagtcaccaatggctagatgattccaataactcatctatgccaaaggttgacgatcatgctaacaagtacttcattgcttgagatgttaaagagatttgccatcgacactttcatagagtactgtttttcaagtgttccatccccacattacaaataaagggatagggcaaatcacatcctttcttttatcggctgagcagagaaacattatctggttgatcaatgtggataatttctagatgtagggcttgtatcctcctattcctggacttgcaagagtgccagctactgatgaggcctaccctggagatgggcaaggccctaacttggatgatgatgaagtacatttgtctcatattgcacgaaatttggaaaggagagagaaggctctccaccggtgcttggccagtgggggtccagcaggtgatgcttcccttcatattgggcctagaggccaggtttctgagagacttacatggcctatgcctacatctagtggcaagggcaaggctgtagttgaaggctcggatagttcctcttctgatgatgatgatatttgatagttgataacaccatgcttttgttctt

SEQ ID NO: 231377 - DNA, 1655 bp, Cannabis indica
gtgttcggatcttcaaaataatgcgagcttagttttattagtcgcttggtgacacttttgttatattatattatgttcatgtttgaaaaatatattgagatctagagttttacaaatagtttgtatttacgatgtatatttatgaaagtattttgttatcattaagtttttattaaacaggattttatattgtaccctttgaataacaaaggttagcacactaattaagaaaatatagtaacgtgcctaagctagtacggcattacaatttggtattagaacctctaggttgtttgttaatgatcgtcaagatatgtataatcatcatcagagacaagctcgactcatggtccattaagtatttacatgctttagtagtttaaaattagataagcatgataggaagcatgttagctgtgtgagcagaataaaagcatgtttaagtttccatgttatgtggtataagaatacaattaggaccatcacctaatttacctaattttttaattaaggcgatctgataggaatcatggtataataattagggttgatgatggtcaaaacagttagattttcccctctagttgttgccatagcatagggtgtagtttaagcattataagtggagatttagacccaccataggctttgtccaattgggaacaaagggataagttagagtgatatatcagttcaaacaatataccccatagggattaatatcatgtgtagtgtgatcaaaagcagatgtaaaagattctgaaggaaagaatctcgcatttcaaggaaaattcaaatgttatgtatgaaaaattgtgtttagacactaatagattttttagtttatgaaaggtgcgaaggttgggtaacttgcagtacgttccaattccaggaagacaacctggttttgtggatagatggtatcccttagttacagtgtgctgtgaaaattctaacacgtaagtatacgtatcatttacatgtaataacccacaagaatgagatcgatcccacaaggactgtagctaagtactaaataattgaatctttgtttatatttggcaaacaaattgtgtgatgttgaaagtaacaaaaataatagaaataaatgaataaataagagaagaaaataagaataatttagaaatttaagaaatttaacttcaattgcatcaacttcctatggcgaaatacaatctaaatactcttttcatttcatgttataggagattaaaattcaatctatattcttattagaatatatagaatctcaatcatatggaaaaatcttaaacttcttgtaacgccctaaataattaggcactctacccaataaacttatgaaaccctaatcccctaatcgggattacaggaaaaataagcgcaaaaattaaattttattaataaacggaataaaaataacttgtaataatttaaaccttataatttaaaagttacaaaagttgggatcccaaaagtaattacaaaacactattacaagttcgtttcctctagccgacctaagcggcaaaatagagtctcaaaatacatcactggtagaccgcaacccgcttggtctagtgtagcccgaacatgtacattcctcgtccagctcatacactcatggctgatcaaacacaactttaccctttcct

SEQ ID NO: 231378 - DNA, 1562 bp, Cannabis indica
catctactttatattattttatattattttataacaaaattataatagatatattaatgagtcaacttactatatttagatttgtataactatttttatgactaatttatatagtattaatgagtaagcctactaattacataaaattgtaaattaataattacaaaacataatatgccccatctgttttttttttcttttacaaattaggaggtatttggtctgaacaatactgttgcagcaacctaaaatgttctaactaatagagtcttgtcgtatgacatgttggtaaaaattctctcaagtgtttaaggttgttttgttgtctcttgattctcatggcttctagtagtcaacacacttttgatttgaatgagcaatatgctcagataagtttggatgatgaggaggaaggagtcttgattgggagagatgatgaggcggaagaagttttatttgatgatcggtggtgcttggttgggaagttcctcacgggaaggccggtggattttgatgcgatgaggcacttgatggcctcgctttggcaaccgggtaagggtgttttcatcaaagaattgggtccgaatagatacctcttccaattctttcatgaactggatgtccaaactgttatagatggcagcccttggacatttaatcgatgtcctcttgtgtttcatagactgaagaaaggagaagaccctaaggtagtgacactacacaagatcgacttctgggttcagattcatgatctgaaatctggtttcatgttggagagggtagttcggagtgctggcggctatattggtacgtttattaaatctgatccaaagaattttaatggtatttggcgagaatatttacgtgttcgtacgacggttgatattgctaaacctctaaagagaaggatgaaactttgtaaggagaatggagagtggatttgggcaaactttaaatatgaacacctccctactttttgttttgtttgtggaattattggacattaaaaacgttcttatccgaaacgatttgaacagcctgttgagcagttggtaaagccgtatggtgctgctatgcgtgcggatatgaggaggaaaaattatcgtgttggttctcaatggcttcggactgatctggatggcggagcggtggctggtggtagcgccggccgttcgtttggtgctggtactgaagtaaatgcttccccaaagatcatggatgttgattgtgttgaccatggtggtgatcatgatcccatgaaattaggaaggcaaaaaaagaaggaaatatttatggaaagtgtgaaggcatttcgacagcctggtggggatggagatgctcaatcattggcatctgatgaggacattaatgatgaggaagatttggtggtgttgctggatagtaagagaagacgtactgggagggttggtgtcgtgcatggtgaggaggtagcttcggctaaggggttaagtggagttgatgagcttgttgggtcaaaaaatgaatcacaggtgggccttggtatgcaggcccacccatcatcatgagtattatctcttgga

SEQ ID NO: 231379 - DNA, 1476 bp, Cannabis indica
tcatttctaagttccacgctgcttgaaacacaaactctagttctatacaacaacatccaattacttgacattgtaaaatctttagcttgaccagccaaaacctcttctcagatctttacaaattccgaatcagttaactaagttgttgtaattctgtttagcagattagattgtaatgtcaaattattaagttttcctacaacaaactcaatacctaatctgaccctatcatttgctagctggggtgaaatcttaatcatactagttacttgacctggaccctttctactaagggcatctgccatcacattggccttcccgggatggtaaaggatttcacagtcataatccttaaccaactccaaccaacatctttgcctcatattcaaatctttatgagtaaaaaaatatttgaggctcttgtgatcggtgtaaatctcacactattctctatagagataatgccgccaaatcttcaaagcaaaaactatcgtggcaagttctagatcgtgagttgggtattgctgttcatattcttttaattgacgggaggcataagaaatgacccgatcggcttgcatcaaaacacaccccaaaccctatttggatgcattgtagtacaccatgaacttctctttatcagatggtatggctaataccggagttgtgatcaatctctggtttaaatcctgaaagcttgcttcacacttatctgtccacggaaattgctgattctttttagtgagttcggttaaaggtgttgagatcttagaaactccctcaacaaaccgacgatattaaccagccaaacccaaaaaacttctaattttcgtaactatcttcagtctcaaccaatccctaccggactcaatcttctctggatccaccttgattccatcattactgacaatgtgttcaagaaaagacacctgagatagccaaaatttatacttttaaacttggcatacagtttatggtcttgtagtcgttgtagaaccatctaaaggtgttgctcatgctccgcttttgattaagagtacacaaggatgtcgccaataaatactataacacaaatatcgaggaaatccttgaataccatattcatcagattcataaaagctgctgaagcattggtcagtccaaaagacataaccagaaattcatagtgcccatacctagtgcagaaagcagtctttggaatttccccctctcgaattctcaactgatgatagctcgatcagagatcaattttggagaagactatttctccctgaagttgatcaaacaggtcatcgatcgtaggtaaaggatacttattcttgatagtcaatttttttagttcccgataatgcacatgcgcagggatttgtctttcttcttaacaaataacatgggagctcccaaaggtgacatacttggtcatgaaaaccctaagtcaagcaacccctgaagctgaatctgtaattctttaagctc

SEQ ID NO: 231380 - DNA, 969 bp, Cannabis indica
aaatgactcccaaacacgattaaaacttaattaaaaatatactaaaattaatctaaaactaatactaaaaataacctaacaggtagcgtcccaagttgattgtcaacttgggtgctgggcccagcactatgtcaacctggggcgttgggccctgtttctagggtctcaggattgtggttttttcctcgagttaaatcttcattatttctgatgatggaaaaaatgttcgaaatactttttagtgaacttgattagaaacagcccaggttgacaatatgtcaacttgggcgctgggtccagtcccagttgtcagcctgggcgctgggtcccccttccccagaaatagttgaatcattatattttctaaaaatgaataagatgatcagaagtattcttgaaaaactccaaattaaattgcccaagttgacaaaatgtgaacttgggcgcaaggccagccccaagtgtcaacctgggcgctgggtcgtgttcttggcacccaggatgtgttgtttcttttgcaaaaggacctatttccccatttttgataaagataaagaagataaaaaatttggatcatcaatctgatacttgaaaggcgcccagattgatgaattgtcaacctgggcactgggtgctcaaggccccaggtgctcaaaaatgaacttgctccgattttgattctgatgcctcaaatatgtctgtagtatgtctagtttataacccaatgcaagtgttaacttgggcacttggtgaaacactaggtgcccaggttggtttccaggttgtaggttcgtggtgccaatactttctatatgtagcgtttcgtaattggttagtgatatttcactacaaaaaatttgatttttagtcacaaaaaaagttgcgactacttaaaaataatcattcctatgttgtgactaaatattcgtggctaaagataatagtcacaaaaaatcacaatttgttgtg

SEQ ID NO: 231381 - DNA, 1069 bp, Cannabis indica
agcaaacacaacttaaaattatgttaagtatacaaaatattaaaaaataatctctaaattattgataattaaataattttattattattatcacgaaagttagatggtttagcttcccctcaaaggataatgattattaaaaaaattataaattcaaaattataaactatgatataatgtagtgcacaatattgaatgactcaaccactacgttaaataggattgattcttgggtgattattttactcgagcatcacagtgaacaaaaccttgattgatgccaacccccaaaaccccaattatattagtacgtgcatcaactttcaaagctaatcaaatttctaaaatggctcttccaaagaaatccacatccaatattcccaccaaaatgcttgtcttcggctataaatatatactaaatttaataaattaattatattactctaataataacattttaattatatatatgcttaattacatttataccctcagacctcatctttgggtgagcatatagaagaaacaagaaaacgtaaatggtctcaataaaaatgccaaaaccatttgacagtggccaaaagcacttctcttggcttcgtcaaaccgtagtaagtccataataatgagtttagcagtgtacaaatgtatggaaggctctcaaattcgtctgtcgaactattttttacaattctccaaatgtcgtgcacatttatatatataattaatcttaaaattaatcttcatgaattaatttatacaatatatatagaacttatgcaggagaaagaaacattagcacaaatgatgcacacactaattaatccaaaatgaattttatacctcttgcggccctacataaatatggtgaattggacttctgtttcctatgtggtactgccattggcagagaagaaactgatgatgagaggggctttccaacacaatgaaagcatggctcctctagcaaaaaattcaagaattagtgatgactgcggacttacgagagttgaaggcagaaatcgcaaaaaaaagccaaaaattagtctgccgaagtttgtgcttttat

SEQ ID NO: 231382 - DNA, 2062 bp, Cannabis indica
ttctctttagttaagtaagcccaggattttataaacatagtcgcggatttcccatctccaacaccatgatgggtagtgaggccaatacaaaatcccttattaggaaaaacagtgatttgaagagccattacagaaacccctgtttccgaaacatgtaatggagaaaccaaaggtcgaacctttgaggcttgaaagggttggtttgaggaaagggtgtcaaagtcagcattggattcggccactgagattgaaacgacgtcgcctggtgtgtaaagagcgattggtttgggggaatgttgaggccatgttagctttccggctagaggtaaaaagtgttggagtgtgagagagagtgagtgtttgagttttgggagaagagagttcaagaaaaatgtagtgtctttgggaagagaatagaagaagagagattggactggtgggaatttgaaccacaaggtatcgaagctggttaatgggagagtgaagtgggtggtggccgtgaatggagccacatgggtgacctcaagtattcttgttgaggccatggccatggttgagtagtgagtagcatttgcaaacttactatatatatatatacacacaacttaaaggcttggtggttgagtggtgagtagcatgtgcaaacttactatatatatatacagaacttaaagtcacttatatatatgagtattgttattgtgcattgctcaacactttttataggtagtggtatacgttattaacgatattttttaaaagttaagttatatgaaactcgatatttaattatattaataacaatataatatcgagaagaatctaaataccaatacagttctttctatataaatccaaattgttatcattgtacggatgataataaatgttaccaactgctttgagaaaaagaagtaatccttggtaaaactatcgctcaattattatttttggttgttgagtatattgattatattgttgtaattttaacacaaaaaataattttttttaaaaaaattttaaacataaaaatataatttcttacaaaataataataataccttatgtaagtccaaaaaaaatcaaagaattggaccccatccgcccagtccaatctcattattacaatatcatgtagaaatccaataactccacccaatttgttttttaaaaaaaaaagcaaattaaatagaaattcctctttacagttttgtgtttggtatattatatatcattaattttaatatattatttgtattaatatttatctatacattaaataaatttccatcttagtttattttgcattgccgtgtttgttattattgtaaaatttaaaagaaaaaattagtgacttttaaattatttatcgattttgtttattatgatctttataaggacctattaaaaattacaaatataaatcaggagctcaaaaaagaaaagaaaaattgaaaaaggaagccatagcaaaaaatcagattggctctcttaataagtattttaatacacttaatgtaaagaattgtgtgaatgatattgagattgagaatcaatatgatattacaagtaatgagaatgagaaaacttcaagtgatagaaataaaaatgaagaaggaaatcaaacaatgaatgagaatgaaaaaacttcaagtaatatattcaattttccttttaatattaatgatgggataggattgccatattaatatgagtgactttatagttgaaagaggttcaaaaagagtcctcaaagatgtactagggatgattttgataggaatttttctaatgtgcattatattagagaattactaaatggagagaatcaagatagaaagtggttagtatattcaaattctttaaataaagtattttatttttgttgtaaattatttgcaacaaagaatcatcttgtgaactttttagccgagggaggtttgaatgattgacataatatttttaatagacgaaaaagtcatgaacgaagtgtgacagtcagtagtcccgtgatccgtaaggggaaaacaccgagtaagctgtgcaatcccacaccgcctgg

SEQ ID NO: 231383 - DNA, 1074 bp, Cannabis indica
ggttatatttaatgaaaaatcgttctgagttgttttttatattttgtgctttttgtgctaagattcaaaatcaatttaatgtgtttgttcgtactttgcaaagtgataatgccaaagagtttacatttgctcaatttcaatcttacatgacctctaatggcatgcttcatgaaacttcttggtttgatactgcacctcaaaatagtgttgtagaacataaaaacaaacatcttgaaattgcacgtgccctcttatttcaaatgaaagttcctaattttttttgagtcgatgcagtttccacaacatactttcttcttaatcgcatgtcatcctcaatacttaatgatgagatctcatttaaattttttttcctggttagtcattgtttccaattgctcctcgggtattttgcagtgtttgttttgctcgcaatgtccgttcacatgccaccaaattagactctaaggcattaaagtgtatctttcttgattattctcatcttcagaaagggtataggtgttattctcctgatctcaaaaaatatcttctttctattaatgttatttttgtgaaaaatacaccttattttcatcttcacctactcctactcgtcagggaaaaatgataatttgatggtacattcggacacatcttcagcgctggatatatgttctaacgagtctcttgttccttcacctgcctcaatcatagtcaatgcctacaccttcaccacctccatcacttcctaggcctcctatagtgtacaccaggcatccacctcctccacctcccgtttcatgtcctgcacttgcatcctcgtcattaaatctagaactcaaagatgatcttctcattgtattacgtaaaggtaaacaccaatgtacatatcttattttttcttttgtttcttataattatttctcctcttcttcttgctcccttattgcttcccttaattctatcagtattcgtaaaactgttcgtgaagcaatgtctcatcttggttggcttgctgcaatgatagaagagatgaatgacttagtgtcaaatggtacttgagacttggcgctaatt

SEQ ID NO: 231384 - DNA, 1371 bp, Cannabis indica
ggtggtttctcaagtcaccatatttctcattgatttttttgccttagatcaactgggagatgccttcgacctttcctccctctttccccaggttcttggtgcacaaatacactctttcgggcctctcgatcctaagggccaagactctctcgagggagcttacccctttacggacctttccctttgggaaatcagagcggaccttttgcagatcctaggcctttttgtttcacccagggatcgaagtaggatttttcttagggtcttccttagaaggatatcgtatggggcttggctccctagttttgggcctttgagtgcttggtgaagactcctcttgtgtttcctctagtcccgcaggcacggctttgggatgaacgtgtattctagctgtttccatggccttttgcatggcaaccactatttcttgcatccttctattctgttctttttaggcagccagttcggcctcgtgatcaaccgctttttgccttaggaccagtgttatacccgaaattcggctaccatttcattggaagacatgtgttgaattaaagagaatatggatcaatgcgtgtaatggtaattacatttaatggaataactcattaaatgtggaggtgacagaatatattttcaacttgcaaactataaggtcttatgcgagataaagatatacaaaatgttgcctcgtgtattaacgagaacccatacggcattggatgcgcgaggcgagacctcaacctcgttatgtacgagtagacgtaagcaagatataataactgtgaaaagacttagtgtataatgtacaatatacaaactaagtataatagccaggtgaactaaagcaactaataagcaaggcacctatctcgctataggaaggtgcgctcctgttactttcaccaatcgacttcggacatcttttagtgagatttatagtcttgacgattcagaagctaacgttcaaattatgttaactactgaagtacgctttgttattaagaacttcgattgtcaaaatgaagcgttgtaccctcaagcgaagaagcgacgaggcgtacattaccaaccttagagagataggggaaaaaagctccagctcgctatcaaggtcattggtactgagttcctatcgagacatcccaaaacgttgtaatttaaaacgtatacacgattatcttgacccactaaaagcgaattaatcccagctatgtgatattcaaaaaataactgtatttatattacgtgatatgtaatcaaatcccacgattttaggggagaattgttataaagattacagtcaactgtgttattaattgcctgactatgtaattataaaaagagacaagttagactgaaaaagggacg

SEQ ID NO: 231385 - DNA, 2256 bp, Cannabis indica
ataaagagattcctaagacaaatcaacaagtctaaagaagagaaccttacaaacaaacacaattgtaaaggaatggaacctcgtttatattttagctacactactatcttcttttgaaaaaataataatacaaagcccttaattttagtaggtgaaaatgctaaattattgtacatatggggtggtttcaaagttgacaaaacaaaagcatcttgctatgtttaatgcatagtgttagaatattagttgtagaaattagggtaaattgtatttagtagtttcttatttgtatttagtagtttcttatttcgtcttctagctttgtatataaatacatactattgtatgtaatacaatatacaattcaatcatcatgttttacatggtatcagagttgattgtgagatcaggaattcaaaattccaaattagggtttatcacaaatttgggttttcaattagggttcattacaaatttgggtttttcaattagggttctttttcgaaaaccatatttagggggatcttttgttctcactacccactcagaaggattgcccagctgccgatttgccaaaccccaaagtccggtccccggattcctcgcgcgtgtggctcacgcgccgcacgtttcttctaccacctaccgttggggtgtgtaaccggttcgttttttgctccccttaagtctacttgcatctgtctcaggttgtagtttggtatttctccctacttcgtatttgggcattctttacttatttttcgttactcgattctacctcgtctctttcaatatttgtttatgagattatggcagagatataactagattcaaaaccactagttgtttccgatgtggttcccgtgatgtctaaaatcacgaaccataaattgattggttcactttttggaatggagtaagacaatttgactatatctaaggagtattgacaaagatgatcacttaactgatgatcctccaaaaaaaaaagacgatttaaagaaagtgtggctacatgaggatgctcgcttgtttcttcaaattcgaaattctattgacaatgaggtaactagtttgattaatcattgtgaattgattaaagaactaatggattacttggagtttttatattctggtaaagacaacatatcgtgcatatatgatgtttgcaaagctttttatcgcgcaaataaacaagatcagtctcttatgacttattttatggcatttaaaaaaacatatgtggagcttaatgtgttattgacatttagtctgatgtgaaggttcaacagcgccaatgaaagcaaatggttattatgagttttcttgccagattctcatctgaatttgactctgcaaagtcaaaaattctctctggttctgatgtctcctctttacaagatgtgtttacttgtgttcttcgcacaaaaactacttttttagctcttctttatagtgccttggtgagtcgtaacaattttccactaggaaaaactctactccaagtggatacaaaggaagtaattcacaaggacctgattatcgaccaacagattctggagcatcatgtgcaactattgtaagaaaccaagctacaccaagtttgagtgtagaaagttaaagttcaaaaatcgacaaaaacactctgctaatattgcaagcactagtgatgcatctcaccaatcggtcattatttctactgatgaatttgccaagttctcaaggtattaggaatcactttaagtcttcttctccttctgtcactgcgatagctgatacaggtaactctgatgtatgtcttctttccacatcttaaaaatgagttattgattttggtgctacaaatcatttaacaggtaattccagtctcttttccacatttcagtctacttctactggtactttagctaatggatcaccatctcatattcttggatctagcattgttgctcccacacctttgctcacttagtcatcaatcttatatttacctaatttgtcctttaatttgccttatgttagtcaattcactcgtaatctaaattgttcaatgtcattctttcgcggtcattatttgtttcagaatcttatgacgaagaagattattggtaaagaacatgaatctggcggtctgtatgttcttgatccatttccaccagcctctattacttatccgtgtgttgcttctgcttttaaggctcattgtcgtttaggtcatccatccactcctctacttaagaaattttgtccccaata

SEQ ID NO: 231386 - DNA, 747 bp, Cannabis indica
gaaaatgtcaagaaagacttaccctcgaaagctctttcaagactcctccagtaaccaacttcagagattggaggttgtccgccccagctagctgctcgttcacctcagggaccgaccgacacataaagtaagtgagcataactctgcctcttttagtctcctggtacaatactagaggtggggcaggggccttagcctattcagacccgcttctaatcagcttggatcaacccttcgcatgttcaggcctgtccgaactacctcctcgagaatctttggacttagtcacttttgaggcaagagggtccacgactgtttattcttctgagaggtcaatgaccacttcgactggtgccttctctctggacggcgtctcaccgcctttagacttcttggccaaagggacaagcccgaaattccccctactctcttcttcaaaacctctatcattttctgagacatttctgcacgaaacaaaaataacatagtcagaaaaaagcataagatttatgaaggaatgataatcaagaaacttaaatgcaagatggagtactctgcacgcttgcatgagcctttgtctgaacaagcacggatggggcatcgtcgttcaacgaatcttcctgctcctccaggacggctttcccctttccttctacaggggtggatggccgagcacgtagactgggctctctaatctgaattgtatgttcgatgggtctttgcacagtcgggagggttttcttcctt

SEQ ID NO: 231387 - DNA, 718 bp, Cannabis indica
tttctcttttcttttctttctctttcttcttcttctgctattcttcttcttctttctatcgacaaaacccaatcactgccgcagacgagggacaagaagacgaagaaatctccatctccgtctaagccgcggaagaaccctcccatcaacaaacaacaaccttccattcctcctccgatcatcatcatcgtcaactacaacaacaccttcaagctcaggcgtcgcaccataaaaaggtccatcaccaaatctcctttcattctccaaaaaatctcccaacgaagccgtgggtttcgcatcgttctcatctctgcaaagactccaccaccgccttcgtctctccgcaaccgatgatgatgacgtggcattggatttgttagaccttcttcgagatccactcattgttcttgctccgtttatggcggaagttgataaaggagtttcgcggtggcgttgggagggagctcagaatataatggctgggaaactgactgccattatggttccgagagttgtgcttcgatcgtggaagaacgaaactgtagactgtaaaatcacaaaattgaagagaaattagagaaaaaaaaaagaatgagaaatgtgaaaatgttgaaggacatttttacctctgtgtcgagaggatatggaggaattggttggggaagaaggtggtgggagtcaatcattaatggtagaagaagaagaaagagaaagaaaa

SEQ ID NO: 231388 - DNA, 986 bp, Cannabis indica
tgtatatccacggatgcaccaggggccgttagaaatagcccagttcctatcttctgtgttatcaaacccaaacttgaacacattggatgtcttcaaatcatcttccattactacaacactcaccggccttttccaagttttcgccacaaaatcgagcacggtggggatatccacagacatgggtgcaatcactttcccatacaacgaagaagcagctaaagccagaaccgaggagggacacggagaaagtttgatagacgtttcaaggcaagaaaaattcttacccttgagaggagaactggcgacagttaatgactccataatgatcagcaaacagaggacaaaaggtccaagaaacagagcaataaatgaactacaacagggacaaaatggacactcaccaacccaaacttacctaacacttaacagaaaataacaaactcctagaggcaactaacaagggaagactcaaaactaacactcaaaacccaacaaacacacagtaaccaaaggacaaactaacgggccaaaagaaggtcaaacccaaaaaaaaaacaaagaaactaatcacagaaagaaaagggacagggaggacacgaaggtaggcaagcaatacaggatgactcaagaagaagactcagggagaagaggagggcggttgactctagagagaaagtagaagaccttctccatttcgcttcaaacatgtactaatatttttatgctgtgtataaatacttttgactttcttcaaccaaaaatgatcctttacttaactaattttaatttattttattcaaacagtgcaacaaaaaaaatactttttttttgaacttgtgcacaaaaaaaaacttaaaagctatccggttgccagttttaatatactatttacccttagttgtgtatatatataatactaggtgatctatcacgtgcacaatgcacttgtttagctctttcattttatttatattttaatttattta

SEQ ID NO: 231389 - DNA, 1482 bp, Cannabis indica
ggcataaaacccaacacagggtttgtacgagtcctcgatctatgggtttgggaacaatgtttgtgatttctagtaagtgacctccgttctcccggttgagtccaaaatcttcctcattctaatgaggaatttctcgttcatcagttttcagggggtgtctcattgtccctgggttgttcttcccaggccttttcctgtttcctagttcgtgagccacgaggtctgcctcgtggtcttatcactccaacttaatgtagatttggatcattcttcccctctaccgccctggccgaggccgcatcgcgctctacctcaacgtttgcacgcttcgcctcttccagacggtgcctcaggtagcagttttctatttcataagttccttcgcccacagattgggcaccttcacgattgagctcttcgtctctcgtcccggggttctaaccaatcccacgttgagttctcctcgagcgtgttgtctgtgtagaaggaccaacatcaggtcgagttctccgagaacgtgtggtctgcgcagtggggccaccctcaggttgaaacctcctggaacgggtgatccttcttgattgggggttggtagatctcctggagcccatgggctctttcccagaactatgattggtttcctcatgtggggtgttaacattttctgggtttctagccatgaaggaggtggtatttcttccaaagaagggagggttttttctgagcttttttcacagaggctctcaatgaaagcaccaaactgttgacgcagattttcgttaactaaaattgagcctcacgatagtgatttcacacagaaaaataaaagctatagaaaagtaatatatgaacacagggttttttacgtggttttggagttaaaattctacatagtccacgagtcaatcttattccgatttgtgattatttttttagggcctctcctgtatgagagtttttcgtccccctttttggtcttttctgccactatttataattacatagtggtcagtaagttacaaagttggctgcaatatgtttacaacaattatccctaaaatcatgggatttgattacatatcacgtagtgtaaatgcagttttttgtttaaaaatcgtatggctgtgattttccatcttttactgggtcaagatgatcgtgtttaagatcacgtctttaattatggtttctggagatgtctcgacagaagcttggtttcagtgttctcaaatagcgagttaaagccattttttctcccacagtagacaatgcatgtctgatgtcgatcgtggtacttaaagagctcttcgaggctcatttgaatgttatattctggcgcgctaggattttaggacttgttaatgctaactgatgaagctacaggaagtcttcccaaagcgagatgagcacctcgctttcttagttttgagtcgagacgatgttgcacttagtttatactctaagggctttcgcaattgatat

SEQ ID NO: 231390 - DNA, 1913 bp, Cannabis indica
aaatgactaaaattacaacagcatattgaagatctgaatttcaaagccatatatgttattgaagggacatgattcacacatgaaaatacttttcattaccttgaaataactttgtagtagcaattccatgcggcaatactgtatggatgctgctgaacaatgtacttaacatagtcgaaaccatgctttggttctgtgatgttgtaggctagttctgttcaagattatacgtgtaatttagccatatcaaaacaataaaataagctatcttatagtgaaatttgtgcctaaaaattaaatattaaatatttcaaaaattaggataaagatccaaaagaagatgagtagaaaaataaaagccttactagctccaaggatccgaagctcctcttttttatcagcagataaactgttattagccaatctcagactaagacttataatctctaacgcatctgaaaatctttgcaaggtggctagtgtcttacatagctatgaagacatgaaagatatagaataagcagacaaataattaatgtgtttagcatgtgatattaagcaaaaagtaacttaaacaatggaattactacttacattgatgataagaagatgatgctcttcatctttaagaatattaggcagaggagcttctctatgttcttgtaactacagatatcacagataattgcaaattattcatgcacaagtttaaaaatacactgcgctcgaaacagtgacctttcaaattcacaagtagtataccagagattcatcatctgcgtcatcatcagactgccactcaactccagcagcaagtgccttggctttctcttcctctttcttctgaagcatcttttttgctctgcaagcttttaacctgattgtataattagatttaagataaataaataaacagatagaaaatgatcataaagatatatgcataaattttgatggtagagaagactgtggaaggacagcagtaatggcgatatgttgggtcatacagttaggaagaactacaagggtttattccctctatttatagagaaaaaacttgccacctccgcaactaattacaatctaatagccaatgataaaaagacaagccactctaaacaattagtcatactcaacctacatgacttttcttcctgtggtacactaacccggatggaaggtttatcaaaaaatcagatattcggtatcaatttggttataatgtaaaagagttgaaaggcatttgtaataactcacgaactgcagccattcttttttagctaggatccccgtctaactctacaatatttggggaccgaaaaaactatagcaattgctatgtagatacctaggaaagactcgaacctcagacttgtgagagcaaaccacatgcctttgtaatttgtctttaattatatgatgatggtggtggtttcactttcacccacaaaatccttaaaaggttctattatcatggttagacacctacacactacagacactgaacaaattatacgatttaattatactatcatctctcatggttaggattattatggcctatacaatgagaaccaatagcagttatcattttttatttgttttctataaaaaagtgaaggatttatgctcatatcataggtttgcattacaaaaaatgacttgaactcaagttgattgatcccaacccatgcaatacatatgccacataacctaataatttcattatgtatatccttcctacacacgaagtagaagcacatacaaggggatttcaattcaaatacacttgtagaaaatatcttacactatgtaaatagcttggtaaaaatctaagagaaaattagaagaaacaaaagactgatgtatagaactagaaagaaacagcacttttaaatgcaccacttacaaat

SEQ ID NO: 231391 - DNA, 2627 bp, Cannabis indica
tgttttagctaattaaaaaaagtatttaaagagcatacttagagatgttctaaccaaacaaactaaagtcatccagtttaaaatcatcaaaggctaaaaaatacccttaaagaacaaaaatagtgctttgctaaggaaatttcttatttttattatatagagaaattacaaaccatatttttttgttatatgatggtgtgctttatagttatactagataatctgtctaatatttttggaaaattcttattaatttatggtacccaaaataaaatttaaagatttaattgtacacatttattttattgtacaagtgttccacatactatttagaattttattttcaacaccgtaaaatattcagaatttccaatcaattataactatactataccacctcatatattattcattgtgattatataatgacgtcctcatatattattcataaaaaataggaaacaacaacccctaagataggagaaacataatgactattattgattgtgattattcatgttgttgagaatgacgtctgcatgttgctttatcacattccaagcctcaacgatatgtttatcttcagtgagactggcaccaacagcaaaacgcaacaaaaagatgcctccaacaattgaatgggtcatgtagatccgacccgaattgttaacagagtccatgagcttgctgttgagttcatttatggataccataggccttatcataccattcattctctcagtattcaatgggatatcggatttaattctgaaacacacagtggcaaagtttattggaaccactatctcaaacctttcgtcacccattacaaactcttgaaagagcttggtcatcttgacatggctacgaagaaagccacgtagtttctcgactccgtagcttcggagtacgagccatagtttgagagaacggaatcgtctgcttagagcgagttgccaatctttatagtccactacttgttttgattcagtggccttgttcttcagatactcgggatctgtagacagtgattgtgtcaatgctgcggggtctttcacccaaaggcaacaacaatctaaggttgtgaagaaccatttgtgggcatttaagctgaaggagttggctccttcgactccattgatgaagtgtcggaattctggacaaatacaaatgcttccagcataggctgcatctacgtggacccacatttcatacttctttgctaccttgcatagcggtatgagtgggtccacggcactagtggaggttgttccgatagttgctagtagaaaaatggggacgagtttggcctcaacatcatcaattatgttttttgtaaaatcttaggacacatggaaaacgaagatgacaatgttgtggggatgactcgaaattattcgggtggatcccagcaatttgggaggcttttttaaaagcgcaatgcgtttggtcagagcaataaacgaccaactttccaatattgtcgtttccaatgattctgagagcacgatcacgagcagccacgagtgtacacaagatggcctcacaggtggttccttgtagaacacctccaccgtttcccgagaacaaaaatgacttagggagttttaacatctccccaagccaatccatgacaatgctctccagctcagttgcagctggagaggacatccagttgaatccaacaacattgaacccagtggcaagcatttcgccaagaaagcctgcaatgctgccactggaaggaaagtaaccaaagtagttgggactttgccagtgagttatgcccggtacaatgtggttctcgatgtcgcttagaatggtctcaatagattctggatagaacggtgccgatgttgggagccgtgttttgagataaccgggctcgacttggctcataacggggtgtttctcgatatttttgtaataatcagcaatgaaatcgactaccatatggccttgtcgccgaaactcttcggggtccaataacgggttattggtgtccccaccagccattcgtgaaagattgtcgccaaggctgcccatttgaatatgttcttaaaagtctctcttgtgttgttttggagagttgatcagtatgaaatattgtatgtgttcccaagagatattatatgttgtgctctctctttctatgcaagacttagtagttatttatatttatattatgttttctgtatgattaggttgggtgggagttgaaaaattgtcacacgtttcaaaataatgatcagaagctattacagttacggctgcatataccactttttgcccatatttcagtttttgtctttgtatccaattgaatggcatcttccaataattattacagaataaaatcatgatacaatacaaaaagacaaaacaaaaaacaaaacataacaaattggagctgaaataatattacgtggcctaaattattagaaatttcaaaggattatttgagacatatacaagtgctcaaccatatacactttgatatggatggtaaataacctgtaattaatgatctctataaattaccaatagtgatcaaaaaagaaacctatatccattgcatacaaagatatgttgcacacacatttatatttttttttttttgctaatta

SEQ ID NO: 231392 - DNA, 1360 bp, Cannabis indica
ctggcaatcttcacaaccctcccttaagcaccaaatttcccgaactcaagctgatcttgaccggttgttaaataacaatcactcagcccacctttataaccagcagatatctcatctccaatctgaacttaatcgacttctcctaaaagatgaaatatactggaaacaaagatcaagggctgcctggcttcgggctggagacaagaatacccgttttttccaccaaaaagcctctaatcgaaaacgcaacaattacattcggtctctcactcttcctgatggttccctcattcatgactctcaaaccatttgtgcccaatttctttccttttacactgatctttttacctctcaaggaacctccccatctgccatctcttccattctccagggggtcaccaagtctctttcctctgctcaatctgcttttcttgctgaacctttcactgccgaggaggttaaaacagccatgtttagcctttctggagacaaatctccaggcccagatggcctaaactcttttttctatcagaaaaattgggacattattggtcatgatctcactcagggtcttctccacatccttaataatcatgctgatttttctcaaatcaataacactatattggtccttatccctaaaaagaaaaatcccaaaagcgtccgtgattttcgtccgatcagtctctgcaacactttgtataagtgcctctctaaggttttggctaatcgtcttaaactcgttctacactctattattagtcataaccaaagtgctttcctctctgggaggcaaatcacggataatattgtaattgccaatgagcttattcatgccattcactctaggaagcatggcaaagtgggatgggctgcgatcaaattggatatggaaaaagccttcgaccgtgttgaatggtcttttatttctcatttcctttaccatattggtgcccctcctaccttcacttccctcatccataagtgtctctccactgtcacctaccaactgtccctaaatggtcaattatccacggtattttcctcctcgcgaggcattcgtcaaggtgaccctttatcaccttatctattcttaatggtggctgaaggtttgtctgctgccattcgccttcatgaagaagccaacctcctttcaggtattaaaatttgccgcggggcccctgttttttcccaccttctctttgctgacgatagcatggtttttgcccctgtttcttctcaatcctcagaggctataaatcacattttacttctttatcatgaagcctctggccaatctgttaacaaggaaaagtcttccattctcttctcccctaacactccttctgattctcaaaca

SEQ ID NO: 231393 - DNA, 1184 bp, Cannabis indica
caagaacaaaataaagtaaaatgcaaggtgactccccgcacaagactcagaagtccatcatctcctgacatcgatcttatctcagacatgacggctttcccttttccgaacattggaggagatggccgagcaggtgaaatgggctctcttaagcgaatcgcatgttcaacaggcctgggcaaggtcgtcagtttcttcttcctcttcagtggagtcacctgctcttcctcagcctcatcttcaggattcaaaggctcctgagcatattatttggccctggcacctcctttcaacctagcttcaaacttcagttgaatcaactcattctccggatgagttcgttcaagctggccagcaccagatttcctcttcttccccgtctcgtgataaagcccgtacctcataagattatcatcggaggtcaactggataatattcggtcttcccccggcaaccgagcaagtttttgagctctatcccaaagagcaagagtgaggggaggacggtgatatgtcagaatctgctgaaaccgagtccggataatgctcggatccttcaccatgaagtattcatcagcaaaacgccctattttgctaatggccttgtcatacgtgtcgctcaaccactttaagcctggctgagagaaatagaagtaccccgacctgccttgtttagtgtggacttcaaatcgaagaacaaggcaacctcatgaggagaaggagtaccccatccttgggaagcgtagagaatgaagagggcagaaaaatatttaatgccctttggagtaaactgggccggccaaagaccgaagatgtcagccacatccttgaagtaattatgcaagggtatcaacgctccttgctgaccatgcgcccccaacaaggcgcacatccccttgttagggtttgtgacacgattattatgggccggaatgtagcagtccagctagcccacatatctgtcatggtcaagagttcgaaggcgcgcctctgtaatcttggacggaggacttatccatctggtgcccaaggcaccctgccttttatgaggaactttcgcggaaagcttctcactgacgtagtccacaacctcaaccaggaagtccccgtcagcatcaactggcttccctgcctcattgtaccccctgtaatttgggggttcaacctcttcctctccctctgcct

SEQ ID NO: 231394 - DNA, 934 bp, Cannabis indica
ttcaatactagaatcaaacaatgtaaaaaagccattatataaagctgtcaaaggaagacaagatgctgctgctatggcgacatattcagcggagaaaaagaagctttttgaagtcttgacacaaaaggagatattttggaagcaacgagcaaagcaaatgtggttaaaagatggtgatcaaaataccaaatactttcattcagctattaaaaccagacatcgcaacaaccaaatctacaatcttcaaaagtcaaacgggcaaacaatcggctgggataatgggctacaagatttgatggtcaacatttcaatgagttatttcaagcttctgatactaatttggatcaagtggtgcagtgtattcaggtgcagtgtattcagccttccattacgttggaacagaatgataaccttttgcagcccattacggaagaagaagtgaagacaccggtatttcaaatgcatccggataagtctctggggcctaacggaatgaggcctggattttatcaaaagttttggagtatagtggggaaagatgtgattaatctggccaagaatttcttcacaacagcggctttcgaagaacatcttactgaagccaatatcgtgcttattccaaaaaagaagagcccggtaactatggcagacctcagaccaatatcgttgtgcaatgtggcttacaaagtggtttctaaagtgctggccaatagattgaaaagagtcttgaatcatgtcatatctgaaacacaaagtgctttcattccaggaaggctaatcacaaataatatgatttcttatgaggtgatgcactatttgaagaggaagagaagtggcaagaaaggatctatggcagtcaaactggacatgagtaaagcatacgatagagtcgagtggggatatcttgaagctatgcttcggcacatgggttttg

SEQ ID NO: 231395 - DNA, 1318 bp, Cannabis indica
tttaatggtgtttttaatttttgggtgtattgcttgattatgcttgttgtggcctaattaggtggtctggaggtgctggttcttttggggattgatttgagttgattagaagggtttttgtggtctttgcactgaactggtcaaccggttcaatttggacctgtaggaactagtctaccggttcctcctttgacaatccccatagaacttgttttctgtatgggaaccggtctaccggttagggcattttagggtaccctagattttcttgtttttatgatatttagggtatttccatgtaatccatcgatcgagaagcttttagtttgatttcaagtccccaaaaagtgatttagcatgtcactcatcagttttgcaaatattgtgacctatatgggcttgtaaactatcgagcagttgttcctctcaggttgaccggcacacctgaattcggaaataaggtaagattagtataatgatatgcatatgtgattacatgtttaacgtacatgtttatgattacctgttagattacattagaatagcggtattagtatatttagaatattattggataccgataaatgtatgtttagcataagtatttattgacactatcacatcagtacgactagagtaccgagtataggttgatattatggtcgataataccgccgtatgaacgttcttgactcattaccgtgtaggacgcagggaaggattatggttgggtgtatgggtgcctaattgtaatcaggtttatatttatgttatgattatgcttttcttactgagtctatcaactcacagttattatatgtatgtgtaggtaagggcaaagctaggttgaacaacaatgagtgcgagcagatgaagatcgtacatgtcgggtcggttaggcctggagcgtacgatctttgtgacggcaggctatattttgaatggtcactaggcgacgacttttgtatcgaatgttttgtattacgatagtaaatatcttaaatacaaaagatatttattttcatttaaagagtaattaaataaaagttttaataaatcacgattttcaacaaacccgttgattaacaacggattgcacaattaatataaaataacgacaacacgcctaaactagtagtgtgttacaattcggtatcagagccaccaggttgtcttccgaagattgtcgcgacatgtacaatcatcatcaaagataagctcgactcacggttcagtaagcctttattgtttagtagtttgctttattagtatgttataagaaaaggctgataggaagcatgttagtagcctgatagct

SEQ ID NO: 231396 - DNA, 2889 bp, Cannabis indica
gattactaatcagattgtaaagagttttatttagggcataaaacctaacacatgtatcaaactttcctaaaggagaaggaaagtgtgtgacaaggcaagttctaactcgggacttacaagatctcgagatcacagtcgatctacgtgagggggtaataggactcaccacagtaatgatcaagagagtatgagaacaactaggagccttcaatttgagagttactcagatacaaggtcaacgagcaactatgatcgaagatgaccagatcttcgtgaacaattgaatcgaaggaagcctgatttacgcaaacaactcaattccaatcaaaagcaagtggatccgatccaattgcgaatcagtgagttagaaaacaaaatcaagaaatagcaagatgggaaactgcctgattacgactcagatgaggagctcgaacctttccatccaatcattatgagcactaaatttccctaaggatttaaaaccctcacgactcctcatacgatgagactatggattcggtcgctcacctcaacaatttcaatactatttttctctagaactgtcaaagaatgctaagattgaggaacctccaattgtgttttcgatggaagacacaaagcacgtgaggtaccctacacgtcgacccactcgtgattacaatccagctcgccaataagagaaaaaaagggtgttggtggataatggaagttcagtaaatatcctttacaaggatacactgaagaaaatgggattgcaaaatgggaagttaaaaccttgcatggtggatttgtgaggattcactgaggctagtgtcgccagtcaaggaatcattgaactcacgttaactctgggcgagccacctatatccacaacattgatggaagattctctagttgttgacttgccctcggcctacagcattttgttgggtcatcctgcactaattgggctagggtagttagctcaattaaacactagcaggagtaggtgtagtgcgaggtgaccaactactggctcgggaatgctatcgcatagagctacaaaataaaaaaaaatgaccatcagttaatggcagttataactaaggaaggcgagaaacatgacgagggtctagatcctcgagttcaagatgaaaagaacctgttgaaacctatcaaggaattggaagaagttattttagatccagaaaatcccacaaagtgtgtattcattgggaaaaatttggatgaaaaactaaaatagcaactaataagttttttgaaggcaaatcaggatcaattggcctagagccattcagatatgatagggattgaacctaaagttatttgtcaccacctgaatatcgacccaaattacccagctaagagacagaaaagacggcccttggattctgaaagacaaggggcagtcaaggaggaagtggataagttgttgactaacaactttatacgcgaggcattctatccctcgtggatatctaatcgtgtccttgtccgaaaaccaaatggaacttggagaacttgtatcaacttttcagttctaaacaaagcatgtccaaaggattgctttccactactaaggatcgaccagttagtggatgcaactgctggacatgagttactgacgttcatagacgcatattcgggatatagctagattaaaatgcatgtccttgatcaagagcatacaagtttcataaccaacatgggacattattgttataaagtcatgccttttggtttgaagaatgttggggcaacgtatcagcgactagtgactgaaatgtttgaaaagcaaataggaaggaacatggaggtctacgtcgatgatatgttggtgaagtcagtaaaaagtgaagatcacacaaaaaacctcgcggactgctttgagatatacaatatgaaactcaacccaaagaagtgttcctttggagtttcctcaaagaagtttatgggattcatagtcaacgcaaggggaattaaagcaaatccagagaaaattaaggcttttatagaaataccgtcatcaacaaaactgaaggaagtttaggctttaacaagaagaatggtagctcttaatagattcatttcaaaatcaactgacaagtgtctaccattcttcaatttgttgcgagggaacaaaaagttttaatggacagacgagtgcgaggaagccttcacaaacataatgaaacatctataaacacctccagtattggccaaaccaataacttgagagactttactcctctacttggctatcttggagaatgcgattagtgcagcattagtgcgagaagagggaaagcacgagcaaccagttcactatgttagtaaatggttattgggggtagaatcgagatatccccctcttgaaaaatttgccctatgcctaatttatgtatctcaaaaattaaggccttacttccaggcacatccgataaaggtgttaactgatcaacccctgagagaagtcttgacaaaaccagacacttctggaagattgataaaatggtctattgaactggggcagttcgacataacatatcacccataaacatccatcaatggccaagctttggcagatttcttgatagaagggataattccagatgaaaataaacttattcagtgagacacaaacacttggaagttgtacatggatggagcatctaatgaacatggctcgggtgcaagggagatactaatctcactagaaagcttaaagtttcactatgccttaagattccaatttgacacttcaaacaacgagcctgaatattaatccttgatagctggtttgaagatagctgaagtgttaaaaatcaagaatctagtgtgttacagtgattcacagttaattataaatcaagttttaggcgaatacca

SEQ ID NO: 231397 - DNA, 751 bp, Cannabis indica
gttgtttctcactgaatgtgagttgtccttctttaccgtctttataaaaaaaatgctaattatggataggctgctccccgtagtgttcttcatatcataaagatatttgcgaggtgactattctatcgcgtaaagggcgagatggatgaacgtagttatttcctccatgcacaaatacatgggtcaatggattgcaagcttttatttcaaagtatgtgggtcaatgagctgcaagctccttgatgtctcatcgtgtacactcttattatatactctgtttatcccaagatggacgtgttatctcgccaactacatctgttaatagttattaatcttatctcgcacatgcttatgtgttaacgagtttgaatattttttattaattttaattaattgaaacgagttatttgaattgcatttaataatactatttaattattgtaatctttgaattatttgtacacatgtcaacttttggtgaatagcagtataataattatttgatattgattgcacaatattaggttaggaaataaatttaggcttaatatatgcatgaaaagtcaaattttcccattattataccatataatagttttggatatatatatactctttttaatgattaattaattacatctttttttttaacgtatttctagaatttgtgtccattaccatttctacattaatcataataaaaattaatagttataataagagtattgctattagacaccagtggtgccta

SEQ ID NO: 231398 - DNA, 869 bp, Cannabis indica
aagccaagtttcccatttaaacctccttgaaacatcccttgtttgtcaagttcagtgagccccctctcactgacatgaccaagtctcaaatgccacaactcaatgttgtttttgacattatttatggctggtgaagctgtccctgttactgcagtaccattcaagtagtataatccattcttgagtctacctctagctattacaagagagcctttagagatgtttagtgtgccattgtctattttgacagcatagccattattatcaaacattcctatagacaataagtttctcttaagatcaggaacatacctcacctcttgaattgatcgaatgatgccatcatgcattttcatgttgattgagccaataccttgaattttacatgctttgttgttccctaagagtactgtaccagcagcattatcttcaaaatcagagagcaaattcttgtttggggtcatatggaaggaacagcccgagtctagtatccattctccaccagaatcctcactagatgcaacaagaacatctgcagaatcatatccacttgatgcaacatcagcttcacctctgtccctacttttgtctctcttaagcttgttctttagcaagtaacaatcatctctgaaatggccttcctttttgcaatagtagcatttctttccagcagtatttctgttcttgaaattggacttgtgtccattctttgatttcttgaaatccctcttatctgatctcccacgggcaaataagccttctccaccaatctcagttttgtcatcgaccttcttctgtatctcctttgaattgagagctgccttaacttcagacatggtaagtgtgtctttaccatacagtatagtgtc

SEQ ID NO: 231399 - DNA, 1352 bp, Cannabis indica
ggcacctagggtttcactcggcgcccaggttgacatatccaactagggtttcaatttctaggagtatcttagtgcaaaagggttaaagcctgcactgggactagcatactactgacgtatttgaggcatcagaattagaattggagaaggctcattttttagcacccaggaccccgagcacccaacacctaagttgtcaatttgggcaccttccaaatatcatatcaaagatttgacttgcatcttctttgtcttcataaaaaacggggtaatatgtcctttcaaagaagaaacaacacttcttaggtgcaaaaaacaagttccattggttagggtaacacttgaggttggcctaattacacctaggttgacattttgttaacctgggccattttcgatggtgtgttctaagattttttttgagcatactctccaaaaataaaaaataatgagattaaactattttcgaggaccaaatggaattttcgaatggacaaaactaggacctaacgcctaggttgacgtattgccaacctgggttgttttgattaagttcatcaaaaagtgttttaggaatttttttcatcataaaaaataatgaagattcaaacaaactcggggagaaaattacaactcgagcccttggaaataggcctagcgcccaggtgtacaatcaacctaggatgctgccttcaattgttcaaatgcccaaatttgatgcagccattgaatttggaatggtaaaataggttaactcattctcaagttcaaaagccttgaaagtatcaaaaatgagatctcaagagctcgggagtaagtactcagcgtctaggttgataaatggcctggtgcgctgggttctgcttatacaattttgatctcgtttcgaccgtccgtctagtgtttcacaataacaaagatctatcaagtgagagaagtcaaattcgagactttgcatttctcattttcgactcactcggaaatgaagagtttcaagtctctcatttccgtaaaacaacaacgacatctccgagaattgttgaccagctttgccaaaacataaaactgattaagtgatatcaaaatatcacttaggcatcttaaagtacatccctttgacatttttacacttacccatcgtctgaggtgatgtcacgtgtcaacctgggcgttgggtcatgaactgccttcagtttaacacacagctcacttaattttatctgcttgacgtgattcaacttgcgtttcgaagctaatcagtgctctatcaagtcatgtctcaaattcaatcgtaattctgaagctatcgtcgtcaaaattcactcccatggaagttacaaaaataagctccg

SEQ ID NO: 231400 - DNA, 662 bp, Cannabis indica
ctcaacaacaaaatcccaaagtatgaacatcttagaaactttggctgtctatcatatgcatccaacatcactcatgatcataaattctctcctagatccaaagcatgtaccttcataggatatcctgaaaatatgaaagcctatactctacttgacatacaaacaaatcgcatttttcactgtagagatgttatattctatgaaaacatttatccatatcacagcaatagtcccaacagagacattgctcgattttttcctcaccaatacagcagcacagcagatcaaacatctccacttccttctcccattgcagtacctgactcttctactgcagcaatacctgatgcacaaaactctgctgcaacaaatattgcagcacctaatactgctcctcctcacaccatcgatacatctgctactactgctcctacaaccccacatcctgatgcccataaaaatacaaaatccctttcatctgctccatctaacatagcacattccagcaacaattatacaactaaatatggccggcaaaccagcaagccaaatcacctacacgattacatatgtgatcctccaagacacacatcaacagctcatcctcttacaaatcatttgtcttacaaaagattttccaaaaattttatagctgcaattct

SEQ ID NO: 231401 - DNA, 1046 bp, Cannabis indica
tgctcggctttcataacatcgggatctcccagaaagactggaggtaactgcttagaaacctttcagacaggggttccatttagttcactacatcgactgaacctgcctgcacagtaggggcaggtgctacctgcatttctggagcagggattgtaggagcaccttgctgtctcaggcgttggatctcttcatcttgttcattaattctagcttacatttctacagacctattttcccaattttgggcagcctaggcagcttgtggcatgttaacatcaccctgactgcgtgccttgcctctaggacctctacctcggccacgaatatctaggggaatctaaactccctaaccaccattggatccgaccgagttaccctgactcctggtgtttcacctggcgtccattctagtagaatagcctgcgtaaccaagagctagcctggtcagattgtgatcaagtatacttactaattgtcgcttattttagaaatttaaaacatgcacctatttagctgtcaggctactaacatgcttcctagcaggcttttcttaaatcctactattaaaataaactactaaattaataaaatcttactgaaccatgaaaaaagctaatcgctgacgatgattatacatgtcgtgatgatcttcagaagacaacctggcggctctgataccaaattgtaacactctaactatcttaggcatgttagcgtgattttaaacttactgtgcatgtaaagaccgcttagtttaatttggaaattagcagttaattatgtttaattatggaaaattatttatagctatttaaataattaattatactgttatggttgaattctgaaatgcattttatgtcatttagtgatttttataattctacatttttggtgcccggcaacatggaactcggtgtttggctcagtaaaatcacaacttagtatgttagtattttgggatggttatttagacattgggaatgtcgggattggctgggaatttagaatttcccaaaatacccctttagtgttctttatgttat

SEQ ID NO: 231402 - DNA, 2783 bp, Cannabis indica
aatctccatctgctcgctcttacagctcctcaaccttagacttgtccttacctacacatgcagacaataactgtgagtcgacagactcagtaagaaaagcataaataataacatagtaataatactagttataatcaggcgcccatacccacaatcttaaccctgtccccgtgtccaatatggtgctgagtctagaacgttcatacaattgtactattgaccataatatcagcctatactcgatacgctagtcgtactataggcgtactgatgtgatactgtcaactagtacagtactatcgaccataatatcaggctatactcggtacgatagtcatactctaggcgtactgatgtgatattgtcaaacattaattaagacaacatatatttctaatgtaatctaacatgcacaactaacatgcacgctaaacatataaatacatatgcatatcattataataatcttaccttatttccaaattcaggtgtgccggccaatctgagtggaacaactactcgacaaattacaggcacctaaaccacattatttgtaaaactggtgagtgacacgctaaatcactttttggggacttaaagttgaaacaaaaagtttccctatcgataaataacatggcaatactctaaatatcgcaaaacgggaaatactagggttcccaaaactaccctaaccggtagactgggtctccaactggaattccagttctgtggggtttccaagggaccaaccagtcaaccggtttctacaggtccccctaaaccggtcgaccggttcaatgtaggaagttaaaaaattcaactccaaatctaaccaaaccttccagacctaattaatatatcgcaaagaacataaacaaggcaataaaacaacctaacatgctattaaaacaagaattgccattaaagagcaaagcttgagttcttaaactcaaagcttgctcaaaccttacaacggccttcaaaaccactgcaattcaacataaataacctcaaattaacttcagaatacatcaacaaacaacaacagcaactacaacacctaaactcacaattcatgcataaaaccataactttaaacttaagaaatcatagtaacaaggtgctagagtggttaccttgggttagaacatttagaaattgctgagatttcttgaattatgtagcaaaaactcacaccctagctgggttctatggggttcaagagagaaagagagaattggagagagagtaatctttgtattttcttcaaattttaataaaatgaaaaatagaaataagttttatctattaattaaggaataatatcagcataaaatttccaactaaaggacaagaaatcaattaggcaaaatgaccattttgccctccacttaaccaaaatgtcacaaaaccacctagtggtaatttggtcaactctaaaatctcaactaatcttgatattcccaatgtctagctatattgtcccgctacactaaaaatactaaaatatgattataatggtcatacatcacgttctaatgttgtggggcacaaaacaggcaaaaatataaaatttcatatatagaatataaaatgcattctgtattcaaataaatctccgtaaaataataattcataactaatatgcaagtttcataattaaaccctatttatctgctaattttcaaataaagttaagtggtcttgacaattatccccctgtataaaggatttcgtcccctaaatctaacctgaataaatctagatagtgagccctgatgtcagactttaactcccaggtggcttcctccaccatgctatttctcagatgtaccttgaccaaagctatggtcttgttccaaaggaatttatcttttctatttaagatcttaactggttgctcttcgtataataagtcttgttgcagctcaagattttcataactcaatacatgattagggtcccattgaaacatgaaacacattgtgaactatagatagagcttgaggcaaagccaaacgatatgcaactagtccaaccttctcgagaatctcgaaaggccccataaacctagggcataacttgcctcttttcccgaaatgcttgactcccttcatcgaagacacccgtaggaacacatgttcccttacctgaaactccacatttctgcgcttcggatctacataactcttttgcgtactctgagaggcaagtattctggccttaaccttttctatagcgtcattagtctgttcaattgattttagacctaagtatttcttttcacccatttcatcccgtgaatgggagatctgcatttccggccatataacaactcatagggagccatccctattgtactctaataactgttattgtatgagaactgtatcagtggcaggtacttgctccaggagctcttgaaatccataacacaggctcacaattgtccttttagactatccatcagtctgaggatggaaagttgtactgaacttcagtttggtacccatagcccactgtagactccgccaaaacttagaagtaaacttcagatctctatacgatataatggactttagaacaccatgcaatctcactatctcttttacatacaaatcggcatattgatccactataaaggttgttttaatcggtagaaagtgtgccgatttcatgaatcgatctaccacaacccaaatcaaattgtgcaatctgatggttctaggtaatccaaccacaaagaccatggtgatatcctccaacttccactcaggaagtgt

SEQ ID NO: 231403 - DNA, 1092 bp, Cannabis indica
aaaaaacagtttttaagtatgatgccaagcatacactcataatttcagaaataatttataataataaaaaacaatgttcaaacaatttatttatttcacacgcgtataaaacaaaagaataacgtgttaaaccctatttttagaatattaaatttatctaaaagtctcaaaattttacaagatatcttaaataattacaatatacatgactataaaaaaaaattaaagtttatggcacgtttactaaccgtaatcagaataaattaataggagaaataaaagggaataaaaggttatagaatcaaaatcaatattttattatattgtttattaaacgggctggaaacataatcagaatcattttattttgtttacatcaataagaaaaggttatcattggtggggttcatcggaaaaggatgcgaaaattcattggtgcaaatggtccgttctgtgtaaaaataaggagcaaggtggcttaggattcagagatttgggtttatttaatcaagctctccttgctaagaaaatttggagatgtataaggtttccaaattctttgtgtagcaaggttttgaaagctagttactatcctcatagtggtgtattggaggcgaaatgtgggaatcatgcttcctttgtatggcgaagtttggtttgggggaaaaagattattcagaaaggctatcggtggcgaattggtaatggtgactcagttcgggttatagaagacccttggctacctcggcctctcacttttaaaatatatgacaaaccgcctttgccagagcaactctatgtcattgatttgaagaaaccaaatggtgcttgggatgcggagtttattagagatgtcttcaatccaacagatgcggatctcattcttcaaatgcctacatcggagtgggatattgaggataaaatcttatggcactatagtaacaatggagagtactcggtccatagtggttatcgaatggcggctgccttgcaggtaagagatgtatagtcagatactgaatcagctgagaaatggtggaagtttctttggaagctcaaaattcctccaaaggtaaagcattttgtttggaa

SEQ ID NO: 231404 - DNA, 1729 bp, Cannabis indica
gatgggtccgatatgaggtccgattgtgtccgatgtagggtccgattgtgtaaaggggggtgatgtaaatagggagttttttagggatatcataaaagctgtcatatcctacaaatattagttattatttgtttaggaaattttttttaaccaaatgtaagcataaaaaatcaaattttcctctgacaataatttttaataaaaaaataaacaatatgaacaaatttattattaattgcaacactttaggtggattaattatatttaggtttaactaactacatggatgttgatttatttttttattttttttaaaacattacccaataatttttcataaaccaagaattctgttatgtagccacattttatatagaatagatatatgatacatcttatgatatggagctagtgaactaaatctatagaagaaaggcccatttagcttggttactcatgagtttgggccccattaactaagcaactggtggctttatggatgtgagtaggggtggtcataaaatattcgatctaattcaattcgtacgatctaatccaattcaattcacaaagtgtggatatatgtacttgtgcggattgaattggattgaaaattcaaaatctacacttttgcgaattgagtgttgagtgacatgtaaaagtaaccgatccaataatgtaaaagaatagtaatttaaaaatctaatacatataatacatatttattttaaaactaggtcaaatatatattctattattatatataattttttttctacatacaattgaaataaaattaaacatttttttatatatacaactttttttttcttttaaatttgttatttattattttatttagtttaatttattgttggagatataaaataataataatttgttttattttgttgctacttatgttaaaaaaaatattttttcatatagtaaatagtttaatattggaaaataaccaatctaaaataatctatctaatccgtatttttgcaaattgatttggatttaaaatataaaatatgcacttaggtaatgtttggttgggaggaatgaaaatatagaaatagaatgaaaattatttcatttccattccatttcattacctccacccaaacctcaccttagccgtggattagatacacaaattgatttggataaatacccataaatatgagcaaaggtcctaaagggcatagaagtgtttctccaatatagaaaataggtaagcacgttttagggattccttcatatttccaggttgttgttgttgttgttgttgatgaatgatgatcaaacttaatcaaggtgatcacgtccaatatttgtcacactcacagacacacagtctactcactcactgatgtgaccgttgaccaactacgacccttggctccgctaaattatgtgggcttcatctattaattaaacccatgcatgcgagccgttatgggggcccacatctattaattaacttggtattttttttaataaataaataataataatctttatctcgtacgagcaagagcaactctttgaccctttgcacgcctagggccttattggatcaacatcatttattattgggccttttagagaaagacacagaaaaccttgggatccaggtcggctaccactccagatttggattatcagtattattattatgggctattttcaaaaatatgggaaaaattattaaggttatgat

SEQ ID NO: 231405 - DNA, 1226 bp, Cannabis indica
gaagcgcctaatacccttcattggtgaaacccgtaggaaaacatgttcccctgcctaaaatatgacatctctgcacttccgattagcataacttttctgcctgctttgggaagcaagcatccgaggcttgatcttatcaatagcttcattggtcctttggactaactccggacctaagtacttcctttctccagtttcgtcctaatgaataggggagcgacatttcctaccatatagcatctcatagggagtcatccctattgtactctggtagctactgttgtaggagaattcaattaaaggcaagtacttactctatgaaccctcaaagtccatgacccaggctcgcaacaaatcctctagtatctaaattattctttctgcctgaccatcagtctgagggtgaaggctgtgctaaacttcagtttggtacccatagccctctgaagactcacccaaaacttcgatgtaaactttgaatctctgtctgaaacaatggatttaggagctccatggagacgaactacctcctttacatatagttcagcgtactgatccactgaatatgtaactttcactgatagaaagtgagctgattttgtaaatctgtccactatgacccataccgaatcatacattcccgtggttctaggtaacccagttacaaaatccattgcaatgtcctcccacttccactcaagaagggctaaaggttgcagtaaccctgtcggcctttgatgttcagccttgatttgctggcaggttaagcatttggacacgcagtctaccacatttcatttcatcccataccaccagaagtagggttttaaatcctaatacattttggttgttcccagatgcagttaataaggtgtggtgtgagcttcatcaagtatctctttcttaagctcatcaacactaggaacacaaactcgagcttcatacaataacattccattattcgagattgaaaagtatttaggtcgaccagccatacctcatctcgaatcttgactagctcaggatcttctaattgtgcctttctgattctttctaacagatcagattaaagtgtcaagtgttgcaactttccaaccacaaactcaatccttgcactaaccatcttagaagctagttgaggggctatcagaaccgtgatgcaaatctgccgggggcctcttctacttagtgcattagccacaacattggctttcttggggtgatac

SEQ ID NO: 231406 - DNA, 875 bp, Cannabis indica
tctcttgtaatgagtaattttttccaacattgtttattctaatattgattcacatatatattctaatttaaattagaataggttgaatcgtttatcaattaattgtacacacaaaattggcatttttggagttgttggtaagactatttttttcactaattttagtgtagtatctatattaatttagtgtaaattttttattttagtgtcacaactttaataatttacactaaaatactatacgaaaaatattttacttaaaaaatttggtattttatattatttacattaataactaaaaataattatttataatataataatattataactactagtaataatttaaaatctaaaaataatttagtaaaataaaatatttttaaaatcaattaaacacatacatttttttaaaaaaatatattaaaattttatagttaattttaatatatgcaactatttttaaaatgagcaaacaagaattaacaaaataaaaaaaaaaaaaaaaccccgctaacaatatcaagtatttcaaaaatatcaagattctcaaaatactttaagtttatataaccaaagtgtatttttaaatatattagtgttttaaatttattatttttataataaattttaatttgaaaactaaaatgtaaaattatttttaaattaaaataaaaaaagatttagaatgtaaagaattttttttacatcaaattagtgtaaattcaaaatctaacactattagtggtgtagaatttggtgccaataaatgggaaaatttgattttctatacttaaaaaactttaaatttttttttcttaaaccaatacttaataatgttggtcatatatgaccacattcctaatatcccacaa

SEQ ID NO: 231407 - DNA, 1707 bp, Cannabis indica
aaaccaaaacttgaacttgaactggaatgagatcattgaaagggatcgagacctggacccgaacccaaactcagaatcagacccaaccacgaaccctacccgagaccgaaacccaaacttaaacatcgccctggacccaaatcaggacccgaacccagactcagacccaaactcgacccgaaaatcgtaccttgtgacatgaaactagaactgaaactagaagcagatcgggacccaggaacaggaccaggactaagacagggacccagacacaaaactgtaaccggaccaggacctggactctgacacaaacccaccttgggattgggtccaaaacctgaatccaaacccgaaccggtactcgggacccgaacattaaacatgactcgggacccagaactcggatcgagacgtagaactggaccccggtctcggtcctatacctagacccaaacccagtccgggacctgagacatgaactgaaacaagactgggacctgtgattgggatccagatgttgtcccagggtttagacaaccggggcttggacaagacccatagtcgatgtcttgatctgagactcggacaaggactcaaaagctagaccaggacctgcacccagacccaaacctaatacccaaaaccaaaacttgaacaagaacatgaccaagaccctgaaacaggaccagtcaccaggacctggaccgggactcggaactagaccgaacacagccccaaaactcgagctcggacctagtcctggacccggtctcggacatagacaaggactgagactcgaccccgaactcgagactcgatcccagattgagcccttaaccgaaattggaattccgacctcgacatggacactaacccaaactcggacccgaataccgaccaagacccagaccgggatcaaaacacgggacctagaccgaaacccaaatgcaaacccacacctgaacctgggacccagacccaggacccaaacatggaccttgactaagacgtggacccaaatcgagatctgaaaaacccgcacctagacttggaataagactcggaccccgaccccaacctggaccaaaacccagacccagaaccaaacccgaacccggaattagaactggaattgtgactaggacccgcacctgagactagaaccaaacccaaaccataacccaaactcagactagaacctagaccgagaccttcactaagactgagaccagagacctgggacgtgaacctggaccgggacctgtacctgacctgtacctgacccggtcttaatccctcaccgagtcctgagacccgcaacccagattaggatcgaaaccctgacaaggacgggaacctcaacccggacgaagactaggatcgagacctagacttgaacacggaccgggacctggactaaaaccaagactcaggactcgaacccgaacccgaacctggacccagaccaggacctaggaaccgaacttggactggggacctagaccaaagacctaggcgttgaaacccacacccagatctaaatccaagactcaaaactaaaccaggaccagaccttgacctgggaatctaaagtcggacccaaacccggacccgaaacctgccccggacccaaaccacgacaggaacctggactcgaacccatgtcaggagcaaacccgaacccgggacccaaaatcagacccagac

SEQ ID NO: 231408 - DNA, 2691 bp, Cannabis indica
aattcgcactctccttcagcaatcaaaacacccgcactatccacacagattttcctagcttgaagcaaacttttccacactcttgagtcagtatcttgtttatccacttgccaagcgttaaccttgtgacagtattgatccaaaaataatctcacccacactttgtcatttccctgtaagatcatccaaaaaagttttgcgagtagagccatattcatgtctttaaaatgacggagaccaagaccaccacacttctttggctgacagatttcatcctaacacttcagagcacaataattccttttgtcagaattgccaatccaccaaaacttagccagaatccgatccaattcttcacaaagtgtgctagggacttggacagtagacataaagtaagtagggatactttgtaaaacagagccgattagaataattctacctcttgtgaaaggtgcttagccttccacccctcaagcttcgacaaaattctttccttcaagaagaggtagtcatatcttcttttagctgtgaaaaagaaagggttacctaaatacttctctgatgccttaatttggttcattccaatgattctcttaatgtcctcgcacatccgagaggttgtgtttggagaaaacacaactccacttttctgcttgctcacacgttgaccagaccttctctcgtatttttggatacattgcataagattactagcattcccgactttagcctagcaaaagaagatagaatcatctgcataaaaaaaggtgagctataggacaagcatttcgggcaatccggatcccagagatagccttatctttttctgctttaagaattagctttgacaacacttcactacagaggatgaataagaacggggacagcgggtctccttgccttagacctcgtttaggattgaagggagccaaaagtgctccgttgaggagaattgaatagctgaccgtggtaacacattgcattatcaggttacagaccttgtcattgaaaccgtttgcttttaaaacccgaaggaggaagtcccattcaagtcgatcatacgctttgttcatgtccttcttaatcgccataaccccattttttcctttcttctttttcatagcatggagagtttcttgagcaattaaagagctttcagcaatccatcttcctgggataatggcagattgggaaggagaaacaagtctatccaaaattatctttatacggtcagtcaagaggcgagagataattttataagtaaaattgcacagaattataggtctaaaaagatcaacacgatcagcattcaggattttaggaattaggcatatgaaagtctggttaagttgcttgtttatcaccccattcaagaaaaaatctttaactagataacaaacttcccttcccataatatgccagtattttcggtagaagatacctgagaaaccgtcaggacccggagatttcagaggatgaactttaaacaccacatttttgatttcgttgtcatccgggacacggctgataagatcattctccacagtcgtcaccttatcatgatacagagtctccaattccacgtcgatagacaccccagtctgagtaaatatgtctctgaatttttcctgaaaatggtctccaatggcatctctctgtctcaaccaagctccctccggggtcattacacttccaatgaagttaagccttctttgaatgatggtagaaacatggaaaaacttagagttggaatccccaaaccgaatccaattttcacgagacttctgcctccaaattctgtccatccttccttcaagggtcataatttcaagctggatacgagcttcttgctcaacagagtaatcagtgattggttcttgttgtatacgcccagttgtcttcgcaaagccccgagttgcctatcacagaaatcgaacttttcttggttccacttcttgagatcacatttcgccactcttaacttcttctgcaaacagggttcatttgtactgggattggatttcctccacgctccatcaacaaatttcccacattcatttaggtttctacttgttaaagtagttttgtattttgtttttagaagttgatgtgtaaaagatataaattttattaataattaatttgtatatgtggaatattatttaaaatttgaataagttatgttaactacctaatgggagaaaatttcaacttttttaaactatatataattatgctttaaaaaaaactatatataattatggatatttatatttatgatatattaaataatgtgactatataacataaatttttgtttttttataaaaaatattacaatttaaatttaaacttactacacatatttctcttattacttatcttatattaaatgcggttatgtaacataaaatatttttttaatattacaatttaaatttaaacttattgcacatattaaaaaaatatttttctattattttttttacccaatttcacatatttttaaataaatatctttctattattattttttcctttaaacgataatgttgaccgaggttttcggcaaccaataaaatatgagtataataatgagctgtcgaaaagcgagatgaagactttttacgtggttggggcgttaatgagccttagtccacgagccactgatatttatggatgtctttaatc

SEQ ID NO: 231409 - DNA, 617 bp, Cannabis indica
cataaaaatcacacaatattggattgtataataaaattattatatgtgaaaaaaaattaaatttgtgacaattaaaaataaaaattaatagacttatttatactatataggacaacataaaaaatagttcttaaataatgtgggattgtttctaaaacatttatatccaaatttttttcctaaaatgataaagtctaacaaattagtaaatatagaaaaaaaatcatataaaatgtcacctgatatatttttttgctttcctttatataaacatatagatatagatatgtatttttttatatttttttttgaataatttataaataaatataaaatacatcaatttatctctcttgatatataaatggtagaaaaagcacacataatactgattaaatttgaaagtgtattatttacttctattaaattatatatatttataatgttccagaaaaaaatatatatacatatgaagcactacataaaaaaggtcttttagcgtcgattagtgacgttgactaacattattgactagaattaaatcaacaacgtcagttcatatcactaatgctaagaccatctcaaatttaatgtacaaggaactctagtagcctaag

SEQ ID NO: 231410 - DNA, 4012 bp, Cannabis indica
tcaaaggcggctcacacacacctaacaacttaattagctctaaattaatcctaacaaccttgatactaactcattaatacttttaaattattcaaatagatttcattattagttaaaaaagaaaaaaaattgagatttaataaaagtgcttatgataatcctatctaacatttgctctaattcttaaagaatttttcaaatgaaacttcagaccatagggatgaatctaaaaagaaaattgtaaatataaaattcatataacaatattttatttcatatttacatgtacttcttctaggggtgttcatcaaattgttcaaaccattcaaaccacccgtactacaccgcaccgcaaaaaaaatgtagtttgaaattctttgcagtgcggtcgcgatttgaatttttcttaaaccgcgcggtgtagtgcggtttacgattttgaattattaatatgcggttcaaaccacactccaccgcacattataaaaatatcaatttttatatttagttagattcaatatatgaatgtccaacctaaagcctactaattattgtattattaaaactttatttttttttcatatttattttcaataatccctataatttcccttttgttttttgtcttctccatcacacactgttttgcttctggtctcattcttcggccctctactatgggccctagcccattaaatatggcccaattatatggaagttttcatttttataatgtatgttttcaggaatgcttattttattttatttatttttttacgtttttactaactctattcaaaaagtcttttttttttttcttatttattatttattatttatttattatatggttttttactatcctaattacaacttctacctagctttttataatacttttctaaattaactttaatctatttttggtacaacatgccacttcgtaactttccaaccaccaaagctgagttttcgtacacgcattgtatttgtggaaagatagattgtcattacaataaaatttatatgttttaagtaatcaaatatgggcaaattgaagataattgtatataattttctttacataattaatatatatgaaaatctataaaaactaaacatttaaagagagctacaatcccatattctctaaggctcctcaattcaagagaccttctaaattcttattattttttttctttaaaaaaaaatacaaattttataagtttttgtactatttatgcatcaatatgtttttctttttcaaagatattatgagaaaaattcaagaaaaaaagtgtaaaatatgggaaatcaaataaaggtaaccaggtacccttagaataacgagaaggataattaattgtcttctactgtttttcttatattttttaactttttttaaaattttctcaaaatattaaatttttaaaaatttagaatatctattctccaactatactctttaaacacacattttaactaaaatagagaatgagatttaaaaagataaggttcaaccatacaaaaaagactctttataatagagaatgaatagaaaactctctaaatatagggagctctatactcttttgctaaattttttaataatattttaattaaaagtaaaattattttttattattttataaaattaatttatatttgatatatttaaattataaaatattattaaattaatcaaatactaactatagtaaacagtatagttggagcaaccacaacaatacggttagaaatactcttataacttaaaaactaaaaaaataaaaattccccttattgttttacattagtctataaggtccactatgattagtagttaagtccacaatggtttgacaacaaaatatatttgtttcttaagaaaaatcaattgattggaactcacaataaaaaaactattttaaaatttttgctccaaactccataaaaacttgagtggccctttttaaattttagaccatatataataatttcatttctagctttaaataaaaaattgtgagagagtgatgatatcatttcaaatcttaattaatcattaaggtgtgcaatcttcaaaaaggagaaattgcaaaaaagaagaggtacacaaaaggattcgatcccaacacacttttaaatacaatcttaattattaatattatttcactctcataacactagtattaaatattaattggtgttaggtgaatttgagtggagtattatccattaattaatcttaaaagtgatgagtgttaataacataagacaaagaagtatacctaataaactaaaaaaatgatgacacctcatattcaatatcacgtgcatgcatagtagtaagtaagtagacattataaaataaaagttgtttttatcttaattacttgacttttgtctctatgtgttaattaataaattacaacattaattaatcaaattttgagagggaaaaaaaagaagttgacattaatcaaacttgagtaggttaactttgagtcacaattggtatatatttgattttcttttagttttttagtaagaaaatcttgagtaatttggtcattttgatttaataaaattattaaaaatcacatctatatttattaattatattcagttatttatttatctttataaaatctaataacatgcaagtagtcatgttttaaaattttaataggagaaaattaaatactacacaaaaatagaccagtaaaaaaaaattgtgactaaatgtattagttaaaaaaatcacaatttattgtgactaaatataattctagtgataatttatatctaaatactatattttagttacaaaattttttttattgtaactaaaagttatatttaatcacaaacaatttatattgtgactaaattattgtgacgaaaaatatatcttttttgttgtcagagtaaaactaaattaaacataaattaacctacaaaaatatagattgttattttgactaaagtattatttatgtttctatgttgttcacatgaccatataaaacgtaatagatcaaaaaaaatatgtaaactaatcatagttcataaaaatatgtaaaattgtgcttagcataaaaaaattaaaaaaatatgttatattagacacttcgtataaaagttctaaatttagtatgtgcggaactatgggtagaagcatacatgctcctaaataaagtcccacaaagttaaaaaataaaaaaataaaaaaaaaaataaaaaattaaacacattgatgtggtattgttagggtcagacttgagctaaaactaattagacatgcgcttagaactcatttattttaggagtccaaaaagtatattttcttaatatgcatatttttaagttgttttaaaaaatactacatatttttgtaataagtttaataatgggtttatattgtaattgttaatccaaaaacttttcttggtgacgtagctagacatcaatatttgacatgtggcatgaaggatgatgtcacggagttgagtagacccgagtcatagcggttaacctgggaggagacctagtcctacccccaagttgactctgggatttccgggatagaagctcggacttcaataactttaatacaacccactatctttttatttagtaccgtgaagacatggagcaacctaatttaaggtttaagagctaaaattacacgaacctgcaacctaaaagccaacctaggcacctagggtttccacacaacgcccatgttgacattcctcaactagggtttcagtttctgagaatgtcttagtgcaaagtcgccaaaacttgcattaggacatcaactagacataccacggacatgtttgaggcattagatcagattcggagcaagttaatttttgagcacccagggccccgagcacctaatgcccaagttgacaatttgtcaatctgagtgcattccaagtgtctgatcgaatatctgacttttgcattaaatttgtcttcataaaaaatgggaaaatag

SEQ ID NO: 231411 - DNA, 691 bp, Cannabis indica
atattcatttatcagaaaatcaattattttctttttgctctagaaaattatactctcttgtggtcttatcaagtaaccaaactaggttttgttatagctcttctctgatacatttcattttttagattctttttacttatagttttcttagttattttaatttaaataagacatgttttagccttttagggtattgtatatagaataacctacaagttacttgatgttggcttaatggttatgtacttgtgtggaagaatgtggttgagggtttcaagtactgtaaaatgtaaagccattaaaaatttgagacaaagtaaaaagtctaagagaaaaagagaaaaataaaatcaaaatcactgaatgtaaccataaggatctgaaagaaaacctcaacctttgaataatagaagtggtttatcattcattttgaagtattttcttttcatccatcttattgttttttattgacaggaattagaagatcatacccatgaagtgaatatgcaacatgaggtgtttgatggaatgttcactttctatgattcatctaaagctaaacttaacatatatcaggtattgatctttatgtacttttgcatttgagcttggttcttacaaattgcttgaatgtgctgttagacttttatttgggcttacattaaatttattggttttattaaaacttggg

SEQ ID NO: 231412 - DNA, 775 bp, Cannabis indica
tttcttttgactcaagagatttgctctagtctcgagagtatgatggcgcggttttggtggaaatcccaatcaaactcaagcaagggagtgagttgggtgaattgaaacgcctttgtcaacctaagaattttggtggccttgggtttcgagaccttagggactataacttgtctttttgggaaaacaggatggcgtttgctcacgatgggagacactcttgtgggacaaatctataaggctaggtatttccctcatagttcttttcttgatgctgagttaggaaagaatcctagttttatttggcgaagcatatgggctgctcaagatttagtccgaaagggtgcaagaagatcagttgttgatggttcctcgattaatattctcaatgatccttggttaccccatgataccaacccatatgttgttacaacacatccagggcttgttgacaagcaagtgtctagcctgctgaatgttgtggagaggtcttgggatatggaaattttaaatgacatgtttgaagagagggatattggtttgatcaaaaacattcagttaagtagctctagttctgtggatagttggtgttggaatatggaaacttcgggattttattcagtcaagagtgcgtacaagtttcttcaatcatcaagtggaaattggctttttacacaagatgatagtagctggaaaaagctgtggcaactttcagttcctcccaaggttcatcattttttatggaaagcatgtttgggttgtctcccaactaaggtgc

SEQ ID NO: 231413 - DNA, 1337 bp, Cannabis indica
caatacgacctaatacggcgttccaaacgagccctagaattattcattaatagcgaaagagagattataatatatagaagtttttctcaaatacagatcactaccattgttatattatacaccctctcttttctgccgttagatatataatcatcaatgcctcaaaaagtttctctactggtagggtaattataatgggtagtagtcctacattgggcaccagtggtgcccagcaccttctataggtaataatgctctataattagttagcaatattctttaaaagttatttttttaaattatatgagacccgatacttaattataccaataataatgtgacactgaagaatgtactaaccaccctagcattttttagcaattctcatgtatatatgtacgtattaattaatagctacatgctttgacatgcatacacgtgaatatgtcttttgataatatttatcattattatttatataattataataattaactaataatattaattttaaaagaagagatacttgcaccacgtgaatttgtcattcattataataactaattctattattttgatttgattaattgtaattatttggatgcggcgcccatcaatcaaatccaaaacaaaacttaatttataataattgccattcgatccactcttggaatattttatatatggaaatttagtcagtatagtacactcattaaacaggtgtttcgtttaatcccttatctgtttcaacatcaagttggagagttattcactacaaaaaattttatttttagtcataataaaatttgtgacttaaaaagttgtgactaaaaaattcgtgactaaaataaagatttactatctctaatactttattattgttttaattgttaacaattatacttatttttaattaattttacatagaatagaattcataattactatatattgataatcttttatgtgattgagcacaattttattgatttttttttttaatttttcttaaaatttatcaggatagagttacccatgcgtaccctaccctatacttgttagggtaataccccatacccttcccgcaaaatataataggataatagggtaggcttgtgtagggtagagtatggatgaaactattttcataggatatggtcttggaataaacttacactacccatactttttatgtagaatgacctcataaggcaggtcgaagagggaacactggtgcttgaaggcaatatggttattcttaccctggcgcttggcacaaatgaacacgatggacgttttaggggtcgatggggagtgaacatcacctatacacaata

SEQ ID NO: 231414 - DNA, 1531 bp, Cannabis indica
cggtcaaccgtttgtaagaggtgtcggtggtcgatcgagtgcttccggtcttggatgtcgttgaagccgtgctgactgaagaaggagaatatggttgctgctgtgaaactgttggtaggattggtgaaggaaaacttgagtaattagaacgcgcggctgaactagacccaaaagaatgcttggacgaattgggcttaagtaatgggcccgagttcattagttgatggccctcttcaattctttgggtcgtttccatgatatgggccaacccctagggctgcaggatctgcaatgtggccttgatttcttctttgagtccttttacgaatcccccttccagaatatggtttggtacgtcgggtacccgagaggccaacatctcccactggacacagtactccttcaccgtacctgtttggaccaccgataacaactcctctgaaagagacctaataggtaccgctcggaatcggaggaccatttgcttgagcatcgcccaagaagtaataagccggcgttggttctcccactggaaccaggatagtgcatcaccaccgtcaaggccaacaatggtcgtatcaagtttcatcgactccgccattttcgtaagtaaaaaataacgtttgacacgggcaatccaaccgtcggggttgtcgccgctgaatagcggaatttccattcgtgggaggtggtagtccaaactgttcgggaatgagtttccaaacgaaccaagctgtattggaggtcccgtcgggctgttcaggggaggtaccgccatgttcgccagaaatttcgatgtgttttggtcaaggcgaattccgatggagctaggttccccaatcaaagatccattaccgtcgagagctcgtcgttgtcgatctgcgttggtggctgtcgcttcgggagtgactttgattgacagtgcgagtatttgggaaatttggctcactgcagactccatctgtttggcgacgatactctcaatggtggtctgaatttctccttgtaacttctccataccctgtgtaaccctttgcacatcttgacgaaggtcagagacctcagccccaactttttcttcaataatctcggacatagcatccttctttggtcccatggaagtaggagctctgataccaattggtaggtttatcctatcaattcagactagagaagaaagtagatgaaataaattaatgaaaaagaaactctgctgtaattgatccccaggaaaatggagagcatggtctctccttacaagccttactcagaaaatactctctgccccctcactacaatattctattatttatatataatccccacgagactcccatgagccttagctacacccaaacaaaaccccccaaaagagaattacacagccacattattccctgtggcagatcccatgttagacttcctactcctttgagcatacacatacgtcacgggtggtctatcattaagctcttcatatgttttcttgaatgccataaagtaactcataagagacttatcttgtttctcc

SEQ ID NO: 231415 - DNA, 617 bp, Cannabis indica
gtgcgagcacttgtccacatattcggagattcgtgggttgacagtgtttaactcactaatgaaataactatagctacctcaagactaactttacgagcttttttaagcacttgggagtgtcgtcagatttgtgagctgcaattgattgataacaatgaagtgccaacaagctttactcaatgcttttattcattagatattaaatttaattacatcattgtgagttaagttaaaagaaaaagaagtagtagttggagactttgttttttattaaagcttagctgaagtgatccccactacactacttccctattcgaataatagtgtaggggccatacctttgtgatggacctccctacctaaagatgactttgcatcttgtctgttcaagaggtgatcgattcagttgcacaaagtaaagtaaatctcaatatgaagcgaactgtctagagaatagtaactttattgataatatcgtctcagatgctccccgttctaagtaccttagtacccacactagattcaagtggcatcatagcaaaatcaaacctatttgtcccgtgttcaaatgcttatgagatgatataaggtcccccctctctcattgggagtcttta

SEQ ID NO: 231416 - DNA, 2983 bp, Cannabis indica
tggtagagtagtaatgttatgcaaggcaatctagaaagcaagaaatgataaggtttggaatcaacgaactcagactgcgactgaagttattgtgtttgcggataactctcttgaccaatggtgtaaagctcaagataaaggtaatattcctttaacaagaccattccttgatggcgatgggagggagctatgggtgaaactatttttacacgtcaaaattaacgtggatgttgcaatttttcctttggtaggtcagtttggggttggcttcatagtttgagatttgtctggtatgttggtggtggcaagagcaaattgttgtccaagtagtgtcgagcctaatgtggctgagactctcgacgttgaggaggtacttagctagtttaaagatcaaagttactcgcctgtgactcttagtcaaatagtttggtatctattgaaactatccaaagtcctatagtgtttcgttttatgtttggtttagttattgaagattgtaagatcatgttaaggtcttttcataatttgtctttacaattttaaacattctgccaatcgagttgcgcatgttattgctaaaaattctcaattatgggctgatcgtatttttaccgagtcttttattcagccttttgctattttcttctgttttcttgtattgctctttttaatgaaaatctttgtcaaaataataataataataataataataataataataataataataataataataataatatttcagtggcgtagccgtagctaaccaaaattaaaaataccccgtttgttttttgggtagcaatccccagtttcaattcttcttttgatattaatgcaaattatttttgactttcgaatataataataataataattttccttggtttggcagttacaaataataataataagaagaagaagaaaagtgcattttttttgttgtaaagaaaataaaagtttgccttattttgtacaaaaaaaaaaaagaaaaaaaggaaaaaccttatcgaaatagatataaatagtgatagattggtcatcttcttcttcctcagattgggatttcatttcattcttacagctttgaaaatgacacactcaatcgttctctcaccttcttcgtcttcttgtttctctctcttcacttctcccaattctactacttcatcctcttcttcatcttggcctatccgtacggacactttccccattagctcctccaagagctcacgatttccttccgtttcgaggccacagcgacgacttatggtgcaatccgcagtttcgatcgagaaagagacgccggaggcccacaggcccgacacgtttctccggggcgagtcatcctcttcctctatcagggcccgcttcgagaagatgataagggacgcccaggatacagtctgccaggccattgaggcagccgatggaggcgcccaattcaaagaggatgtttggtccaggcccggtggtggtggaggtatcagtagggttcttcaggacggcgccgtttgggagaaggccggcgtcaatgtgtctgtcgtttatggcgttatgcctcctgaggcttatagagctgctaaggctgcttctgctgataccaagcctggtccggtgccgttcttcgccgccggcattagctccgtgagtacttggaaattcctatcaacctcgaaattttatgggtatattgcataattttctggacctcgattttcgattttcttttttcccttcaggttttgcatcccaagaatccttttgcgcctactttgcatttcaattatcgatatttcgagactgatgcgcctcaaggtaataattttatatgcttctgctaaacccatagagtcctattaacaactatgaagcccccaaaatgagaggcagctagcagggtagcatgttttgtctggctccactgaaaatctcattgtcttttcatgctgtcaagaatattttgatttaaaaagcattatcaatctgatgatttcttaactcccgggatagttgagatataggaagatatgaaggcaaaatactgacttagcttgtaccagaggttgaagatgttagcgatagtatttcattattttgcgatgctgggttagactcttacctgcagagaaagtgatgaatatagtttactgtagcggttgattggtgattatttcatattatgattcagttagcataaagaacacaatcatatactatgaagtggtggacctagtgctagtagttcttccgttatgtgcaaatgaagatcaaacagcagttgggatacaaacgctttttgttttttttgtttcaccccatacacgtctcttgcctaatttttatctgtgttattgatgactatacagtttgcaatttttttcggtttgtcaaattctgcagacactcctggagcacctaggcaatggtggtttggtggtggtactgatttaactcctgcttatatcttcgaggaggatgtcaagcactttcatacggtatgctatcaaaatggacaacctttctattaattgaatagcacatgattagttttatagaacaaaataatgccaagagaatagagaaagaaaaggataacttataatagtttatgtcacctctaacatagtgatagtactttaagcatcattttgcttttagatatacttgatagatcgtagatttttcacattcttcttcttgtgctaagcaacattttaggattgttgtggcttgtagatgatgcacagactattttcaagaattttatattgacattagcttctttctgcaggttcaaaaatctgcttgtgacaaatttgagcccacattctacccaaagttcaagaaatggtgtgatgattatttctatatcaaagtatgtttgtaaacctcataaatggttagagggtgatgtgattggttctaatatttagttgaagtaataattagtcaaacaagaacgagtatgaatatatat

SEQ ID NO: 231417 - DNA, 1156 bp, Cannabis indica
aaaaaaaatattatgagataaatctcaaaaaataaggagatgagaaaaaaaatgaataaaaggggctagcagtggggttcctttattcatatgcaataatattcagacatggacattattaagagtattcacagaagaaacatacatacaaactcaagagattatatatataaaaatatatatttgtacatagaaaaaaatgtataatagagttgggtgaagctttgagcttacgtgcttgacgagagagagagagaaatgcggctgtcactgtgtggagtcggacgacagagattagggcgtaaagagagggagggttagaaggagatgagtaaatcttgtgtagggttttattgtagagaggggagggatcgtaaagagagggaggaatgcaatgaatgtttatgcattaatttttctttttatatatataatattattaccggtggggctccgccggtattaattttttccgccggtaataagtataaaaataataaaataatgtattaccggcggacccccgctgctaataatccgccgataatactaattcaaattaaaaaagcgggaattttcccgcacatttccattaacgaattagcagcgggctttccgccggtaataataaaaaaaccgccggtaatactaatattgaattaattttattatttttagtaaatattaccatcgaaatacgtactccgccggtaatactcttattattagaggcgggcaagctccgccggtgatgattccgccggtaattttaatttttcttgtagtgtcacttcaaaattacacacttatactatctcaatttctccacccaaatttcaatacaccatttatttcttcgtcgctctctccacataacaaactcacactcacttttctttttacaactcactatttctctccacacacacctcttctactctcacacacacaacaacacacacatatatatagaacaaataaacttgggcaccaagacatttcaaagtttcctcaaaattttttttcaaaacttgatcaccaaaatttttcttttcacacaattaataattatttaaaaaaaattacaactttacaaatataaataaacaaataatttgacttaaactcccacaagacaaagtttgttcttcatcaa

SEQ ID NO: 231418 - DNA, 1639 bp, Cannabis indica
gtactcgtgtataagagtcatttatttcctgggtgtaagggcccaatggaggcttgaagcggggacgttatatgtgttttcttgggttatccaaaaggtactataggttatagactatgggtacgaggaaaacctagtacgaaaactataaatagtaaggatgtgatttttaatgagaatatttttctatgtgttgctactaaccctaatgttgcagccctagtactaaccctgcatgtaactctatcaaatttgatctaaggcctactactcctagtgatgaacaaaatacatatcaagcaaagagcttagaagactatcagttggctaaagataaagttagaagagcacctagatgttcattttgtggtactaaataaggtactcagtgaaagatttatgtatctaattatcattgtaccatagctcaaggatctccaaatgtataaacattaaatcaaaacataaattgcatgaaagaaatatatgtatacctgttgatgactatcagggtattctcgaaacttcttgtaagttggatccaataatcctcacactatagtcttccaaataaatccttcacacataaggagtagtgtgggatactaggataaaatttataataatttgttcttgataaattctcaacacatgagcaagaactatctaagaaagaaaaatagttttcctttcatctctgtgtattttgaaaagtatagtgtgtaaagcttcttctgatttctcaaatcaggcttcgatttatagtagttaattcttaattaattaaatcatattatttaactaaataactataaccaaatttgataattgatatttttgatgagggaatctctcaaccacttgagaaaatatctcaactactttaagggaatatctcaaccaacttaaaatatcttcgaccacttttcaaattcaaatatttatctaattgaattaattaaatatttaatcaactcaaagacaaaaccaatagggacactctactatagggtaggcacctaccttgtctgattaaggcaaggatggtgtcttttgtcttaacaatttttgtcttaatttttttttcttagcaacttttgtctttctccctagttaattaagtttcacaattatttatttattacaaaaaataaataattaccattttgccaattcaaaatatatttttccaaacaacattacacaactttttatccccgacagtgtttcaaggtggcaattcgaggaccatggacctatacttctaaactctaataaactagattatttattaagtctaatcagtcaaattatctttgtttattaattccatgattactccactataaaaatggaattagactcttagtaattatagaattatatttactgagttttactacagtgtctattgatataatcaattccagtgattagctctctttgtgtcacttcgtacttagttttaataaaattattgtcttactcttcttattacttctttatcatttagtaccattaattcattagtggaagtacaatttggattccatctgaatttacgcacaactctccagttctagaattaatacataaaggaaccaaccttcgatctgttaagaaagtcatgattccataa

SEQ ID NO: 231419 - DNA, 798 bp, Cannabis indica
aatactcctatgaacagcgggttgaaactgtccagttatggcagtgagccaatggaagatgtcacactctataggtctatcgttgggggattacaatatgctactatcacaagttctgagctttcatactgtgtcaacaaggtgtgccaattcatgcaaacacctttacaacaacattggattgctgtcaaaagaatccttctatacatagcagacacacttgactacgggctacatcttcaacctgctccagatttctccattgaagcattttgtgatgccgattgggctgcaaaccctgatgatcgtagatccacaaccaattactgcatatacttaggaggcaatcttgttgcctggaagtcacaaaaacaagtaaccatttctcgatcttcaaccgaagctgagtttcgaagccttgcaagcactgtaagtgaaatcagctggattcaaagtctgcttactgaactacacattcctcaacccagcatccctactgtgtggtgtgacaaccaaagcacagtgcttcttgctgcgaaccctgtccttcatgctcgcacgaaacacatcgaaatcgacctatactttgttcgagacaaagtactgcagcaacaacttcaagtgcgacatgttcctgctgctgctcaaatagccgattgcctaaccaaacctgtttcgagctccaagtttcctgatcttagatccaaactcaatgttgtttctcaacatactttgagtttgaagggggctgttaagggaagtgatagttagtttttacagtttgttagttgaggttgt

SEQ ID NO: 231420 - DNA, 664 bp, Cannabis indica
taaaatgagtcctggccactgttgaactagatgtggagtccgcaactgacccaaacttacctagtgaagtcagagttggtcattcccaaccttaggaaaggcaaaaaccagaagagtggataccaagtaccataaggtgcccaccaaaatacctctgaatgccaaggtgaaccccactatagtacctaggtggcatagttaacccggatccgagaaagatacgctctaataacccacaagggaataggcctccacagaggatgcctcaacctcaggatggtggccaatgccgaagcatgtctgtcaacaatgggaagggaaacgaccgactcagtgccaagagattttgtgaaaatgctgattgagaagaatctcaaaagttgaacgtctggcaaggggctctcaagaacaagattaacaactgacgaaatgacctatcaccttagagagatgtcataaatgagggaatttcggttaagttggctaccttaaagaaggacctatatagttatctgagtttctatataggtgtatgcaaaagctaaggaatgtacaaaaattttttcacttgaaaacattgcaattgaactgggtagacacttcacatcatattaccagtaggtaaatagtagcaatgattattttttcttcttttctatatata

SEQ ID NO: 231421 - DNA, 1078 bp, Cannabis indica
taaccaaaaaaagcattaaaaaaagaaataggaaattaagaaaagaaaaacctatttcattgtggttctcaaaaatttgttgatgagaattgttaaaaagtatattgtgtccagtatcttcacgaatgtaatactgttattagtataattaagtatcaaatttatataatttaaaaaataattaaagaatattgctagctaatcgtaagatcctactttacttatataaaatattgaacactactgatacctaatagcaatactcttaaattatttatttttcatagagtgtaatagtatatctccatatgtttcctatatttaaaagaattttttaatcaatatttttcatgatagtgtatgtttaacgttttagacatttagaattatttgtatatttttaaaaaaaattaaaagacttagtgacttacaatatcaaaaataatattcaaacaattacttattatacatataaaaattatcataagcaacaaatatttaaattttatttttaatattataaattattcaaaaaaatttaaaaattaaataactacaacatataaaattatgaaaaaaaatcataaacaatttaccaaaccattctttaagaatactaaaaccttacccaataaattaccatatatattgattcaaatgtatacgcgtgtgtgacaataatgcattaaggttttagacgtggagatttatttgtatgtaatcatatatgaaataataaaaaattaatatatgtataagttgtggagcaccattagttcgatcaaatattttggttggtatattggactattaatatatatatataatttttgaaaccaggactattattgttcattcatggtacttaatattagagaattgaaagtattattggtgtctagtattttttttagtgttatattattattagtgtaattagatagcgaatctcatataacttaaaaaaataaattttaagaaatatcgctaatcaattattaagtgacacctatagaaaaatgttagacactactactaatcaataacattgctcataatattattatagtttctttga

SEQ ID NO: 231422 - DNA, 700 bp, Cannabis indica
aaagtgtaaaaatattctacggcgtgctgctatggattgcctttccaacttttcttaacatgaccacaaaacatgtaagtgtctctccaatctaccccaactgtcatatacatgctgaaaccacttctcatgtactacttacctgtccttttgctctctgttactggaatacttttggaaaaataggaacgtttcctactgctatattttgcaactggttggagcagttagttttcaagtttgatgtggaaaccgttgatcgttttgcaatgatatgttgggcattatggaaagctagaaatactaagatttggaagcaaaaagcactttctgttaatgaggttcttgcatacaactcttgcttattaaaggaaagctcatcaagacaaatatgctttatcatctttgtctcttgaaagtattgatgataaaattgagttttggactaaaccagctattaatacaatcaagataaatatagttgtcgcgcgatttaggtggtattaacggcggagtggtccgccgctaatgaagtcaaatgttttagtgcgccttatttgagaaagataactattatagtttcgggattatggcttgaaatagctttggtcacttgttgcagttcaaggccaagtaccgtggaggtatttatccagcagaggccattgaagctatgggtgtgaaggaagcgcttagttgg

SEQ ID NO: 231423 - DNA, 1790 bp, Cannabis indica
atttttattggatatccagagaacatgaaagcttacaccctactcgatatgcaaacaaaccaaatatttcattctctggatgttgtcttctatgagtctatatttccttacaaaaactccaacccaaataccaacattgacattttttcccctcaaattcttcacctacagccgcatgtgactcaactccacctgctgctctagattttccacaatttggtttacaccagaatccattaccccctgctgctacagtcgcaaggacttccaaatctggaagaaaaatcataccccctgctcatttacaagactatgcatgtacaactacttctagcacaccctatcccatttcaaactttctctcctatcataggcttaatccctcttttcgaaatgctattcttgctataacagcaataccagaaccaagatcctatgctgaagctaaactccataaaatatggaacacaactatggataatgagatagatgctctagaacaaaatgacacatggatagttgttccattacccgatggccaacataccattagcaacaaatgggtatatataaagaaatataatcctggtggttcactacaaagatgcaaagccagattagtagccaaaggcttcacacaacaacctggcatcgactattttgaaacttatgcccctgtggccaaattcaacaccttgaaactacttcttgctcttgctgccataaaaaattggcacttacaccacatggacataaataatgcttttctccatggtgacttacaggaggatgtttatatgaaactacctcaaggatacactccaaaaggagtaattccaaaaaatgcagtttgcaaactaaagaaaagtctatatggcttaaagcaagcctcaagacaatggtatgcaaaacttagtacaacattgctgaaacaaggtttcaaacagtcccaaaatgatcattcattgttcatcaaacaccaatcaaacaacttccttgccattctcatctacgtagatgacataattgttgctaccaacaatacctcagctttacaagacttcatatctaccttagatgctcaatacaaactcaaagaccttggcagccttcactttctccttggactcgaaattgcaagatgtcccaaaggcatttctgtcactcaaagacctttcactctccaacttctcaaagaatcgggctgtcttggatctaaaccggtatccacacctatggaacccaatataaagctcaacaacgatgatggcacccctctcccaaatccaaatcaatataggagcttgattggcaaactcctctatcttactatcacaagacctgacataagctttgctgtcaatcgactaagtcaatttcttcaaacaccaagggaacttcatatgactgctgccacaaggatccttcactacctcaaatgcactcctggccaaggcttatttttctatgccgattgtccaaccatccatttccaagcttttgctgatgcgatgctgattggggagcatgcctcgacactcgacgatcaatttctggctattgtgccttccttggacagtctcttatctcttggaaatccaaaaagcaacctacagtctcaaggtcttctgctgaagctgaatacagagccatggcaaatgccacatgtgaactcacttggctccacaacattatcaaagatttccacattcaagctcaacttccctccacactcttctgtgacaattctgcagcaatacacattggtgaaaatccagttcatcacgaaa

SEQ ID NO: 231424 - DNA, 1118 bp, Cannabis indica
ctctttaccaccaatcgagaacagtttttcatttcaagcatgcatcaatttccaaacacgttctttgatgttactgaataactcctttttgtctcgacctaaataggaaggcaatccaagataacgctcatggcactgactaattagcatctttaaagtccgatgaaagaagtcttgcactgcatctggagtatatagagagaaagacataactaatttttgattgttaagtatttggcctaagctcggtgataaatgtccaaaggtctccgaatttccataatagacgcatgtgtggtttcatagaataacaggctatcatcagcaaaaaataagtgtgagattgaaggtgctcttcttgtaatacgtaaaccttgaagattaccaatcacttcctcattttgtagtaatcttgaaagcccttctgagcaaatcaaaaagagataaaggggatcccccctgccgaaggcctcttgttggtttgacataatccgtaacttcaccattaagtgagaaagataaatttgtggatgacaaacaatgttgaatcaaagctatccattttctatcaaagcccattttcttcattactacccaaagataagaccactctactcgatcaaatgctttactcatatcaaatttgcgagctgagtaacttttaacacccattgtcttgtgttggatgtggtgcacaatttcaaaggctacaaggatgttgttctttatgagtctgtttgagaggaaggcgttttgtgtttcagaggttactagtggaagtgcttccttgaatcttaacaccaccatttttgagatgagcttgtagattacattacacaagctaattggaaggaaatcacccataccatagagtgatttgatctttggaattaatgtaataattgacatgttgatcaaatccatactgtgaccatcattcaagacacctaaaacgacttcggcaaccgttgaacccacaatatgctaataattctgataaaacatggctgacatgccatcactgcttgggcttttattagggttcagacttcagtgttgtaagtgttggaaatattttaccaggatctagatttactaccaagtatgtttcattaaca

SEQ ID NO: 231425 - DNA, 1884 bp, Cannabis indica
tgtaatgaatatttataatttatgttgattatacaggctattacttgataagatatacacggttagtaatgagccctttaaggcacagctcatctgagaatattagtagcaaaataaaaacaattttatgaataagtcagtcatcaaaatagtaactgctaaaaaatcaaaatttataactctaaaagttatattcaatcaataaatatccaagtaaatcttaagacactcagtcaaagttaacctcttactcatgtatgaagaattccatcatattagaaacatagcaaaactgaatttccaatttttccaatttttagtttttcctaataaaaactattatttttaatataattggtatttgaagagaaatccaacttttagtttttactagcaatagaatataaaacagaaacaaaattaaactaaaatcaaaacaggttccaaaattacaccctactcgcatctatgtatatattttcaaaaccttgatagaagtcccatatgctacctttccatatttttttatactgtcataatatgtcgatcaagacaagagtctccaattaacattacacctttcaatcttgctattcacattacaaaaaaaaaaaaaaattttgtattaagacaaaatttttcacaaactgaaattatcataccaacgaaaagacctcactggtcttaccaaacatttcaccaccatactggtttattaaaaacaaaacaaaccatattggcttacataaaattgcaaccgtactggtcgtaactaatgaagcacccaaatgtgtaaaccacaaaaaacaaacatagcacaataattttgcaaaaacaccatgaaccaaaagagaggaagccacatatcctttaaaaagttcattagtggaaaaaaatatcaccataagcaaattccatcaacaaaattctggcatttaatttctataattcgcaacaaccaatgcatacttcaaaaactgaaacgaaagcaaattctgggttacaaaaaagaatcaaccattcacaaataaaacagcatccatccatttcaacggagaaaaaagacacgtgatccaaaaaacagggatatcagattaatcaaaagtgaaaacatatacatgaaaattaaattacaaattcaaaaagaaaactaactcaaaataaagttatacatcaaaaaatttccaaagtaaaataaaaaaaaaagaataaacgacattaagaaaaaacctaaccttctcccacatagatagtgacctaaactctttcaacgcatcccaattccttctgagaatcggctgaagaaagagtgaccccgatttccatcccccaaggccagccgaggtatacatctctgattgccaccatcctaaggcgaccccaaacatcccaaatccctcacaaaacaaacaaaaaacaatattattaaataaataaaaaagtgaaaactacaaagtttagggtgataaaattaaaacacattcttaaaaagaaacttatgccataaataaaatgaaaaaaccctaatttgtccgaaactctttcaaaaaaccaaaatagaagaaattgggcgagaataaagaggatcgctgttctcaaaacgcttcggcattgaccgatttcatcgaagacccacaatcgtttgacagaccaaaatctattgggatatatgattggattgttgatcaactccacaaaagattccataacaaggttcctttgacgatggatgggcttcctatttttattttacatcatatgttgaagacatacactcgaataagtagaaaagaaagaactaataattagtctaaaaaacaatcccactaaaaataagaaacgaacaaagttcactatgtacgagagtataccataatttggttc

SEQ ID NO: 231426 - DNA, 582 bp, Cannabis indica
caataaatctccttttgatcaagaatagtaaattatttcttctaaattaattggaatcgctagtttgaaattaaatcattcttattgcgaagattcttaagtttgactttacacgcttttatcctttccccaaactttcgttgtaacattcctcccccaaggctttacaaggtccataggtgaccactgccataaggaaatagcagtgctctctaaaattggagaccactgccatagtggagtggcagtagtcgggtgctacacaaggaaaaggagttcattggccaaattgtattttcaacattcatgtaccaaatacaagtgagaaacaccacccatggcttcctacaagccatgcgtgaccactgctattgtccggctccaactgttggcagtggtcacgcgttagggtttcagacatcgaaataaggtttttgggtcccgagacccccaaaatatgactcaacataaaaaaaaataaagtctaaacacaccccgaggagtccgagagcatgcatggccgaccactaccattttgtcatgtcagttctcgcaagtactggtacaagtcagcataaaccg

SEQ ID NO: 231427 - DNA, 1524 bp, Cannabis indica
gatgtattttttataaagtaaacaagcattgacttgatcaatactatagtttggtctccaagtgcatgtccttatcatcacatggcgatctctctcatcacaacaataaattattttcttagttaaataaaaccacaaaatgaaaaaggtgtacatgagaagactaaaagataagatacatattatttttatagtggcttagaatgtatcaaccttaagcattttatcatcccataggcattttctttttcatttaatgaagtgaacatacaccatattaattcgtactgtgtgtcgcatgtgttttgatcctctattattaacaatatatatactattaataaatgcacttcactagatttggatgagaaaaaaattaaaatcgtttttttttttgtcttttttttttttgggggattatagactataagatctgctcgtttttaatccctttcaaacttaattgaactgatttttagattagaaattaattcccaatcaaaatctataaaaaatcttgtcgtttcgctcatctcttggccagaatttcactcaagcctgactagcctttaaccgggtcacgcgacccgcctccatcctagctggaggaagaagaagactagctagttgcgaagcccactctcgcttgaggcgcgtggggggcatatgtggctgctcctgacgtcgtttttcgacatttactttttgcaacgtgcttagaatttaatttctgattttttcatttttttaattaattttttgactctgtttaataattattatttttttaatgatatttatgcacttaataaattattaaaaataatttttgaagatttttcgaaatatgtaaatcatagaaaatattctgggtttcttttcgttctgtttaacataaccactttcttattttgatttatcttaactatgtgatcttcacctatattctaatttttacatctttcaattatttgttgttttaaaactgtaaaacttaattttttgatacaaaaataatgtgttatagtgaacttttttttattatcaatatattagaagcaattaatatatctctttttcaaaatttagctgaagacttttatatgttgtagaaaatattatttattttagttgtctatatgtgtaattacttgtccaaaactagtatttacatatattagttcacattcgataaagtaagttaatattaaatttttcatactttaattacttgcccaaaagaaataatttaaatatatatttattattattttttacttgaattaatatatattctttaactaaatttatttgctcaaaagtaataaattcttaattgatatggattttttttattattattaacatcatgaacgtagatcatgtgtgtgttatattctcatcccaaaagaaagtttataatggccaattaactctacaatatattctaattacttgcctcttatagtttaatcaagttttaatttttcaatctcctttttgtgaacaacaataaatatttcc

SEQ ID NO: 231428 - DNA, 777 bp, Cannabis indica
aaataatgccttatgtaattatccttttaatatgagcataaaacgatcgcaacttaaaagaaaattcaaatcattcacttaaacccaatttctttcagcgaagcctaacccatttattgttatttcagatacggcccacatgtgtaaaatcctaggggaattttcatttttatgggttttaaggtataagtttacaaaaatatggtttattatcaaaagtgttagtatgggagtataagataactggttacccttacttggatttctcatatttttcagcgttttcttgaatttttaccataaaataactcctttagaaaagagcaatattattgcacatatagtgtaaaatccaataaaatttataatttcctcaaaccctaaacctggaatctccacttaatgggttggtccatgggaccctggtaaagcccaatcaaccttctcttcttctgcattgagaggactgtcctcttgcatcgggaaccaaagacggcagggggagcagtggtcgtcaggccagttttaccttcaccgccacacactcgagaaggtgagttggctacgtcagtaccctgggatctgggtagtacaaccttcaaaggataacatatttccaacactcttcctgctcttctcaatcttcacatcaacataggttgttttcttgagaatggaggtgaaactttctttttctttgtaatttctatgatttcaaaatgtgttctctctcttaattacagttgttccttcttggaagacccatgagctctcatc

SEQ ID NO: 231429 - DNA, 982 bp, Cannabis indica
cggccgagatagagagagagagagatgtttgggggtatttttggggttttgaaaaaaaaggtatagtttttttagggtttaaattattggtttagaaatcaaattttttgattttctaagtataaaaaatcaaatttccctttgtttttaaggtatgataacattaggataatacttaaatagaggtattaacaatgattttatgtagaataatttttttaatatgagtgattgtttctttttatgtccacatttaatgttattttattttattttatatataattatttgtgaaaaatattatcatatccaccaaaagaatgatagtgatagagggagttatttttttttctttttttagtgttgttttattgtttcattttttcaatgtagttttattgtttctttttttcttaatgtatacattattgtaactctttttttttaatattatttcattgtttcaatttttttttttttggttaaatttttgggttcattgagtagatactcttaagtaagggtgggcatccgatccaatccaacttttttttctcatccgatttaattcaattagtaattagatttgaaaaatcatcatccgatctaatctaatttgacctcaaaatctaatccaatccaatccaattactaattggattgaatcaattttttaatttgatatccaattacacacctaaattttaatattaacataaaaatatgaagaaaaatacgtaaaaattaaatattaccttttatttaagtttaatacactttaaatataccatcattataatgtaatgcaactaaaagtttcaaataattaaagcaacaatatttttaagtaataaaataaaacaaaacaccatgaaaataaatacacaaaacaactaactgttaatgcagattttcgttaactaaatttgagcctcacggtaatgatttcacaccgaaaaaataaaagctatagaaaaattat

SEQ ID NO: 231430 - DNA, 733 bp, Cannabis indica
gtctacatgaccttacctcaaggatacaaaccaaaagcacctcttccacccaatgccgtatgtaagctcaacaagagtctatatggcctcaagcaagcatcccgccaatggtttgctaaacttagttcaacactcattgcttctggtttttcacaatcccaatcggatcattctctattccttaaaaacaaaaacaacatcttctttgcagttttaatttacgttgatgacatagtcattgccaccaacaatgatgttgctgctaccgtgttcaaacaacacctaaactccaaattcaaactcaaagacctcggcccccttaaattcttccttggtctcaagattggaagatttaaatctgacatttcagtgtctcaacgacccgtcgccctacagctcttacaagacaccaattttttaggtgccaaacctgcttccactccaatggagcctcacaaaaaattaagcaatgatttaggtgacattcttcaagaccctacttcatatcgcagtctaataggcaaactcatctacctcacaatcactcggcatgatataacctttgcagtaaacaaacttagtcaattcatgactactccttgccttccccatctgcatgctgcacaccgtgtgctcctgcaacaccctaactagcctaggcgtgttaacgtgattttaaacatgctgtgtagctcgttgctaatcaacgaggctaatgaaaaacgtgattaat

SEQ ID NO: 231431 - DNA, 1049 bp, Cannabis indica
tttatttatttattttaaagtatgttatggtataaactacgtaaatttaatacttagttgtaaataaatacttaatttataatttgaaaatttttacaggtactcaattgctatgtgtcaaataaattatcacatgacagtttttgattggtctaagttattaaaattttatttttaatttaaaaattaatttaaatatactaatgaaaaaaataatacgtgaataatgactgacacttaatggttacgaagtttcagaaatataacttagatatcataatagtgaaaaattaaacttaaatatttatttacagctaaaagctaaaattagatatttacgttgtaaattattttaattttttcctcatattcatatattgatcaattgatttaataattacttgttactattatctcaccagctaatgtatacatcaaaattaaaatataatattgtagtaaaaatagaaaagactataaaaaatacacaaaattaaaaaaattcataattatcaaatttattaaagaagaaattcatttaatttcttcactcttttttccatagttaataatgtagttggagaaaaggaaaagaaaaaacttagtcttgtccccactttatcattcctttattacaatttcaaatgagaaaaagaaaaacaatttctaaagtaaaattcttgacttattttttctttttcctttttttcttttttcttccctttatttacattttttctaaagaaaaaaagaaatagagagttagtgactatttaattttttagatttttatgattatgaaatttagatagaggttaagaattaaccccaaaataatcttttagtactttgtacaaattaattaagaatcatttattttggctagttataagaaggaatgattattgtacgtgaacatattaatcaacttgtctatgttgaaaggtaagattttccaaaaataacaataagacaacttaaataagtatgactttgaagtgccattactcttaaatacataacaattttatgacagtcataatgagaca

SEQ ID NO: 231432 - DNA, 1375 bp, Cannabis indica
aatacatagacctccttgtaactttcattcatgttagaatttttttactaaaattagacaaaaatccttaaatttaacaatctcaatagttcggggagaatttttaacgacaataaaaattcaggagacacgatttagtacatgtcaaagttcgggcaaaaaaatactaattagccttttattatttttggatatttggagggaagcatccatgggaatgtgacattctctaacatttattcattagtgttggtttttacatgtttaatgtcattttcgaacaaatctatacctttgtttgtctgttgtgttgaatttttgcaaaacaattggatttggttttttctgcattttttttgggttttttgcgtttcttgctagtaaaaattcaataggttcgatggtttctcaaaagatgctcgatataagcatgttctcgaggttagggatgaatttttgatatatacttatattttggggtaatgtcaaactcttaagtacttgagtttgagatgcccttaatctcaatctctcccaactaaaacccaccaagtgaaactcttataccaaacattctatttttgagtaaattcattaacattctagcttgaagctgaatcacttggaataaattcattatatcataatatttctgttataggatatgtgtagcagaattgtatagaaagatgttccaggagctactattcattcctttcctctgtaaataaagtcgtactctacgtagtttgtcaaagtgattcagcttcaagctagtaatctgtataatcagtttaaaattaactcttaactcttaattggtctttaaaattgtaaggacatagaaattattaacagccatttttttttccaccattaatttgtttatgatagtcggcaatgattgaattttgaatagttggtaataagtaatgtagacacagaagatatatgagaaaagtatttaataatttggtattcgcaaaaagtatgcgatgtatatcttgtaaacatgtacaattgtatgcctatttatgatacaaatctaagatattgtaatgagttagtgattgaggatgttgagtagagaaactcttgttttgatcaaacgcctgtaaaggctctcaactccttgttcgaggtcttcaatgcacaactccaagttttgaagctgcttttgtacattctcttctaggctgctatctgatttcttgactttcttagcagtgatgagcaagttcaatgctgcatcagcacttgtgaattcattcgattcattagcatcctctgcacacactcttttcgtgttcatcatcttggtaaccaatgaccagctgctgcttgactttggtccagagatgaatgaaagcaatga

SEQ ID NO: 231433 - DNA, 3508 bp, Cannabis indica
catgccattgctggaagacttataaataagtcaagttgttaacgtacaaggcgagacgcctcaacgagacacgttttacagcgtgtcttaattcacgtcagcgttgcgatttaaatgacagttgtgtgattttcaaataataactgtatttatttatgtggagcataattaaggcccacaattttgagaaaatattattgtgggatttgaatttgaatgtaattaactgtctacctatattactataaataggggcagattatactaaaaaggggacaaaaaatccttgagagaaaaaaaagtacactgattgtaaaagaaccctaattctgtatcagaaaaatctaaaaaagattgactcgtggactatacagagttaactgcaaaatcacgtaaagacctattatttttttggttatgttattctttcttaaatttctgataatttctgtgctaaacctatcacgaaaataagctcattatcgttaataaaaatctgcgttaacagatgtgtaggtttgtggaaagttggggcaaaattttaattagagaagaatggagactattgtgaagtgatatggataaaattggtagaatgattgaaaaaataagtaaacgtaataaactttgcaagagaagataaaaattaaaagtatcaatttaaaagaagtatattatgtaatttcctcaattttttcttttcttgaattacacccttcaattaaccactgtagttttgcaaaaaagagaacttgtatactgtataaatgatttacttcattagatgccgtaatttagccaaacaaaaaaagttaactacaattgtataaataaaaaaactcaaaaattgtcatatttttcaaacctttcaaaaaaatatcttatattttagtgtaatttaatttacaattaatagtaatctttctattaaatttttcattttatattgaggtatgaaaatttgttaaacaaataattgatcttacactgaaaaaaatttatggaaaattgtgaattagaaaataatcttcttgaagttacactaatttgtgaaattaatcatttaaaaaaaattagtgaaattgataaaagaatttcatgcacaaaaaaaaagttcatggaatattcaaacatctcgttgtcatgtttaataagtatggattatttcgagcaacacaagagtcacttcgacataatgcatttcaaaccacagatccacaaaaaaaagtaccgtctaatttaccattttgtccttgatactttttttttttccttttaatttctttcccttgtatgtgggtaggctagccataaatgcaatggggtcgtgtgagtagtaaataaatgttttttaatgatgtaatattttcccctttctattcaattattattcttgaaattaaaataaaatgtggagaaagaaaacaacgaaatcatgactaacaaaaaagaaaggaaaagagggtgagaaagagaaataaaataaaatatagctccttttctcttcgtatacatgtataagaagtacaagaacattaagagaagttctatacctcataaccctctttctctctctctctgtgtgtcagatcatagttgatcacaagtaaatctgatctctcttaacctaaaatggaaccttcatcaacgcccatgaactacactacttgcaaagatgatgatgatgatggtgatcatgatgaatgtgactcatgcgctactctctctcatcgtcctttgaaatatccatcttattattatagtaataattcttcttctcgccgaactccatctttctcatcaaattcttcctcctctcttggctcatcttcttcattctacaataatgactctcctctgagtccagccacgccgcttcgcatttcccgtggagtcccattttcttgggagcattttccaggaatccccaaaaaacaacattccaagaaaatcaagccttcttcttctacacaccaagaagatgatcatcactcttctcttcttcttcttcctctgccccctacgaccactaccagtaccaccaccaccaccaagaaagtgttcaagaagagtactactactattagtgttaataataacaagcagcccttgaaatgggatcccttcattgctgctctagttgaatgttccaaggatgaaaatgatgatcaccatgacaaccacggccatgatcatcaacccaagttttggaatattgctacagcaaaggtatcgaaaagcctaagtgacaggttcggtttaattaatatttacaataattcatcttgtaagtctacttgtgctgtggctgaatccatcagacatcttccaaggtccaccagaggcagttcgtacggtcatcatctaattaacagtcgtccccgtaactaactaattaaataaaatctatttatacctgcgatttcaacagccttcatcttaattatagggtatggtttctgtactaattaaattgttcattgtaaaaggttcattttatatatatattacgtctttttttcttcttcttgatctacattaaatatgatgagcagcgtaagttgggtacaaagatattgcccaaaacatatctttattaagtaaatgtttttatgaattaattagagaaatgatctctacatacagtactttagtctttatataattatttggttgtataaataaattcatatatatatatccgtatatatacgaccttttaatttatataacacaaaatactctttgctgtaatcatgtggcgttcaagagtaaaatttagacaacggccatgtgtggggagcaactaagaaacaataggaccacacattaataaataaaattgaagtaataattaaggatgtgatgaattattatatatagattctgaatttggcaaatatattttatatacatgtcaaattcagaagatatatagtatacttcctcttttatgttcccaatatccacatccccttttgctaggcaattcaattacgttctttcaaattcagtagatatacatatataaatgagaattgctagaagggatgtcactagactagcaccaatgtaattaagtatatataaaaaatttatttttatgaataatcttttgtaaaattttttttgcttatttattattattatttgataccttaaaatggccaatacaataatactataccaatatgatacttaataattagctagcaatttattatattatttactaaattaaaatttgtaaaactcgatattgaaatgaacttataacagtatgtcaccatttatactatttagcatgtcccttatatctacatatctattagaattaacttttagttcaaattatacatatataactttgtaattttttttttcactttgcgcactgcgtaataagaatttcctatgattctttacttttttttttttttatttattttctacaagctcaataagattgtattagtaatttttattgtttttttttgttcatatttgg

SEQ ID NO: 231434 - DNA, 1356 bp, Cannabis indica
acggtctttgacttaagtcatgagtattaaatataatcaacaaaaaattattttaaccaaagttatggtaatattgttctatttttataaaggctaattaggatttttgctctttgaagtttgatatgtatcaaattttgttccctgaacttttttagtcattaaaaattcttcctgaactattgagattgctagatttaaggatttttatccaatttcatttaattttacctaattcggtgattatccacgtactaaattatgcttcacagattttgatatctatcaaattatgctcctcaaacttcgacatgtacctaatcacgcctcctaaatttttatctatgttagacatcctttactaaaatttgataaaagtatttaataatctcaatatttcatggaaaatttttgaaagccttaaaagttcaaagagtatgatttgatatatgtcaaaatttgggcgaaaaaatcccttttataaatgtgaacaatatataatcctaaggcataaaaaatcaaatagtagcttatcttttatctcagaatgatttttaaaataataataatcaaccgatcaaattaattattaattttcttaaaaaataaaaatatatattataaaatgtgagtggatcaaaaacagatcaaagactttaattttatttgatctccacaaaagacttactgtatttttcctattaagttattattaaagagatcaatgactccaagactacgcatatttatcggtagaaaatttgggtttagtccaaatctaatctgattggtagatttctaagtttggttgataatcactattatgttctttggaattggaccagaatatttactgttggatagtgatgaatctttgagtcactaatggaacggaaaatgaatcatggattaaagagcaaacaaagacaaaggaaagaggaatgcagagaaaagattagagaaagactaagaggttgtttggctttgtttttcagttttcaaaattatgtttttaaaaagtgagaatagaaaatagtttttttatcattttaaaaattcaatgatgtttgagtcagtatttttaaaaattatttttagattattttttactaaaaaaaattcaatattatacaccataccatgacatgaacccatcctattccgaaccagacctgacttggacctggactcgacccgaatctggatagtggacccggggctaggtccgaggtcttgggtcgggtttgggttcgaggtctgagtccaggatcctagtccgttgttcggggttcaattcgggtccgtgttcgtgtccgggttcgggatctggtctgagttcgggctcgggttcaggtc

SEQ ID NO: 231435 - DNA, 1019 bp, Cannabis indica
atgtaccctatgtagtggttttaggatacctaatatatataatggtgagcactagactagttatagctcatgctctaaacatcctaagtcagtgcatgtctaatctaggcattgaacattggaaggtcctcaaatggttattaagatacttgaagggcacatgggattatggtctggcctttgaaaaagcaaaagacaaactggaattgaaagggttcgtggatgctgattttctaatagagatactagaagatcaaccatatcctacatgctcatgacaaatcaaaactgtatatgctagaaagtccagttacagtccgtggtttctctttccaccacggaaacagaatttatggctaccatagaaacttttaaggaaaatttatggctttgaggaattttatacgaattaaaacaactaaaaggaggagtgattgtgtactctgatagccagtcatccatccatctttgtaagaacccagtttatcattaaaagagcaaacacatagatataaaactatattggattagagaaaagatagaagaagggctagttgaattagaaaaggttaggtcaaaaaataatcatgatgatgttaggactaaggtcttaacagtcaacaagttcaagcattgcttggacttgatcaatctcaaaaattaacatactaagatacttggaacaccaaccattatggatgcattttttcttcattgccatcacttttaatttaaaggaactaggtggaatccgtggaatagtttctccaaatgaaaaggtctccgaaaagagtagtggaaagttaaatgtcgttcggaaaggagtttcggaagtctagcttgtccactctaaaagttttctcatggaaagctagatgtcgcctaaaaagaagttctataagtctagcgtgtccactctgaatggagtcttttagaaagctagacttctctagaaaggagttccgaaaggctagtcgttccatcccggaaggatgttctggatattctgctccagatgg

SEQ ID NO: 231436 - DNA, 698 bp, Cannabis indica
gctctccaaatattgtaaatcaagcttttttcctgaacttggacagcttagctctttcgatccacctcacaagctgattcaaagttatacattgagctctcattgttgttctgaatgattgctattttaataaagtttctatttttattaaaaaaattattgcaggcgtttgatgatcaagttgctgagatgatgatcgcaaaacagtaataaaagaattatatttacaattaacatgcattatcccattaattaagcattattcaaattgtaatgattaaattcagtttgatgtactaaaaaataatacattggctcacagaaaataatagcacataaacaaagttcaaataatcgtttactttagacattcttcattcttaagcacccatttcttggggatataatttgataatttttgttacagtttttggcgctctgaaatcacgaagttacagtttttgttgtgaattgtatttttttttttcccttattaataattctatttttaatatttaaatgcagaatagaaattaagcttattaattgcaagtagtttgaaataattttttattaattggaagaacaaaaattaggttaattatttaattataatatattatataattggataagtattttatgcatgcttttgaatttgaaagtggactaattcatataaaaaaacagttgaccca

SEQ ID NO: 231437 - DNA, 1716 bp, Cannabis indica
cctagagcctgacctcaaactaaaacatagacatcaaccctcgacctaaccccgttcccggccctgacccaaacccagaccccgaccccaactctagacctggatggaccccagacctagaccgcgacctcagactcaaattgggaaccaggccctgaacttggtcccacaccccagccctagacccagccccggaccttgaagtggacccagatcttggccccaatctggactcagtcccaaaccccagccccgaccccgaacctggaccctgaactctgaacttggactcagaccacgatctcggtcccaaacttgaaccttggactcgaaccatgatttcggtcctaaacccgaacccaaacttggatccccacccatgccgcgaccgtcatagagattttcgacatgattaggttaaataaacctaattcaaaaaagggaaaggtgagagacttttgggggcacgaattttgagagaaagagcaaccttggagactaccaccattgattttcaacgagtttttttcttccaacttttcttctatgttttcaattagttttatgcaattgtttagaatgacaattatgagctaaacttatatttaaggtttttaatggaatttgtctaatattttttatgatttatgattccaatataaaaattaaaaagtaaatattgattatgctataattgattagttacaggtctctatatacgaaatgaaagtattttatgtggcttgtagggttgttcatcaaactgcataaaccactagcaccgcaaaaaaatgtagtttaaaattctttccaatgcgatatcggtttgaattttttctaaactacgaggtgcggtttgcggttttgagttattaatatgcggttcaaaccgtaccgcaacacattataaaaatactaatttttatatttatttaggttcatatgtgaaggtccagcccaaaacccactaattattgtattattgaaacttgaaatttttttcatatttattttcaagccttatggtatttttgactagtgttgcttaagttttattgtatttgtaatagtttaattattttgtggtagttcaaactacagaaatcgcactacaccgcaccattttttgccgtgcggtttctgcagttttttacttttgcacaacaggtgcggattggaaaattaaaaaaaccgcatgtacggtttgattttgaaaaatagtcaaaaaccgcaccacctgcaccacaaacacccctagtgacttgtgtagcgtttaaattattacttattgatgattatatatgcatatgttataccttaaagatgtaggatagtatcatatagtttaagttttttatgtcttaaatcacaatagaaaataatttataaattgctatcacactagtttaaaagaagaagattagttgcattggtgaagtaaaaagtagaagcaaaggaaattaattttcctaatcttgtaaatcacttttatttgctttatttattttctttctcttaattgattacaatcaacattcaaattttgtttgcgaagaatttttttttattaattggtatttaactataatcatgatagaatcttaattttgcaaatttattaattgaatacgacatatatctttatatattaaaagtgcctatctaacgacatttcttggtttaacagaatatacttaaaaataaaaagaatattct

SEQ ID NO: 231438 - DNA, 976 bp, Cannabis indica
atttgacacatgttaaagttcgaaggacataattttgtagatatcaaagtctgtggagcatgatttagtacatggacaatcatcgaattagtaaaattgaataaaattggataaaaatctttaaatcaaacaatctcaatagttcagggagaatttttaacgactataaaagtttaggatgtatgatttggtacatgtaaagtttaggaggtaaaaatcttaattagcctaaaataaataaaagagaaactgaacgagaatttcggagtattttgtttaaatgagttaattttttatttatacaaatattgagtcatagattgagcattgctaggagacaccaaggtacatagtactattgtgaggtgtaatattttattggtgtaactcaatatcgagtctcacttgttttactttaataaatattatagctttattataaagttatatttcatcgtggtgctaggcactataagtgactcatagtaatgctctaaattaaaataagtaagacctgatattgaattgcaccaataacaatattacacaaaagaaataattaaaattaatggtaattaatagaaataatttaattaatttgaacattatataaataatattttataacagaataggaatataaattaacaaacaaaattatatgatttcaaaaaaacaaaagcatacaaacaaaattacattaatgataaatttaagtgtgaaaaaatgtgacaaaaaaaagccaacaattactttataaaaaatattacaaaaaaaaaaggaaattgagtaaaaaaaaactaataaattaataatttggtaaatatagatttttctttttcttttcaatatatattggagtgggagaatttgaaattttaattttgatataatgttcagtaataaaaaaaaatataattagataaataataatatactattaatttttgggattttttgaattttaataaaaaaa

SEQ ID NO: 231439 - DNA, 588 bp, Cannabis indica
tgagttcgggtttgggtttggattcagttctagttttaggttcgggtcctggttctcgtcccaattcatttttggttctagttcaagttttgggtccccaatttgggttggggtctgggtccaggttcgagtcgaattcttgatctgggttcgagttcaggtctaggttcgagttcaggtctgggtccaggtttgggtctaagtcccgggtcgaggtcggggtccgagtcagggtgcgggtctgggtctgagttagggtccgagtctgggtcctattttaggtctaggcccgtgtctaggtccaggtccaagtctcgttcccagcctaggtctatattcggttttagtttcaggtccatgtttagggtttagggttttaggttaacgtattaggaagtagggtttagggtttagggtttatgctttagggtctaagaattagggtttagggtttaggtttagggtttagggtttagggtttagggtttacgggtttaggggtttagggtttatgatttagtgtttagggttaatggttttgggattatgacttaaggtttagggttccgagtctgggttcgagtctag

SEQ ID NO: 231440 - DNA, 1122 bp, Cannabis indica
gaccaaaggtatgctttttatcaggtcagcatcccttggttcaaacatgtcttcaagaagctcaatatcccatcccacaccatcggttttcatcaggttgtggaccgaagcattcaatagattaggatgcgatgaaatgatgtaaggattgtcattacatggtaaccatgggtcatgagctacctggatgtcacgaccgtccccaacacaccacctaacaccttttcgaacaagttgttgggcttcccaaatactgcgccacacaaaactaggattgttccctagtgaagagctaaggtaggatccttgtgggaaatatcttgccttgaaaacttttgccactagcgagtcaggtcgcgagattaaacgccatccttgttttcccaaaagagccaagttaaaatcccgaaggttgcgaaaacccattccacctttgtctttgtggatacaaagcttatcccaagaacgccaatgaattcctttcccagagttaccagaggactgccaccaaaactttgccatcaccttctccatatcattagtgatgtctaccggaagaaggaaaacgctcatagcgtagctaggtaaagactgtgcaactgtcttgataagaacttcctttcccgcccttgaaagaaacttcgattcccacccttgaatacgcttgcgaactctttcctttaggaatcctagcacggccgttttgttacgagacatggtgctaggcaagcctaaatacaagctgttctctccagcgatggtcattcccaggaagttacttatgtcgtttcgagttgccaaatcagtatttgtactaaaaaagatggatgacttggagaaatttaccttctgacctgaagccgcttcaaatttctgtaacacttcttggattctagtagcctctgcgttagttgctttgcagtagaggtaactgtcatctgcaaataacatatgggatattcggggtgcaccattagcaactttacaaccatgaagcaatcctcttgattcaaagcgatgaattaaggcagtcaatccctcagcacacaaaatgaataagtatggagaaagagggtccccttgtcggataccacgtgagggtaaaattggacccatctcacg

SEQ ID NO: 231441 - DNA, 2018 bp, Cannabis indica
atgctaaaattggataatctaggttttatgtgaaacgaaagtatttgcataacctgtgtgacatatagattattgcttaaagctgattacaggttaatctaattcagagattgattagcttacatgtgatttagggcctaaaagatcttaaaagagttagattaatttgtttaatctgtcattcacatcaagaaaaatggtggtaattagcattaacaattgggtaaataaatcaaccagattctcttccctaatttaccatcttgattaaatctttttagtgttaattttattttcttgatattctttattttacttcaataatagaattattggtttgccaaatagaaccataaatttaatctagtgatattcagtccaagtccttgtggttcgacctcactcgtgtgagtttattacttgaactacgataagtgcacttgcgtattaaatttaacaataagtttttggcgccgttaccggggaatcgtttaaaaattggtattacataagattagattaaaatctactttggttaattctttctgctgattgctaacttgtttctctcaaattgtcttaatctatttcaagaattgaaggtgtatgcgacgtcaaggacaaagtataatactgtcgattgatcctgaaagtcggaggacctttagaagaaccaaaagaaacaaaaggcaagaaagaatttcagcaagagctgaaacagaagaagtcatggctgataatgctaatggcaaaaataatggcgacaacaacagtaataacggaggtgccgttgaagattaggcaaacggtcgtagtctgagagactacattctcccaacattgatgggggttcagtcttgtataagaccacctaccgtagaggccaataactttgagataaagccagccatactccaaatggtgcagtctacagtctggtttggtggactcccctctgaagaccctaatttgcacttgtccaatttcatggagttatttcagactttcaaggtaaacagagtcagtgatgatgccatccgtttgagactattcccattctcgctgagggagcgagccaaaagctggttgatctccttgccaccaaactttattgcaacatggactattgcgaggagaaattaatattttctattagctagacaatgaatctctccatgaggcttgggagagcttcacggatctaatcaggaaatgtccacatcatgggattgaaaagtggatgttggttcataacttctacaacaggatgattggtaacaccagaacgattatagatgccgcaactggtggggcatttatgagaaaaagtgtagaagaggcctatgatttgctcgaagaaatggccatgaataattaacaatggcaaactgaaagaaggcaaacgaagaaggtagctggtatgcacgaggtagatgccatcaccaaattgacagcccaagtagaggccctaacaatgctgatagttgttcaggcaaaacaggctcaagttatttgtgagctctgtgggggtcctcacacctaggacgaatgcccagtagatgtgaatagttttccgattgatgaagcaaaagccattgggaattattctcaaaacaataactaggggtacaatcaaggagggagtcgatgaaatagttgttctaatcagcaaccatatgggttctatcagcagagaaattagtcccaacagaatcaacaacaaccacagcaacaaggttctagtggagggtctagtctacaaacagatttgttgctacagtttattacagggactagaccatttattaaagccttagagaatcagatggggtaattggcaactcagatagctacccatcctcaagggaacttgcctagcacaacagaggtgaacccaaaagaaaactgtaaggcaatcaccttgagaagtgggaagaattatgaaggagacaacaagtggaagaagaggttaaggattcaaccaccaccaacatcagtataaaagaagactcactact

SEQ ID NO: 231442 - DNA, 675 bp, Cannabis indica
tggtgttctaagaaacaaaactaccatctctcgctcctctatagaagctgaattttgaagtcttgccagtgtaatgaagtcacctagattcaatcactcttacttgagttgtgtttcccttggccaatcctcctatcatttggtatcacaatcaaaggacaatgattatggttgcgctaatcctgttttcccacacgtaccaaacataatgaaatcgaatggtattttgttgaaaacaaagtgtttcaaggtcttataaatgttcaacatgttcttgccttagatcaagttgctgactgtttaataactaagccaatttttagtactcatttttcctatctcagggacacactaattgtgttttcctatgccacacttagtttgaagggggtgttaggagtccaagtgactcttcccttaatcaattagaagtttgttagaaattttgctaattggtaaataataatagaaaaaattatatgcgcttacatatagacagaacgaatgatgatctaaacttcaataatcaaattcttgtttaaatataatttttcttttaacaattgttgaaacataattgatgaaaattagatatataattataacctacatgttttgacaagggttacatgccttcggcacgtcctccacaccttatatacatgtatatattct

SEQ ID NO: 231443 - DNA, 1220 bp, Cannabis indica
gctatcactaattttctatataaattaataattcaaagacatgtttacaaattacagccactgtgaactttgacaaaactaattgactttgaagactttgactctccttttcaaataataatttaaaaaatatatattttcatattcagtgcgaactcaaaaatacatgcaagatatttaatagaaataatgagtaatacagttgagaaaattgacccctgttgaatatattgattgattttgtagtcatataatgcattgagtttttaatctttgatgacaatgcatgagagtttttgggtaaatggctaatctttttaaaaacagtttttttttttttgtcttcaaaaaaaaagttttttttctttgttactgtcaatctcttattataatcttttagtcaatttttgtacccaaaacacatgctaaatatttttaaattttttttatagcagtgttcgttaagcttacaacatcgtccctgtaaattttaaaaattttcgaatagtactttactgtaccgaaatacgtttgaagttttatgaatgcgcgtggtaaactagaatatcaggaactctgtttcaacattgaaaactattcagaatttttcaaaaatttacaaggatattgatactgtaactataacgaataccactatgaaaaagaaattaaaaaaaaacatattttgatatgtgattttgaacatagagattaaataagagattataattagaactcatcttatagaaatcatacctaaatgtcattcaaatcaaagattatctattaataatgcaagcaaactctcttattaaaaaaatcgatctcaagtggatataaaaatataaaaataagaattagaatgagaataggaataggaataaaaatacaatggaatagaatcaaattttaaaatgcataaaaaaaattaataaaaaattattaatttttttttctcatcttacattgaaatgatcttttttttctatttgaaaatgggatagtcattccatcatttagaaaatcattctattacaataacattcccatacttttaaaattaaaattcattacttccaaccaaacgtcacctaaatgtaaatacagtagaacctctatttaagaataatctattcaataatagcctctaatttgttataaaaatatcatgtcccgattaagtcaattataaataacataatctctaaattagccatatc

SEQ ID NO: 231444 - DNA, 711 bp, Cannabis indica
acaatcttaaaagcattggattactgtattacattccattgaatccttcaaagtcaaaatacatgttgggacccacgaacgaagagcataaagtataaggaaataaaatttaccttcagcaatatcatgcacaatagctatctttatacacctgtttaaaaaagtacacaaaaagaagaactaaatgaatcagaacaaaactaaatagttgaatatgtacttcttaatatctaaactatgaaaacagtcatgaaaattataatatagatggtaggtgaagcatgacaatgtccaaaaaaatcataagcttctaaaagcttaatgatagattgattatgtaaacgaattagtgaaaacaaacagtcacagaataaagaagattatgtgggtatgagaaaattcccacctttctctgtttacaccaggaaggtcacgaacaatcaaagccatcagagccatccggtacatatgatcggaaattgactcgggattctgtattccatggttgatccatccttttctctttgtggactttcgggaaaaaaaaaaaaacaaacattaatactaagcccattttcaacttctcatagataacaagtagattcttcaaattcacatttgtttctatttatttttcttttcccacaaatgtattcaccaccttctcactaaagcttccacaattgcagtatgtaaaaatactgaaaacaa

SEQ ID NO: 231445 - DNA, 1327 bp, Cannabis indica
tttccgccattaatggcgaatattgctactgtgggtaatggcggctcaaatcaacagcaaggaactcaatctgcttcaagaactcgaaatcatcaagaagatggcacattctacttcaatcacactgtctcaataaagcttaacgatcacaattacttactctggaaacaacaaatcttggcttcaattcgtggaaatcgtcttcttcagttcatccaagacactgatccccccctcagttcctcactgatgcagatcacatcgcacatagatacaacccagaatacatagattgggatgttcaagaccaactcattgtgtcttggcttctcttttctatgacagagagtttattaactcaaatggtgggatgcaacttagctcgccagatctggaaagctcttgagcaacactacaccttcaaagtctcctccaagattctggagtttagaaataagccacagaaactcaagaaaggcaactcgaatctcaatgattaccttcttaaagttaaacaacacgttgatctccttgcatctgtaggtgaagttctctccgatcgtgaccatattgcagcaattttcaagggattgccaagtgagtacgacactttcatcatctccaccaacactctaatggaaggatatttggttggtgagattgaagctcttcttctggcctctgaatctcgaattgaaaaagaagatcaagaatctgaatctagtgtgcatatggctaccactgatcaagatcctactatggaagccttctttaccaacacgtatcgaaatcggaaaataccctgcccaaaatcgaggtcagtaccccctcctggttttccatttccatcttttcctccttactacaattacaggggcaatcctcgaggtcaatatcccccaccacatggccaatccaacaatatgcaaactaatacactgggaagaggaagaggaagcagatttcccactccatcaaatcgaattcagtgccaattatgtcacaaattgggacactctgttattgactgcttttaccgatttgacaagagttttacaggagtttttccacctacagacacctctcaaacacaagccaatgttgctcaaaccagtcaagcttcagatgataactggtatccaaattctggagcaacaacacactgcactccaaatggtcaaaacctgatgacaccagcagattgtgagggaccatatcaactatatgttggaaatggcactggccttcctgtttctcaaatgggtaactccttcatactctcagatacatgttcaaaacctctagctttaaatcatttacttcatgt

SEQ ID NO: 231446 - DNA, 691 bp, Cannabis indica
aaccaagaatttcagttatataggcacactttatatagaatagatatatagtttaggaattgataaaaaaaaatatttttttatcttaatttcaaaaatattagaaaatggtgaaagaagaaggtgtgaaatttctaaagctgcaacaaagaacaacaaagaagagtttttaagcagagagatagtgtagtttatttcttttatttcaaatgttataattttataaatacaaaatatttattcggtttacattttatttaatgtttgattatttgtttgctaatagttagtgcatgtcgtcatacataaaatctcacacagtttactttttgataatcatacatctcatattagaaacatgattatttaagattaatctatatattttatgtgtattgtatttagtgaaatcaattacataaaatactaagttgaattaaatagtttaataacttggtagtccacattaagtgactttctccaacagttagtcacatagttaactaatattcttcaaaatatggtattttcgaaaacattatagtactatggtattaattaaattattttcacacctatattatagtaaattaattaatgtattacaactggttaattaatgattaaaactattttggaaaaattttaataaatgacaaacacattttaaaatagtgagtgggagagggtt

SEQ ID NO: 231447 - DNA, 1043 bp, Cannabis indica
ctttgcccattccctattttccatctcagtccttttaacaatagctcttttccatcacagatactctgccaagtaagagaaggcaataccccattttttgctgaaaggaaattaccatccttaaagtacctagcttgaagaactctagctaaaagagaagagggatcattgaaaattcgccaagcctgcttagcgagtagagcttggttaaaatggatgaaggaacgaaaacccataccgccatcaactttagaagaacataagaatttccacttcttccaatgaatcttcgaatggtttgcattagaaccccaccaaaagttagccatcattgattccaattgattacaaaacttcttgggaagactaaagcaactcatcgcatatgtcggaatagattgaaccactgcttttaagagaatttcccgacctccaatagaaaaaagcttggcatgccatgtgttcattaatttccatatacggtctttgattccactaaaaagctcctttttatctcgaccagcatatgatggaagacccaaatatttttcatgtaaatcacaaataggcatacccaaaacatggttgaaacgatctttagtagcttgacttgtgttaggtgaaaaagacatgaccgttttctccatgttgagaagttgccccgatgctcggtgataaagatcaagaactcttcgaatggcttgacaagattctttagtgacatggcaaaataacaaactatcatctacaaatagaagatgagacactgcaggagcacgtcgagcaattgataatccctttagctgacccaaacttttctcatttttcattaaagatgaaagaccttctgagcaaatcaaaaataaataaggtgatagtggatcaccttgtctaagacccctctgtggaacaactgaacctttgatagccccattgatattgaaagaaagcgtggctgttgtaacacatttcataacaagattcacccaattaatatcaaaccccatcttcgtcataacctggcgcagaaaaaaccactctac

SEQ ID NO: 231448 - DNA, 808 bp, Cannabis indica
gttgcagccttaaattggatagagtcttgtcggccataccttgggagagggtctacccaaggcccgccagccctgagtctaattctcgtacatggtccgcaagccctaagccgagcagagcctgaccgcccatacttctctgcctggctagtggagtttgtgcgtcaacatggagtagatcacaccaattgttggactttggtggaagtgattaacttcacttctcaaattgttgttttgggtgtttccacccgctctcggtcctcatcaattgaaaattgatcttcgcgtgactcgctccccttagggcggagttctcttctctggccagtcatgggtactactggaggagtttgcccagccatggatactactggaggagtctggtcggccataggtactgctggaggagtctagccagccatggggactcctactagtggttggtcggccataggatggacaaagggggttgttgttgagcttaagatccctggatggccccccatgttgctggttgctgggatcttgcagtttttcgccatttcacctttgaggaaaggtctatcctccttttagcaagggaagatctaccctagttcctcaagaacttgttgatctgcatatcgatagatcctccctaatctatcaacaattctccctcgaagtggatctctgattcaatcctagcctcttctactggttctctagttgaaccaccttattagatcgctggcctctctgttgcagcaatctaactctacctggtgagactaaaggatgttctctttgtcatccatccatctca

SEQ ID NO: 231449 - DNA, 829 bp, Cannabis indica
tttacttcaattatattatttatataatcatacataaaatactaaataatacatattcataatatacttatcattcaacttagttcaatgtaaatgttcaatatatttaaaaattttaaatattaaatgaattatttattttaattacactatctatataaatcatgcaagaactaattagtagtacatatatataattggaaagagtaaagacattattacattggaaagtacatacatatgtatccacaaaagtgcataattgaaacgattattttgaattggttagttttttatattaaattacactactaaaaataattatttttagtgacaacataaattttttgtgattaaatgtgacttttagtcacaacaaaaaattacttgtgacgaaaacataatatttagataaaagttatcactaatttagtttaagtcacaacaagtattgtaactaaaaacacatttagttacaataatctgtgattttttgtgactaatacttttagccacgaattttttagtcacaacataggaatagtgatttgtaattagtcacaactattttacttttagccacaaattttgttgtgactaaaaataaaattttttgtagtgttatttaatatttattatttttttcacataactaataacaaaataaaaacaaattattgttgccaacaacaaatcaaaataaataaaacaaaaaacaacaaacacaagtgaagaaaaaaaattatatgtataaataaatatttagttttgtaattatactgtgtgcacttgcatagctagcaaattaattaccattgtgtgcacttac

SEQ ID NO: 231450 - DNA, 1830 bp, Cannabis indica
aagaacccgtgagtctttacagactattttaaacgctttaatgttgaggtaataaaagtagagaaggctctcgagtcttcactagtatgtatgttgataacacgtgtcctaccaagaaccgatttctggaaggaactgcaagctcgaagacctgaatcgttggtcgagttctttgccatgggagacccgcataagaggattgagaattctctggctgaattagagaagggcaaagataagcgtaagtcaccagtaccgcgatcacgatctcacagtcctagaggaaagaattccagaggaagaagtccgagaagatgcagtccacaaagacagcgaagtccgaagttagccaagtcctctccaaagaaggaatcctcttcgaaaaggaaaggtggtctgcgctttgtaaactatacataattggcagtccctcgggaccacatctatgccattgaagaaaagaccgggtctttaaaaaacctcccccaatcaggggaaaccgcgataagagagaccctaaaaaattctgtaagtaccacaaagatattggtcacactactctggaatgttggtttttgtaggacgagatcgaagaactgatcaggagaggaaaattcagcaaatacaagaagaatgaggaaagtcatccccgagcagatgacaaagaagaaaatcagaatgcgagtggttcaagaactcctcgtaacatcttgacttcataggcgaccccatatcgcaggtgattccaggaagtcgcaggagcgatatgcgagagaagccaaagaaaagccgctcaccaatgtgaacaacttgagcgagcgagtagagaagctgttcaaaagggagtgtgatgacgtcacattcatggaaagtgatgcgagatgggtccaccacccacattctgatgcgctggttatcgtcgccaatattggaagagataatgtccaccgcatacttgtagacaatggaagttctttgaatctcttgaacttccaagccttcaaacaaatggggttgcatgagaaggatctgcgacctgtcacatcgagtatatacggttttatgactacggtctagagtttaggatcttggacctagtatttggggtttgaggttttaagtcttgggtttggtgtttggttttagggtttgggggtttttgggtttggggttttagggtttgggtttggggtttgggaattggagtttggtgtttttgtgtttggggtttttaggttagctgtttttgggattagggtttggggtttagggtttgatgtttggggttttggggtttggggttttgaggttttacggtttaggggttttggggtttgggggttggggtatgggatttgggttttaggttttggggtttttgcagttttggcatttggggttttagggttttaggaatcgctatggtaatgggctggggaatgggagtaggaatgggaattggaatggcaatgggcatgggtcggggaatgggaatgggaatggggattgggaataggaatgggaattggaatggcaatggggatgggtcgaggaatgggaatgggaatggggatagggaatgggaataggaataggaatgggccagggaatgggaatgggaacgagaatggaaatggaaatgggaatcggctgaggaatcagaatgggaatggaaatcagttggagaatcagaatgggaatggaaataggaatgggaatgggaataggaatgggaatgggttggggaatgggaatgcgaatacaaataggaatgagaatgagaatgagaatgggaatgggtcaggaatgggaatgggaatgggtcgggga

SEQ ID NO: 231451 - DNA, 1305 bp, Cannabis indica
taaaataattcccaacagtgacggagaaatcggggcgttacaatacagttggttcagggtggcatgacagtgattgagtatgccactaagttcaattggttggccaagtttgtgtctgatgaggtggctactgaagcctcgagaaagacaaagtttatttgggattctgaagaacacatagtccaagatgttattgtgacggctaagcaaccaggggtttttgtagtatgctcaaataatagttgacacttttcgttgaaggaattaaggattgaattcaaaagaagagtaacattagaagagattcgtggaagctaccttctggtactggttcaagtaggggtattaaccctattgaccgaaagaggaagccaaatgatccacccgttacgggcccgaacaagaaattttaaggtaatcaaggtttccatcgaggtacaaaatgagaattggcaaccctattctgagtgcccaaggtgtagaagacgccatttgggcgaatgccaacctcgagcgtgcttctaatgtggggtagtatgctatctaaagaggaactacccacagttacaaatactagatacgaagaaagatgatactttggttcttgctttggtgttttctttgacccaaacagatgttaacgctggcccttccactgtcacaggtgagatttctattgatttcactatgtttactgttttgattgattcttgtgctatgcattcatatgtgtcaagtagagtaattgatagtttgactaggccatgcgatgacaagtgggtttggtacgttgtcacctattggagaacaattatctctagctggtgggttagatctcttcccgcgtgtgtggaaaatggagaattgtcaatggatctgattgagttaaacttataagattttgatgtgatcctgtgaatgaattggttagcaaagtataatgttaccactgattgcaagaagaagatgacgacatttgaaccagaaggtgagaatccgtttcgtgcttctgagaaaagttcatggattccaagtttcaatgatatcaatatttaaggcaagagatttgttacgaggggaatatatcagttatttagctataatgtagtggatactacaaggaagcagggccgactctgagaatatatgggcctaaggcgaattaaatttaggggccctcagaaatatatattaaaaaaatttaaaaagagtgttatggggattcgaactgtaacgtccccgcttcaagcctccattgggcccttacacccacggactgaatggctcttatacacgagtacgtca

SEQ ID NO: 231452 - DNA, 873 bp, Cannabis indica
aaaaaaaaaatcttattgtatttttttcctatttttgtgggcttccttcacctataaaagaagagctcccttagcacatttttcacattcaaaaaactagttacaaggtcataatttctctctctagattctctctctagatattagagcttctgacacttagtctttttcagtaattaccatctcgtgataaataaaaactcgaagtagacttagcttcattactgtcgtgatatagggagtgaactaccataaattttttgtgtctctcttataaatacttaactacttatcattcttgccaatctagcgaatgtgtgtggcttagaagtttaatcaagatttctaagtcaacatcgataattactcgcaatattatagggtaccaaaaggatctcacaatatttattaaaatagatttcgttgtatcaagaaaggcacacctcgcatatttaatgaaaccacaatatcaataaaaaaaggcgcgaacacacacacacacacaccaattaacggaactaatggtcaagcattcaaaatgcaatcatggtagacattacacatattttataaccgatgtaattaattcaattaataagcctattattattattattattattttgtaacagtttcattatgaccattatttgcactagagatctcttttcaatcgtggattaggcaagctgagctcgaacctcttgttgaactactacatttttatgtcttttctatattttttatagggtaaatactattttggaccttttgttttgtaaaaattattaattggaccatctgttttgttaaatgacaaaatagaccatatattttctaaaatagtaaaaataggatcctgagcttaatttt

SEQ ID NO: 231453 - DNA, 2052 bp, Cannabis indica
cattttttaacatcattcagggttgtttttaatcacgttatgttgtattggagaaaaacttagagctcttcggaaggagccatggcactttcaagatcatcatattgtcttgtatacacctactgctctgcaaaatgtcacccctgaatctacggttttctcacctttttgggttcaggcatataggctccctttcttaagtaaaacacgatccttggctaaatctttgggcaatattattggtgaatttcttgaagtccatgaagattcttgttatgaaggttggggtccttttcttcagtttcgagttcgcatggatattaggaaaccattgctaagaggatgtatgattactctgtcaaaagttagagatgaattttggatggaatttcggtatgaacgtcttcctgaatattgtatggagtgtggcataatcgatcattcttttaacaagtgccatgttcatcttgaaaatatggacaatggaattgaatccgaacttacttaggcccaagtttaaagggatctgcccttccatcatctaactacgacagatatcgaactgatttttcgaaaggacatgcctggccacttatcactcatttggccaggaacactctaactgctacattgccacaacttaatgcaagacctctcccaagcccaacaactctattatttggggaatcctctactgagaatgtctctcgtggttctcggactgaatctataatggtcgagactcccactccttcgaatactacaattgcaacaacatcaaccactccttcgactgcacaaatagatcgttcagttaaaaaagatcccccaacaattcacttggctgatgtttataccccagacattggagattcctatatatctcatccatttgcaacttatccacctgatccatcatcaataaccaccacctttgggtctcactaaattttacccatctctattgtggcttattcaacaatgactgctcctattactgctacttcttttcaatatggaagtatgtcaagttcagcatagttggaaaattaagagaacctacacccaaatcaccaattcaagcgccattttgacaatatctccttacggcaaacactcaaatgttgtcgtgctactaatccttccataacgtttgtggaagctacccaaaaccagaatgtttctgctgagatcttggattcatctggttgtgaagacgatccagcggtgattgctatgcatcccactcctcatcgtgaaattgtcagttggaatgcacggggtttggggaatttgagtacattctgtcgtctctgttcgcttgttcgtgagcaaactccccaagttttgtttcctatggaaacaaaacaactgctggtgtacttaatcgttttaagcaaactttaaatttcaataacagtttagaagttcctcgtgtgggtatgaaaggggggctgatgttgttatggcatgataatattgatgtaactctcttgtctatgaatacaaatcattttgactattatatatcttttaatgatggcacgcgatggcatttttctgctctttatggtttctcggaagcttcaaataaaaaacatacttgggaattgattaaaagattggctgatgttaatccacttgacccatggctgattataggtgattttaatgagattttttcacaagaacacaaaagtggtggccctcttcaaagtgataaccaaatgcaaggcttttgaactatcatcgatcgatgcttcctgactgaaatgactcatgaaggatctgattttacttggacaaaaaataggaaaaatccaaatgcattacgtgaacgacttgactggtgctttactaacaatatttggaatcatactttggttctccctaaagtttcacacttggattactacggttcagaccatagagccattcttgcaaatataatttttgactcaaactctaatcctgaacgtcgacgctctcgatttcgttttgaaaaattatggttgaaagaacaagactatgctgacattatttcaagttgct

SEQ ID NO: 231454 - DNA, 1663 bp, Cannabis indica
atattttatataattcataaaaaagcttttcatcaaaatcctctcttattctaattttcttttcttttttaaacatacttagtattatcattaacatttattttaattatttaatctaattaatattttttgacatctgtattacaggtgttactttttcacttcaacacttataccaccattccgtctctacctattttctttaatataattatacatttataaattttattgttattattattattttaattaaactaattataaaaaataacaaattataaagacaaataaataaattataaattaataattttatttgaatttaatattttatataattcataaaaagcttcttaacaaaatgttcctcttattctaattttcttttctttttaaaaaatacttagtattatcattagtatttgttttacatctgtattacatgtgttgtttttttacttcaacacttatactaccattccacttctacccatgagaaaagcatgcatttcaaagaaaacataaaacaaagttaagagagcagaatattggcttcttcaccatttttctttttagttggtaagattttgatgttttatacattcatgttcttccttcaaactcaaattttcttttgcttatcttcttcccctttcaaattcatactttttttgtcactttatacaaattctactttttatttatgtcttctcaaactcacaccttttcttttcatttttcttttgacaatctacttcattctttcatttgtcttcaaactattttttctattattttcctttctattatttatgttcttcttttatcaatcatatataatttattattttctattaatatataactattattttctaattatagatataatgaaaaaacagttaacaccttttaacaaaataactaatggaccacaacgatggacaactagggttgttgtctctaaaaaatttactgaacgttgctcacaacatacttcaaatagacaccagcacatggtcctatctgattcagaggtattcttttataattttttttattgttcatataactttgatctcatcaagttttatgtgttttacttttctcttaaattagaatcagtaaattattatagctaattaaatactggtagccttaaataaaataaaattaagtatatcactagaatttttttttaagcagcgctactcagtccaagcaacactctatgaagatagtattgacttgttcagagataaactcaaattacacaggacttactatatatcaaatgcatatgtcaagcatgcaccaaagagtcatactctaacaaacaatgtatttcaatggacaatcaacagcagcaccctaattgaagaagcaaaagaaacttaagctgttattactattcctcaatgctcacttgtccctttctcagagttacaaaattacgtcaagactaatacagaaatcggtatgttcttattatatacaattagcacaaaaaaattattgatcataatgtatattttttatctccataaatttaaaatatatttcaaatcttttgggaatagttgttgctattaaggacccaagagatatacaaacaatacatggtccaacaaaactccaagagatcacaatagttaataca

SEQ ID NO: 231455 - DNA, 1200 bp, Cannabis indica
ttttttttttcttttttctaaagctaatttctttagtacatgtataactttggtgtgttctcttgtgctattatactaaattattataaggttttaaagaagggaaggtaggatgctgtggaagtggtccctacagaggaaattcgagctgtggaagtaagagaggagagaaaaaatatgaactatgtgagaatgtcaaagactatgtgttctttgacaatggtcatcccacagaaaaactatacaatcaacttgccacagaagcatggagtggaaagcctaataatccagggacttacaatctcgaagcattatttcaatccaactaaaattgggagaaacattctctaattttaaatgtctctttcagtcgtttttaggtgttctattgtattctctgtccctctctctgtttacatgttacttttgtcatcttctatccttgtaatgatgtttattctttgtaattatcttatgtttctaagttttattgacttgaaaaagccaaaatatctcatccctctaaacttatcatgttaactgaagtgtatattttgactgggacttggtctgtcaaatgaactttatttcgttatactttctttcttattcgaaaagttataaaaatggggacaaattgccaattataagataaatatgcctatatagtataaacccaatgcaccttaattcataacactattttttgtgtagttttaaaatgtatgtcacatttatatttttatcattatttaataaactttattcatatcacaccacagataaatattatattttaataactgcgtaagacaaaaaaaaaaaagacacatacaaatgaaaattttgtgttaccagtaaaaatataatatttttattttctaaatttagtatataatgtgtaaaaatctgttatcttattagaatattactattaattgtgttttaatatttatttagtaatgtgaaaattacatattttattgatttttatataattaatgcaaaaatatagttgttttctttcccagaaaatttataacatgagaagaattcaaaattaaaaaattaaaaaacatatcaaatgtaatataaggtaactagttatacttctgattacctttaggccaatcagttactttttttcacattttttttcaattttttttcttttacaaaataattttttttttcgaaaat

SEQ ID NO: 231456 - DNA, 1290 bp, Cannabis indica
ggttgcactgcctatgctacatcaggcaagacaagctgcaaccagagcccttaaatgcttattcttggctaccctgatggaatcaagggctacaaactttggtgtttggaggaaggatacaagaagtgtataataagcagagatgtcacctttagagaagatgaaatgccactgaaaactaccagagaaatccctataaacccagatgctgtccctaggagtgttcaagtggagcttgaacaaagaactgagtctctgaaccaaactcccacagatcagagaaaagaaactgagactgccagcaaccttgatgactaccaacttgccagggatagaactaggagagaaatcagggcacctgagaagtttggctatgctaatttttcagcatatgcactgtctgttacagatgaagttgacaacacagtgcccaaatcttatcaagaagcagtgaatggcaaagatggcaagaagtggctgcaggccattgatgaggaaaaacaatcactgatcaagaacaagacatggagaatagttagaagaccacctggacagaggttaattagatgcaaaatggatctttagggtcaaagatggcatccctagatttgaacaggtcaggtacaaagccagattggtagcaaaaggattcactcagaaggagggtattgactacactgacatattctcacctgtagtaaagcaagcatccattagaatcataatggccaaggctgcagaacttgatcttgaggtggatcaaatggatgttaaaacagcctttctccatggcagtctagatgaagatatctacatgaccattcctgagggttttgaaagccatgaccctaaagaagtatgcctgctgcagaaatccttgtatggatttaaacaagctccaaggcaatggaacttgaggttcaatgaaacaatggagaaaccggggtatacaagaagcaactatgattactgtgtctacacaaatggacacctatacctgctattgtatgttgatgacatacttattgtgggccaagacagaacagaaattgacaatctaaaagcaaaactcaatgttgagtttgacatgaaagatctgggggaagccaagaagatactaggcattgatatacaaagacaaagaccaaatacaatcactctatctcagaaagaatatctggaaaaggtgattgagaagtatggaatgagtgattctaaacctgtacagacccctctagccccacatttcaaactgaccaaagaccaatctcccacaactgatgaagaaag

SEQ ID NO: 231457 - DNA, 840 bp, Cannabis indica
tctaattgagataatttgggcttagttccaatagcccgaattataaactcatacctgaattataaactactcataagatcataggaaatttaatattgaagagtaaattaaagtcatttggaattgcattgatcatatcaggtttttagtctaaagagtatatatgtatataattaaatagtttatgtatataaatcattgtgttttcagcaaaacacaatcaccctgaaatcctttcttaccattccagattcaagaatttcattagacaacatggcaatgagtgaaaatccattccagtatattcttcacgagcaaacccctttgtaagcgtcgttaatgaatcgtttctcaattttgtttctgactttgattttgatcctgattataatttgcattatttgcatctaattcacaattcgctcttgtatttctccaaaagaacacaacgattgaccttgaaatcaaaataaaatgtaacgaaatcaaatataatgcattgtaaaatgaataatagtgcaaatggaacttaccttctattgtaacacccaacctcattattgaaaatcaatagggtggtgcaccagcaaatttgatgttgtctgattggatttaaattattggcttcatcaatttgagcaaactcactttcccaaccatttttttctagtcgaacactctaaagaatcaatagtcttccagcaaaaagaaaaagaaaaaaatcgtaagagatgtcgctgagaaaaattgtgagagaggtgaggcttaaaaaaacccaaattctaaatcaataatcttaaaaaaaataaatcacaacagatggttgagagaaaatcgtga

SEQ ID NO: 231458 - DNA, 1094 bp, Cannabis indica
attttatattctgcctgttcagtttttatattttattatatacaactgacatttgcaaaaacacgatttttcacatatcatctaatttattaattggagtagaacattttcctcacaagaaaaaaaaattaaatcttcttgaggttcatgaagtatcttcctttatctggtggagcaattaagataaaaggtaaatagttttgactataagatgttgtattattcttttaagtaaagatttattaagattattgttaacatccaaatagcttatctttaatgtattttttattttggtttccaagaagttgggagattttgatatagcatattctattgtatgcacttattgaacttatcacatgttcttctaaaagaatgataatggtataaaccagaccttgacatgtatgtttttattactcttatttcgttttgtttttatttatttttaagacacattcataaaaggatatgaaatttttatagtagacattttggtatttaaaaaataaatttagtctaatttttttttaatgttcgcatatattattgctacttaagattatttgtaaatttttaaaaaaaatcttaatactctacaatatcgaaaataaaatttaaacagttacttattatgcgtataaaaaaataatcgtgcgtgcaataaaatatataaatcttatttttggtattataaattaaaatttttaaaaatttataaataattctaaataactataacgtacacaatcattaaaagaattgaactaaaaaactatcttgtatgccaaaacaactagagaatctactaaaataacccatttaagaagtatactgtaaatttactcaaaaacatatatattttcttttatatataactaaaaaaatatatatcttatggtcttatagcacgaactacaagcttttttttttccattccctcttgattgttattagttaatgttagactataatatagtatatgtaatatagcatatacatacgatatgaaatgcagaacataaactgtaaccatatcgataatatatgcaatgatagatcgatatacctccagccattgatctttgagc

SEQ ID NO: 231459 - DNA, 1403 bp, Cannabis indica
ttttactaaaattataaaaaattcttaaatttaataattttaataggtcataaatttttttaagattctatacaagttaaagttcatgaaaaaaaaaaaattaggagccactttcattcttttcatgagtttggttcccttctctcccaagttaagcttcacttcactccttcttctatacaatattgtttagtaaagctcccaccactgtgcgatcatggcctccgtcttctccttccttcttctcttcttccacttctcttcatttcaaggtaattttcatgcgaatcactcaaatgataacagagtttcatttattgaatatttttacttatcaattttcaacaaatttcagtgttcgccgccgaaaaagtcgtaatcgaagaaggttacacagtaaagacggtgatcgacggccacaagctcgggatcagtccttactctgtcatccttcgtcctggatcgtccgatttggttgtcctcgattctactggtagttctttctacaccgtaccgtttccgatctctaatggtatgttattaacccatttcaccaccactaatgtctttaaaagcttgtatattttaggaaatgggtttttagggtttactggtttaagtttcaaggttctgttattttgttcaccagataatgttgtcaaacggttttctggaaccggtgaagctgggtatgaagatggtgaaccgggcatggcccaatttagtaagcctcggagttttgcgatagatttgaaagggaatgtttatgttgctgataagagcaacaatgtgattagaaagatcactgattcaggttcagaaaaatttcatgtatttcagtttttatcattatttgttgaatgaatggttttgatgggtttgatttctgtataattttgtgcaggtgtgactacaattgctggtctgaataagaaagtgggccataaggatggaccagtatcaaatgcaactttctcaagtgattttgagcttgtttttgtgccagagatttgtgctttactgatttctgatcatgggaatcaactagtgcggcagattgatctcaaggccgaggattgccggagggattccgggtctggttccggttctggtgaggctttttttattgttaaaagtggctattggctgttgtttcatgcatgaattttaattccaaaatggtcaatttggtgggggaaaacatgtgttcttactcattgatactataagaaatgaatttgccaaaatttcattttgcaagtgtaatttacagtgtgttcaagcgactataaaaccagctcagagtgaaagatggtcatttgaacctatcgaaagatagcttcatggtcgttacttatacaaacaatagtattttaagcttgtatattgctggtggatttctt

SEQ ID NO: 231460 - DNA, 827 bp, Cannabis indica
gtcttatttagtagtaggtaaatcagacttgtgagccatcttcggtcttaataaataaagtggcacgtgccccaggcgcatgggcagcatttatgatcgtcatcattgatttttatttacttttgcaggcaatgattcgtttcttgtccattgacagactcttccattaatgctggtgtcaaagaggtactcaaatgtttcaaccgccctttcttctcttcatacccgttcatcccatccgttggatcataaaatttgaatcgttacgaatcttcgtcgtacgatggtgcctgattaacactgccttgcatccctaatggcctataaaagccaacacttttctctactgggtcattttcaccactttgtaatttttagtctatccaacccattcgacaaaattctagacacctctgatttccttctgctcttcctccgccgctgtcagacaaaatattatcaccgagcatcatcagcctcttcctcactatctttgtgtaagtttttgctcatacactctctcttttttcttttgcttgttagggcaaatataaatgatggcactttcgtctgattgtgcttggtttctttggcacagtggttatggtagatgttagtgtgacgcccacaaagtggggcgtccgacaacctatgctttttgttttttagtcattttatgctatatactgctttccttgtatatgcactgccatttttctagaaagttgaaaatggcaatttcttgttcgcttgcttttgggtgttcgaagcgacttttgcaccttttttattttttgttaggatgttttgcagccgatgtttgtctt

SEQ ID NO: 231461 - DNA, 885 bp, Cannabis indica
tttttcttgaaggaaattctgaatagctttcttacttcttcccagtatgcaaggcaaacccaagtaaaaactatcattgctagcaggcaccattcccagtctagtacaaagtctatctcttagatcggaaggagtgttggcactaaagaagattgattattttgcccggttaacttgttgtcccgaagctacctcaaacatgtctaatatacgaagtacattatcagcctcattctcagttgctcgacaataaacgtaactattgtcagcaaagagcatatgagatattgttggcgcaccattagcaaccttacaaccccgaatatgaccactcctttcaccccttcttaacaatgatgaaaatccctccgcacaaataaggaacaaatagggagatagagaatccccttgtcgaatgcccctactccgaacaataggaccaatttcatgacccccatgtactatcttgtattccaccgtagagatcgtgtgaagaatcaactcaatgaatcggttatgaaaccccattttactcatcaaagccattaagaaaccccactaaatacgatcgtaagctttacttagatcgagtttcaaagccatatagccagtttgccccttacgctttcttttgaagtagtgcattacttcataggaaaccataatgttgtcagagattaaccggccatgaatgaacgctgattgattctcagagattatatgtggaagcacaattttcaaccgatttgccaagacctttgatatgattttatactatacattacataaggaaataggccttaagtcacccatactactaacattcttctttttaggaataagaataatattagtattattgacattgtcgggtaacacacctga

SEQ ID NO: 231462 - DNA, 818 bp, Cannabis indica
acatgtgaaccaagcaacataaagggaatttttaatcttttattaattaataaataagattatattgaaatgagttttatttagggcataaaatcaaatataagttgcctagacaaaggagtgtatacctgggtgacatacactgtgccagtcaggaaggaagtctctaacacctaggtgacatgcctttccctcctaggtggattttcaggtgaaattcatagattccaagtcacctcttgcataagtggtctgatactccccgcaagaagtaaatggtgaagttcagagtgcccaaatgtagagcacaaacttaggtgacatatgtagctctaccacctgggcatcatactcttgcttcccgagtggtttttggggtgtggttttttaatatcaagttatctttcgcatcatcgatctgagatcttttaaaagaagatcgaacgggaatattaaattaagtatttcaacaccttgtagatttgctccccaagtatacacttgggtgacatacaacctccccccaagtgtaaacctggatggcgtacagtcggggtatgaaggaaaaatatctcaagtacacttgtaacaccacagagtaacccttgcgcataggattggcttgagagacaagacaatgcctcacaagaagtaaaagagacaacacaacatcatcctgagagtacaggtactccctgggtagcatacacctgcatgcccctggttgcaaagaccaaatcggggtcttcattcaattatgaagatccccaaagattcgatcttatctaattctataaatttaggaaattgattggggt

SEQ ID NO: 231463 - DNA, 1102 bp, Cannabis indica
aataattttatttaattgttgtttaattcattaatgtaaaaaaaacaaaaaaatatttaagttacattaaaatatccacatcacctaaaattaatatccacatgtcttgccacatcattttttatttaaaataatactggcatataagtcaataaacggcaaaaataaacagaagtgaacggaaggactacatttctgcattcattataatttgaggactatccgtaacaagcagtatatattaggggcgaaatttgatagggtaaaaagtttaggacaaaaatactatttattctaaaaattataatattattcttcatatagctctaattgcacatacaaatctattaacattttctaaataaatcagtacctgaatgaaatctatcaaagtcaactaaaattttatattagaggcaagaagaacaggcttattagaatcaaagcttgttcttatatagactaataagaattcagtcatttacaagggtgtttatttattatagtataagaatcaaagttttttcttataaattctcagtatacccttacaataagcctcagcagcctcttaagaagacacagaacattatggagtaatagcacttttagcaataaaatcatgtatagaataaaataatccacagcaaacagtttttttaccaaaaagacaccaacacgaagtatgagaataaaaacttgaccgagaagggaatacaaaggccatgaatgatctaaccaaaatataagttaaaaaaaaaaagaacaaaaaaatatgagaatagtgttacaacaaaatgtattgatgaataggcttcttcctcaagattactgtgttaagattaagctttcagactctagtaaaggctctgaatgaaccctcattaacacagttcctccactaacaacgtaataaagtcgaaccttataaatattgaaatcatgatggggacgacagattctagtataatccttttacaatttgtctattttgagtcaatttaattagaaactattattttcattatctcaacatcagttataattaaacattcctaaaaacacatatgtgatgaggctaacattatatgaaagattccag

SEQ ID NO: 231464 - DNA, 2285 bp, Cannabis indica
aaacaaattaaaaaaataaagataaaaaactgtcaacaagatgataaacattataatactataaagaaaattttgtataaaccttgttcaaatagattagaatatgatgccttatctccattctggatgtctttagactgaaaatgccccactgcagacgttaaaggatctactccatttcggggcacacctctttccaggcactttctcatctacaagcataggtggaatcaaatagggtaaaaatatattgaaaactaaattatggtacacgtaaagattaagataatgctagatatcctgaacatatatgacctgcaagctaaaactatcatggataatgggcacaaaagaagcaagctcttatatttgaaagctcaaatactttttacgtgttagaatctttagttgtgtataataataattaaagtaaatacctcctgcttttatatttgaaagctcaaatacttcttcaattgaactaatagcaaaaagatcattgctatcatcttccaaaggttccataaaagattaaacatataagataaagtatgattaaagtaaatacctgatcagcttcaaaacttagttgcatcaattgactacgtaagactattacttcttcttcgagcttctttttctggtgtacctcctcctctagactctttcgaagctttaacatctctatatctccaccaccctatatacccaaaagtaatcatctctatatcaaaaatccaatgatttgaaattaacagatataatcggtgcaattaccaacattaagaaatttcataaacaatacctctgaccctatttggcttttgagattttcaacattttcctcagccaccttccttaggtttatttctttatcaagcaatttccggacctcagcaatgttgtcagaagtggaattcccaggttcctacattttagggagaaaaaaggaagcacttggaattcaaaagctaaaatgtgataaattattgcaaaactacctacaggctacaacaaatcaaatttccttatagtgaaggaaaactataaatgtgaaagttgatgggcaagtttataacaaatgaaagtgaataaacgttaactttttatcatacttcttttgccaatagatgacttgcaaaacaaggacaaacctgaacaagctaatagatacaatcttatgagagctaccatcaaaataattgagcttggaacatcaaaaatagtttcccaaaatatcttttatataaaatgttaaaaggagtgcatatattcatcttaaaggaagtgtgacattaacaagaaattattactacctctccattacatttaccaccaccagaaccacagcgttcatccttatcttgatttaacaccaacttctcttctaacttcttaactgtttccatataatccatttggctctttagcctctctttctacagaaagaaattagaaaattagtatatttacaccaaacatagtaaaaactgaagcaccaggaaatgatttatttaacccttaattactttataaacaaatttatcagatgtatgaagattagacaaacctctaatgcatctgcaaacttccgttcaacttcaccaatcctgttttgtgcttccaagtgtattctttcaatttcatcttcaaaatatttttgcctcctttcattttccacaatgtgcttatccagctctatttcgagccttctggacaaacttttataatcaaactcctcctttatctttaacatattttccaccttcatcgcctgtcaaataatcacagtactgatttttcattctttataaccaaactcccttaacaattacatggaattgtacgagaactaaccctctgaccaaataaaattgtacttgtagtctctcctcgatggcgtggagatggaccaacagtgataattaatgaagtccttgctgagcctgcaagagaatagcaaatgttgcaatatgtgcatatcatgcattttaagtactaccataataattgtccagtgatgcacatcaaaaacagaggtaacattaagatactctaggtaaaatttactaggacgtgagaaatctcacctccaaatgaatctctaagcaatcttgtgagttttgaatcacgaactggtacatgagcgctattctctgcaagagcattaatgcacttccctagcgcactaagagatagattgatagacttagcttcctctaacatatgtccctcactacctggtatacaaaaaagatacaaagttcaatagcaagtgggtatga

SEQ ID NO: 231465 - DNA, 787 bp, Cannabis indica
accaataattaaagttgtatgaaatatttaatagaagttagaagataagatttttacgtagttgggacattaatgagccttagtccacaagtcactatatttatgagagtgtttattaaagagatttttcttggccgatccccatttctatttatccgtggagtatttgtagatttataatggtggtaaaaggccattattgtcgtgtttgtttgcaccatacttggtacaatttcccaaatttgatttaggacataattgcatattttatgatggattttaggttgtctatagatgtttggtgggatgtgatttatctcttatttatgacttgacgactcatttatgcagtcgtcgattgatgtatgggagctcgtaagattggaaaataatgagcttaaacacgcttgtcagaataaggcgtctaacgttcttcccatgatacattaaatgcatatacagtgtcttggtctttgagtgacatgtcatctttcattagttctcttgtatcatcctccagatatacttcactcgcggagaggaataaacaagagatgctcgcagtccagctggatcctcctggagataagtaatatgtcattaatcctttgaaataatggactccaagagtaattaagccgacgtgtcatgtgacgtgggtcccgttgccatctggcttcctcttgaactgccacgtattttgagagaaattctaagcaacatttatcctgacaacatttatcctgacgacttttgtcctgacaacttttgtcttaacaaatcttgt

SEQ ID NO: 231466 - DNA, 2009 bp, Cannabis indica
gtagcccagaatccctcctcagccgcagtacgacgaagcttctttctcctcttcaatgggacgttgatgtcgagtgtaacacgaactcgcaaataatcacgccaaataccttggaagttctttgggtccgtctttacgtacgtgccaataaagtttcctaactcacgaagagttctctcagttttgaaaccgggttgcaagccatgaacttgaacccacatatctaagttggagataataacagaacgaggatcttgtccccgttgaagtatttcaaaaacgaattgagtgcgattgaaagtccaaggacttccttcaataaccctttcaagatcaatctcatggcagaattgaaacaaatacctatttggctcgagctccttgacatacataccacgtcctggttgaaacaaagatgccatcatatgtctcattgcatcaaaatcaatagccctctcagttaaaaacttccctacaatgcaccaccgatcttcaccactttggtctgaatcatcaaatatgtcatacacagcattcccatcatcttctccttcaatcagtatattagcatattgttcttccacatctttgagcgaagcacttgtggaagccataacacatacaacaccaatgggctcaataaacaaaagacgacaaaacaagaacagtactagagagagaacaacattaccatgtcaaaagacaagactactatttttgaattttgccgtaaaattattaatagtaaacaaaaaaatattttaaaaaattccccaattgaaaattcgaatgattaatttttctatctcaaaacaaaaacattttaaaatcccaagttccaacaacacaggattgaaattatttcatatttgtaacaacccttttacaggatcaaatataattatcacctaatgcattttactagaaataaaaggctcaaaaccattctcatgcacaataacaaaacatagtagaccttaaatatatcattcatatgaatttagtagtacacaacaacacaaagctgtactcatcttcttcctttcacctgtacgagttttcttctctatatctgaattataatcttctctggaacagtcttctaatcttatcccgcagcctggttttacctcttcctttatctctctatatgaagctagcttcccatgaacttggaaaagtgtagagacttaaggagcagtatatatagcttaagaagtagggagtgactgtaactcgattggccatttacatgaacagtcattgttgatacaagatgttgggcttcacctggcattagttcccaagctatatgcaattagataacctacagtactatcaaaatttgcaatggaaacacaaaaacaagtgttatataatcagagccaacctttttcgtttgctctttgaagaaggtgacggcgagagattattatgccagtttctcttcctttggtttatgaaccaattgtttatctgcttcaattgcaatcctgtttcctgtaccagcttggctttgtcttcctcctaaaacatcatttcccaaaccaaactaggataattaattgctaggcttattaatgatctttcagccatgaatggatttaagttatgtcttacagttgggtatggccatttggaatgagattgccaccaagatttcaagagagaggtggttccgccaggtagttttccagcctttcgtttacgaagaatttcctctcgaatatccacaatcttttccttgtaaccctgagacagaaaaaaaaaagagctcaacagccaaaacaacaaatgtgttaaacaataatagcaagtctatataattactttacctgttttagttcctgcttcagttcttccctcacacgctccattaacgacctctcagtttcggtaggcacaagaggaccgaatcccatgctatcaggaccatccaggcttccatcatacaagttgatatcgttatctagttggtcctcgttgtcatctgacattgttgcacctgt

SEQ ID NO: 231467 - DNA, 835 bp, Cannabis indica
cttggttagagttccatgagtttaaagaactgatgaatggcattagaggcagaggatatactattaagtctctgggggacatttctcatcaaaacaaatggaatgatgagattatcaagcaggtgtttggcacggagttagggaatcggatatgcaacattcctagaatcccagctcctttcacagaccagatctattggaagaacaatcaaaaaggtaattttactgttaaagatgcataccaagtggataatgttcatagatttgctcccagtaaaaggatttggaagtggatttgggaagagggagtccttcctaggaactctgtgatgctgtggagagttttgaatgaggctattcctaccaaaaatcggcttcatttccttcaagacaagacctgtagcttatgcgattatgatttggaaaatgcttcccaccttttctttaattgtaactttgctagagctatttggtttggtggtcttttccccttaagaattgatggtatagcctcagagagtttgatcacattgctggaaacaataattgatatataccaaggtaatagcagagtcgatatactcaattatcttggttgtgctctctctgaaatctggcaccaaagaaatgcattttgtattcgggatgctgcaatcaatattgatctggttttgggaagaataaggaaaagcttcttcgaagttcagcaggcaggtgccaacagcattaggcaccaggttgaccaagtcgcagatggctctgaggctttgcagaactccattgatgaacaggaaaggcagtgctgcaacatcatatttacagatgcctcctggac

SEQ ID NO: 231468 - DNA, 816 bp, Cannabis indica
atattaacaacattcttgctgatgtcacttaattagttgctctttactgttacattgagttagttaattagttaagtgatctgttgcaattctgttatttcatttctggttttgtacttggctggattcatataaataaaggcaaagggctactcagttgagtaaggctcattttactttctttgtttttctccattgctgtctagcttctctttctctacaaggtagtttcgaaattatctcctccttttcttcctcctcacccatcatcgattttgatgttgtttttgtaactatttcttccgccattaaaattgaactgtaacagctaaagattagaattttatatttgcaaggattcaagttatatgaagagaaaataaatggattcccagaaataattttctgagaaaaaaaaactagaatagatgatactttcttgtaggtggagaaattcgacctcggtaatggaggatttttttttttaaaggattaagttcgcgaagaagatgaagaatagtgttgatagtccttttttttttttatatatgcaatggaatcagtataataacgatattctgttaaaaaatagtatacgtgtattaaacacgtcaatttatttaagagtattttaaagaaaaaaaactgtctacatagttaatagtatttaagtggttagttgagttggcacatttggattggtttaatatattatgggatcttgattcaataagacgttccataaaaaaaaaaaagttaaaatttacacccgttataattataactacactcattactcatatactatttttttaa

SEQ ID NO: 231469 - DNA, 1316 bp, Cannabis indica
tttaagtaaaaagatacttcaagctcttatgatatgagtataactcaaacttttacgccatacaaataacatctccaaatttcaagacaaagattacagcagcaagttctaggtcatgcgtagggtaattcttctcatgtggtttcaattgtcgagaagcataggcaactaccttgccattttgcatgagtacacctcctaacctagtacctaaagcatcagtgaatacagcatatggttcctcgctattcggaatagtgagaacaggcgccgaagttaatctttccttcaattctctaaaagcttcttcacaactatcatcccacataaactttacttcttttctagtgagctttgtcaaaggcatagccattcgagagaaattctctacaaagcgatggtagtagcctgccaacccaagaaaacttcgaacttcagtgagattctttggtctttcccactgtagaatagagtctatctttgcaggatcaatagtgataccatcttgagaaattacgtagcccaagaacttgacttcagtcatccaaaattcacacttctctttcttagcgtataattgatgatctctcaatgcctgtaatactattgtcaagtgttcaacatgatccccacgtggcttagaatacaccaagatatcatcaatgaatacaaccacaaacttatccaagaaaggtctaaagactctattcataagatccataaatgcagcaggtgcattctttaacccaaatggtattaacaaaaactcaaagtgtccataacgtgtactaaaagcagtctagggatatctccttccataatcctcaattgatggtagcctgacctcaaatcaatatttgaaaagaactttgaaccaccaagttgatcaaataattcatcaatcctcaataaaggatttttgtttttaattgtcatctgatttagctttctatagttgacacgaagtggcaaagtcccatcagttttcttgggaaacttgattggagctccccatggagaagtactatgtctgatttaacccttatccattaactcccctaattgttttcccaattcagctaactctgcaggtgccacgcagtaaggcgcaatagaaactagttgagctccgggaattaaatcaatgtaaaactcgatctccctatcaggtggtaaccctggtaaatcttctggaaacacatctggaacaccactaaccactgatatccaagggaactagtataagttcctagactcatcattgatcgcaaatagattcccatacactctaagtttctctttccacctaagcatgc

SEQ ID NO: 231470 - DNA, 1121 bp, Cannabis indica
gtagatttctcagcatcagatagaggagacaccgattgagaaacattagttagagatctttgtctctcctcctggataatagaggcataagctctattaatatttggtagagggtcctgcatcagaatttgcgatcgagcagcactatatgatttattgaatcctagtagaaattcaagaacacgatcctcctcttgatgttcttgaaaagtttttaaagctccacaggtacaagccggttgaggtcggtattcttgaatgagatcccaaaggcttttgagacaagtgaagtaattagtgacagtgcttgttccttgagccaaggattgtttggctctgattgcttcgaaaacgcgtggtgcattcttctgattgaatctctcttccagattcgtccatatcgtcgtggcattctccatgtacatgatgctctctgctatttcactcgacacagcatgaagaatccaagatatcatggtgctgttacattgataccacagctcaaaattatcatcgtcttcttctggttatggaatcttgccgttgacgaacttctgcttatttctcgcaatcaaagcaacagtcatagctctatgccatgagctgtaattctcacatccattaaggatcttaggaactagactagctccaggatgatcactatttgacagaaaataaggatttctagcatcatcgaaaaaggatcggccacaaggatccaaagcagagaaacgatttgaattttcagtagagcttcgagtgtgagctcctccacctcgagccatgaaagaaaaagaaggaagaagaagataagaatggagtttacacagagtctagctctgatactattttacgaaacagagagaaaggaaaatgaagaactctgtgtaatttccattgattacaacacaaaatacaagaacaaatttatatacaaactggtataaaccagtaacaccatgccactgaataacagactatgcaactgaatttcagactctaactaactaatacagctggcaaaaccacttcctaacaaactcaaagacactaaactaacaactgttattgttgatacgaatccatgcattttaaataaacccacgaagaagtaaacctcg

SEQ ID NO: 231471 - DNA, 860 bp, Cannabis indica
tgggaaagattgagagcagtaggcagactatggtgaaaagccctccagataagatgcttcattttgggaggtatttttaaattccaaagggtcttccaccacctgaccagagaaatactgctagaagaggaaggtaaagaagtaactgatttggccaaatgataggctgaattaacagtgaacaaacccgaagaatgatgctcccaaacaagagtatcatctaaagaagtatcagcaagaggaacagtcaaaataccctggattacttcctcatcaaaaaacattgccaatttctctctatcccaacacccatcagcattaatatagaaagagacagtaaactcagagggggtgataccatctttgaaagaaacaaacctctaaccagggatccaataagagtcaatagtagagatagatctgccattcccaaccttccaaataagacctcttttgagaagatccctaccccaaagcaaactacgccaagtaaaggaaggacaatgacccttagaagcctcaaggaaagaattatgcctaaaatatttagcctttaaaagctgagcaagaagcgaattaggtacagtgaagaccctccaagcttgtttagcaagtagggcctgattatgacacacaaatgatctaaaacccatgccccccgaaaatttggattgacagagtttatcccaagacttccaatgaaccttcccttgattcccaaaagaaccccaccaaaattgggccataagtcgctcaatttttttacaaacagcaacagggatcctgaaacaagacattccatatgagggaatagcttggataactgctttaagaagaacttccttaccagctcttgaaaa

SEQ ID NO: 231472 - DNA, 1098 bp, Cannabis indica
atcatcctccatttggtcaaaagccttctcaaacttctcagcaacatctaacattaaatatgttgaattccatctagttggaacatctaagcaaatgagtttttttgttgaaatcttctctttttctgcagcagccttaaacttggccattctcaaagacgaccctctcacatatctcacaacatcccgaatcttacttatacaactttcatattcagctaatccatctctcacaactaagtttaaaatatgggcagcacatcttacatgcatataatcacctttcaagattgcatgacctctattattaactttcttaaccatgtgagcaacactaatatcattagaagaagcattatcaactgtaattgtaaatactctacttatgtcccaatcatgcaaacattgatcaatagccttaccaagagtttctcctttagtgtccggaacaatacaaaaatggagaattctcttatgtaagttccatgattcatcaataaaatgggcagtcaaacacatataatgcagattttgacaagaagtccatgtatcagtggtgaggcaaacacgttggctagacttagttaacaaatctttcaatcttttcttctcagttaaatagagattaaagcaatctctagtaactgtagatcgggaaggaacttgaaatctaggctcaatcaaattcatcaaatacctaaacccctcattctccacatgactaaatggaagctcatcaataattatcatcctagcaatggcttctctaattttttctgcattatatatttgtgcaatgagttctacacccccacccgcttctcttttttcacaaaaattcagtgtcttttgcttcttatccatgttagaaggaaagaatttgcaaacatttatgtgtgccaacaaatttgatgtcccattttttctatgaccacatgcataatctttcttgcaataattacaaatagctctaatattatctttatccttcacatcttttgtgaaatgatcccaagcgggagatggagctttaacaggtttgcgtttagttggtaccttagagtcgttatttgtagatgttggcgatggtaattcatc

SEQ ID NO: 231473 - DNA, 1181 bp, Cannabis indica
ttaattttgtcatagactagaagagattgatcatggtggtgaggaaaggaagaataataagttaggtataattttttttgtctaccaagaatgtttcatacgctaacgtattatgtttatagttatatactaattaatatatatatatatattacttgaaaagataagtaagtaaaaagtgttgaaacaacattaaaccacatcatttgatttggtccatacattttatatataatattctatgtatctttttcttaatgttcaccaatagtagttttaatcaaataatggaattaattaggcatggaaccccgacacactccatgctcatcataaactccaattagacacgacacgacttaatagtatcttttaattttaagagcttatttaattttggttgataatatttgcagttttactttcaaatagttacaaaaaaaaacttttctttttttaaaaaatagtattatatattttgagaacgagcaacatctgtgacaacttgagacttattatgaattgttgatgattagcgaattttgttctgcatgttaaaaagttttacattgataaaaaataaaacttaatatcatgtataagaatataaaatgcataaattattgctaacattatataactactcaccctctaatgcaatattttttcatcccatagtctcacataatcccataaagactgggaagaaaaactcaacaaattttgagtttgttgttcattaaatgtaagttgacatttttatttataaataaatgttaaaaattgaaagtacaaacattatatattttatatatattattaaaataaaacaaactctttctttctctactttgattcgtatatattacgagtatttttaaaaagtactaataatacttattatttatggataacgctttataatttgttggcaatattttataaaatttattttattaaattatataaaatttgatatttaattataccaatagtacatgtgaaagttctacaccaagtataggacttttaggatgtgtgatgttgtatttgtgaattaatattgcaatgcgtgcaaataaagtggaaaaattgaattgaattgaatggtgtgaagtttgtattagaatatttttatttaaggaaattattttctaatattaaggaaatgattttctatt

SEQ ID NO: 231474 - DNA, 1000 bp, Cannabis indica
aaataccctttgtaatcattaaaaagcactttttattaaaaagaacttttcaaggggcaattgttatacccaaaatttggcgagcacatcagaggaagacacgtgccaagttgggaagaataaagaactcaaacacgtaatcataattacacttgaaatggaataactcgttagaagcataattagaagtgtatgtttacaactcggctgactgaatagtcttatgcaagataaaaatgtactaactgttgccttgtgcctccatgagaaaccatgtaacttcaggtgtacaacacgaggcactaacctgtcacttgaaggagatatagtgataatggaaatacttagcgtgtagtgcacggtatacaaactaagtataacagatgggtgaaccaaagcgagagatagcgaggcattcacctcgctgtaggagggcgtgcacacgaaaaagatcctcttgtcaccagaaactgtagttatcagaattaaagtaaaaacattatcaaccttgggaagacatatgacgagctccagttcgccatcaaggttaactcgaccccattcccagcgagacattctaatacgataaggcttaccatatatctttaatacacgttcattttggcccagtaaaagcggtatattcacaactctgtgaatttcaaataaaaactgcaattacttaatgcgatatgtaataagatcccatgatttgaggggataattattgtacagagtacaatcaactttgtaattaactgccttctatgtgattataaatagtggcatgtaagacaaaaaaggggagacgaaaaaatagatacaagagaggccctcgaaaaactaatcagaaatctgaataagattgactcgtggactatgtagaattttaactgcaaaatcacgaaaagaatcattgtgttcatattttttatttttacagcttttattttttcttgtgtgagattgtcaccactaggctcaaatttggttaacgtaa

SEQ ID NO: 231475 - DNA, 1250 bp, Cannabis indica
tgcactcattgcaacatacatggtcacacaattgaaaaatgctacaaaatccatggctatccaccaggattcaagaacaataggtcgaaggatgcagcaactaaccaagtgtaggccaatactgaatctaatccttccagtgaagaaagtcacaccttcttacctcaactcagtgtgtctcaatattagcagctgctgaatcttttagctaatcaaccgagtaatatacctgctactgatcctagctcatcttcgggagcaacaggtattatcttgtccaatcattatgtcaatcctaaaaataaatcttggataatagattcgggagctacaagacatatttgcaacaacattaagagttttcaatatgtttgtcctatccctaaagtcaggttaattctacctaataatgagtttctttttgttcaacaaagtcgttctattgttattaacaaagatctaactttgactgatgttctttatgcaccaagtttcaaatataatattatctctgtgagtagtctaaccagctgcaattcgattaatgtcaattttactgctaacaatttttacatacaggacaaactccatctgaaggagattggcagaggtagcagcagcactggcctgtacaccttggatactgccagatctaagaatgttctatctgtcactgctgacttatggcattctagattaggacatttatcccagaaaagattggctctgttaagcaatcaattgaattgtgctgttaatactctacatcaacatactccttgttacattttccctttggcaaaagaaagaaaattaccttttcctaataagaattcctttgctaataacagatttgatcttgttcattgtgatacatggggcccctatcatatcccatctcattcaaactacaagtattttctcactctagtagatgatcacactagatttacttggatttatcttatgcaacaaaaatctgaagttgctagcattgtaccacaattcatttcttatgttcaaactcaatttcattgcactatcaaacggtttagatctgacaatgcacctgaattagtttttaaagatctctttgctaaacttggtatattgcatgacttcacttgtatagagacgcctgaacaaaatgctatagctgaaagaaaacatcagcacttattaaatgttgctcgtgctctctattttcaagctaatatgtctatcaagttctggtctgagtgtattatgac

SEQ ID NO: 231476 - DNA, 1478 bp, Cannabis indica
ctctagtaagtaaattgccatgaacaacctgccacaaaatgaagcgatgcttaggaatggaagcaaagctccaaatcgacttgtaaaagctatctatgtccctttgaatcactgccataattattatttacactaaaatcaatattttaatgcaatggcacttaaacttgatgccaaaactattgacattgatgctcttagtaatttgtaagtagtatgtagaacttataaatatataattttttagagattaatggatatgaaattttattttaaggaatttttcctgtctctcccaaaaaaaatacatagtaaatagtcctcgagacagaacaaatctcccataatgaactaaagttctatgtctcattttatatccattaatctttagacaattatatatttaagtactctacttactacttatatctataaacctgtactttaacaaataagttcattgaatcaaacaatgaagggaaattacaaattccctcatacatggaacggtaatcctattgagtttctaataatgtgtcataaaaccctaccaataatggattccctacccaattatgataatgtacatgaaaatatcttcaaacaataatttcacaattattatttttgtcaatttcatttgaattttcatgttttatttatgacttacaactttttgttaaaactcttttatattttaatttttatacatatacatttaactcttttttttaatgcaaaagacctttaaatttacttttcttcacaaatttgaagcgtcagttaaatatcatcgttaaatacaacctaaataaccactgtgtacacttgtgtatacgtgaaagtaaaactttgaagcatatacaataataatcacgttgttatttaacggtgatatccaactagcacctcaaatttccaaagaaaagtaaacataagaaggttttaccaccaaaaaaagataaggaggtttcgccacaaataactcttttcttaaggaaaatttgataaaatatccatccaactaggccaacttttgtctattccttacccctcccattttttaacaccgcctctctcttactctattctctctcgccctcttctcggactaaagaactaccactgcaacccctaacatcaaacatctcggactctatcaccaacccacaaccattacggcatctcagcctctctctctctccaatacacggccaccacggccagaccatcataatatcgaaggtaagatttcgagccttgtctttttcatttcatttcattatatttttggatgatttaaggttaaaatgtgtgagtttattgataggtttactgatttagaattagaatgtatgatgaatctcagtgatttgtgaatttatgttagatggtttggtcggatctgtgttttggacaaaaaaactagtttttacaccaggtacaatgcctttctgttattaacgtcctcgcttcaa

SEQ ID NO: 231477 - DNA, 1067 bp, Cannabis indica
gttcagccttgatctattgacaaatcaaacaccttgatacataatctaccacatccctcttcataccgcaccaccaataatagggtttcaaatcttgatacatcttgttggtacccggatgtaatgaatatggaatggtgtgagcttcatctagaatctttttcttaagcccactatcatttggaacacaaactcgagccttataaagtagcataccagtatcagaaatcgtgaagtccttaacatgtccaactaagacttcctcttgagttttgattaactcaggatcttccaggttagcacacttgattctttctattaggtcagaatgaagtgtcaagttactaagtttgcccaccacaaactcaatatctgcgttgaccatgtcagtggctaattggggagaaattatcttggtaccacagacttgtccagggcccttcctactcagggcatcaaccactatattggcttttccaggatgataaagaatctcgcaatcgtagtccttaactaactctaaccacgtctttgtctcatattttgatctttctgagtaaagaaatacttgagactcttgtggtcagtataaattttgcacttttccccataaagggagtgtcaccaaattttcaatgcgaacaccactactgcaagctccaaatcatgtgttgggtaacgttgctcatattccttcagttgatgagaagcataagcaatgaccctgtcggcttgcatcaagacacaccccaaaccctgtctggatgcatcacaatataccacaaacttttctttatctgatggtaaggctaacatcggtgctgtgaatagtcgcttcttcagttcttagaaactcgcttcacacttatcagaccacacaaattcttggttcttcttagtcaattctgccaatggcatggaaatcttaaaaaatccctctacgaaacgacagtagtatccagctaaaccaataaagcttctaacctcaaaaactgtcttcggtctccaccaatctctaactgattcaatctttcctaaatcgaccgtaataccattttcaccgacaa

SEQ ID NO: 231478 - DNA, 3085 bp, Cannabis indica
tctacttttaaaaacagaaaactgattaaaaaagtgttaccaaacgccacctaaatataataataaaaaattgtagaaactcattcttttgtatctagtaatagagtaacagatatgtatatataatattatgtgttttcatggaaagctatatatacatgctatccacttgtacattttagtattattattgtagcatttgttttgttagaggatatgtctaccatcatacaatggaagatttgaaagacaatagtggtatttcttgtagcgaagaagaagaagaagaagaatagacaaatgaagattctataacatccaaagtctggattggttgagcctcgccttggtcattattagaagtagctgtttccttcattttagtgacttctagctctatacatatctctttcatggttgggcggttctttccattcaaatccaaacaacgctttgcaaggtttgcaacaatcaaaatctcttcttgtggtccctccaatacttgagcatgaagaatgtcacgtagacgattcttctgcattgatataagaaaatatgtagccaaactttcttccgatctagatagagaaattgctttttctcctgttaagagctccacaagtaccacacctaagctatacacatcacttttttctgtatattgatttgattgaaagtattctggatctaagtaaccaaatgtaccataaacttctgttgtcaaatgagtttggtctaaagtaacggatcttgaagtgccaaagtcagcaatttttgctgtaaaattttcatccaaaagtatgtttgcagacttaatgtcacgatggtagattggaaaagaaactgctgagtgtaagtacgaaagagcttcagcaacttcgatggctatttttaaacgcatttgccaatttagtaaaaggtctccattgtggtcatggatgaattgtgagagagtgccattgggtataaattcatacacaagaagaggaacttctgtctctaaacaacatcctaataatttgaccacatttcgatgatttatttgagaaagaattacaacctcattaatgaattctgacactttagcttcatcaactacagtagacttctttaccgcaacaattttcccatctgccaacattcctttgtaaacagttccttggcctcctcggccgagaactctattcacattgaaattttctgtggctttatcaacttccttcgagttaaacaccttagtcttctcaaaattaggttttccagcagatgtttcctgttgtaacaacaaacccccatttcgtttaaagaatgatttcttgcgctttgaatcttttattttctcaacaatcttgtataaaccccatgccatagcagctaccaacaacgatccaataccactgccaatacctatttagctcatgttatatcagaaaacatattgggtttgaaaaaagtaaaaaagacttcatactatttaaagaaaatcaaataattaatgcattagaaactggatgctttctgacaaactaaattttttaaagtaaaaaacaaaattttaattttggaatatatatttataataaggagagtaccaataagcaatttggtatccctctctggcttctcgcatgtataggagccgtctatattaatgcaagtggcacccggttcaggacagatcatgggatcttcactgcattcgtcaatatctgataaaagaaaacaaaaatatcactataaaaaaacttacgtcaaatttaattttattttgaggaaatcaacatactagagaaagttaatttagaatttataaaatttgaacatgttttatatatagatacctttacatcctccggaaagataaggatttcctcgaaatccatttttgcacacacatctaaactttgatgattgatttactcgagtgtaaataactaagccaaccaactcacccatggaggaaaaatgttcccaatcatcacttgattgatccaagtaccagtccagattgaccgggaccgaatccatgtcaaaattaattggaaaaacttgtttcccaaaccaggtttcgtccacaaagaacgcgtatttgcattcattttctctcacctttgtggaggaagaattccggaatacgatttggaagggcgtaagaggtgaggggatggttgatttgcaacagtctacaccatcgcaactgttaatagttttggtagcagtagtactattagtaatacttgaacaggtcgacttgcacccgacctgaacgattgtattattgaaacttgagtctataatagcctcggcgccgcaactcactgcggcgaatatgttgccaaaaccaaaactaaaaggggttccttttagatcagtgagttgacgaagactagtaccaccttctttcttgtttgggcaattgaagagggttactggggttatggcctgaagggtgccatggttgaccgatatgttgagcacctctagtttcgtgcgtttcaagataaggctggtggcggcagcggtggcgttgaggcattccagttcgaaccatttgttaatataacagttttgtccgattccgaaagggaatggaatggttacgtttccgcagtgggttggacaaccaggctttgcattcggtgcatatatggctcctcctgttattccgatgattgatatgtatatgaagacagtactcatgaggaccaatatggagtgcattattgccaagcctattctaacaattgattttcatctgtggacgtgccatttttatttattctagatatgtatatcgatcgatccatcagaaattattaattaaatgaatagaattattatataataaacatagagtattttgaagggaatacataagttatctctaattgggtattgactattgatcaacaataccaaacaacaacactttaattttttatttatgtgacataatatattcatatctattttatttattaaaatgtatatactattacaggacaggattgtgtcccgtgatgtacggtagcttgatctgatggctgtggttgatataggggttattaggattaaaaaatgataa

SEQ ID NO: 231479 - DNA, 1007 bp, Cannabis indica
atatatatatatataataaataagattctaacatttgaatcaactaaagcctctactataccactgtaagagggacctttcttacattccaagttgtcctctatcggtaaattctcggcactgaattgtcaatgtgatctctaagctctacatacttgttttctattgttgggatacattcatacgctaaaatctacacacaaataagagaaattattaataaggtatttcaatattcttgtactttacttaaggaaatttacttactgctaatggaagagggaagcctgaataagtgaacgtggacatcatctgcgctttctcatgcactgatattgctttttcttttagtgacttccagagttgctttaaagtatactaataagaatgagtcccctaagagaatttattgaacatttccaaatcatcaaccaatcccaataattttgggtcgatattagcttattttttatcttcatgcattaagactctgaagacgaacaagagtgaagccatctttaatatttcattgttaagttcattcttcttctgtgattttttctttttgttttggtcagataattattttaatttggtctttaagtcttcaatggtgatgcatgaaggactttcacgaaagtatctatctttgaatgattttgactcagtttgagattcccaacctttagggttttgagcatttcagtccaaatattattgcatagtccatcaatgagaatcggtttggtatcccattcacaacaaaccacatctctgaatctatgtaagaatttgcttctcgaacgaataatagccacatcacttggctaaaatgtctatagtagttagaaatatcgagaagtagccaaacagatattctttaaataattttaagtgagtcaggtcattttttagtacatcattaatgtgtcttgtgatcttgtccattcgactttttacacttattttgcactcaaaatgttcattttcctttaatataggcacca

SEQ ID NO: 231480 - DNA, 618 bp, Cannabis indica
gagtccgtcgtttcgatatttttagccttatttttttttccatattcgaacatgttatagttatttaagatattttataaaatttgaaataatttataatataaaaaataatatccaaatagtctatttcacacgcatataaaataaaatagtccgcaacacaatgtttgaactttgttctgagcgtgttaatcttttttatcataaaaaaaaattgactaaaaaattattttagataccaaaacagataagaaaatatgaatataaaaaaatttgattaaaaattattttaaataccaaaataaataaaaatgtatctgtatatcctttttgagtggttaggattttccaatatgatgtgacgttcgttaattttgtttatatttttgatgaagcttctcaataataaagtgttactttttaattaaatgaatcttaatcttgttgtaaagcaatctccatcgatctagtagtgtgggcctttatttagaatagtgttgtacatttcaattcaaatttaaaatttatgttaaatttaacataaaagaaaataagttgttatatttgacccactatataattatatccaatgcagaaaatgtaaaataagtaaaaaaa

SEQ ID NO: 231481 - DNA, 780 bp, Cannabis indica
ttttgatgactggagtagagaggcgtcttgttatgaagtcattaaagaagcttggaagtctgatcttgaaacaagaaatgagagtctcacgcagcgttgtcaacgaactagaaaagctctccaatcttggaagatcactacttttggcaattgcgatcgaagaatcaaggagactgaaaacaggttagcttggattcagaatcaaactatctctcccaggttgtctgctgaggaagattcactgaggagaaacttgagtgaactgtggtttaggaaggaaagtatgtggaaacaacagtcgaaggaaaattggctgaagttgggtgatcgtaactcgaagttcttccacacctcaacaatcatccgacaaaggcgaaacaagattcaagagattcgagacaagcatgggcattgggtgtatgatgaaaaggaagtggctggggtgttctttcacttctacaaggatttgttcacgtcctccaatccacaaatagatgaatccttcgaacagctttttgaagcgaaagttacagtggaggagaacatggatctgaggaaagtccctgactctatggaaattgagaatgcaattgctaatttgcaccctcttaagtcccctggacccgatggtctcccagggtgtttttatagaagacattggcaggttgttggagattcagtaataaagatggtccaactgttcttctcacgaggggtaatggacaatactttgaattttactcatatatgcttgattccaaaagtggagaaaccagaatc

SEQ ID NO: 231482 - DNA, 1395 bp, Cannabis indica
tcactggcttcgttgcaactagagattagaagcaacatcatgttcttggacactgttgctgaaatgtggaagaagctcaacttaaggtacgatcaaggcaatggtcctcacattttccagagttttagattgactcattttaaatccaaagatcctttcttttaagtaaatcttgttgatcaatgatttcttttggaattgttcttctaactttgtctagattttagcaggtgtatcttctttatcaaccaatctatagaatcagataggttgaaaattatcaatccagttgttgtttcaagcaattcttcctgttgtgctttagttgtgtcagctggccattccactggatcacttaggacctttagcaatttatacagagccaatagagccctgattttcttcttccgaatttgataatcactcgaaccatcaaatctatcaatatccaccttaatagaactcataattatataaaagttatttcaagaaattgtagagatattaagtttagaaaaatcctgatattgactttgtgatctgtgtgatgtgtagcttgattcttgatgttctgaatttttttgatcctttcttgattgctttctgttgtagctttcctgccttgtttggctctgataccgctgtaggaattttacccttttgtcctacacaaaacattaaacaaatcaagttttcccaaggtcaaaatagacctttcaccctgagtcaaagcccggttgactcccaagagttaaatgccaaatgacagtctttaatccctagactacaagtcgttttgagcttaacctaaattacccccagaaccctctagaatcacttcattcattcacacacacaactcacagattgaaaccctagcaaagcttcgagtttcttctcaagaaacttgaagtctgctcacaacccagaaaatcccagttaatcacttcctaggtcaaaaatcaaaccccaaaaccatacacaaacagataaacatcaaaaataatagcaaaagaaagattagaaagagtgcaccagatttttatagaggttccccaataatttctgggtacatcctcttcgagctcgcctcagaaaagctcgtttccactattggatcttcaagatcaaagagttacaaagctggattacaaatcacaggtacgattggtaatccttgtattttacagtgtttatttctctctctctctctctctctctctgaatattgtgctaatcttcttcttcttcttttcttgtgtatgtcttcctttggtttggatctccgagccctaaacctagggctccactccaagagtacttaaccactgtaagtctccttctctccaattcgctgatctgttctctgttgttctgtgttgatttgcatgtatt

SEQ ID NO: 231483 - DNA, 1615 bp, Cannabis indica
ggtgcttgctttaggccatagagggatttgtgtagcaagcatacctggtttggattgccattgtcaaatcccttaggttgtttcatgtagatcttctcatccaaagtgccatgtagaaaagctgtcctcacatccatttgatctatttctagatcctgagcagcaactttggccataatggctctaatagaagcttgttttaccactggtgcaaatatgtcattaaaatccacaccttctctctgagtaaacccctttgcccttgccttgaacctcactgtatcatcattaattccttcattttgtctgaacaaccacttgctatcaatcaacctctgccctggtggtctgtttacaactgaccaagttttgttccttatcagtgacactttctcttcattgattgctctcgaccaatgttccttgttactgcatttcagtgcctctttatatgttgtgggttctgaattttcaagctcactagcagttgcaagggcaaatgcagagaaatctgcatagccaagctttgctggtggtcttatgtctcttctaactctatctctggccaagagatagtcacttagttcttcttgtgattcttgaggttggttatcatgttcatgatcagggttctcatctgcatctgaacattcatctgggcagtgtgactgatccacctcaagattaattttgctgtgtgtctcttctgtgtgcagtgttgggtttggtaagggtttcatggccatttcttcttctctgaaagtgacagctctgctgatgatacaccttttaaatcctgattcaagacaccaaagtttgtatccctttataccatcaaggtaccccaagaacatgcattttactgctctaggcttcaatttgtcttgcctcagatgagcataggcagtgcacccaaagaccttcaaatggtcataagtttgagcttccccagtccacttttcttgtggtgtcatgaagttgataccagtagaaggacatctatttatcagatagcatgatgtgttcaaagcttcaccccagaattttctctttaaaccaactcctttaagcatgcatctaaccctctcgagaagtgtcctattcatcctctctgtcaggccattttgttgtggtgtgtctctaactgtcaaatgtctagctatcccctctttgatgcagaattccttgaactggtttgagcaaaattcccaaccattgtctgttctaatcttcttgagcttcttgcctgtttgattctcaagaagtttcctccaattgacaaatgtgttgaaggcctcatctttggttttcaagagatatacccacacctttcttgagtaatcatcaatgatactcatgaaatagtaagctcctccaagtgtgggaatccttgaaggaccccaaagatctgaatgaacatatgccaatttctctttagtagtgtgcttgtctggtgtgaatttctgtctgcagcttttgccataaacacattcttcacagaaattcattttgcatgacaccttccctttgagaattccttgtttcttcaattccaattgacaagaggtttctcttgagttcaggaacatacctgacatcagtgatggttctttga

SEQ ID NO: 231484 - DNA, 1805 bp, Cannabis indica
gccattgttatacctcgtttccatgactggtaattcgcatcgttgagcacaatggagacaagaacaagccctgggtgatctgccgtactgaggaaaaaggggctgaaaatgtcttcctgagccagtcgatcgagtctgcgagtagatgcagcaggttgattggggttaggagcgggttgagcaggggaccacaggtctggttcgatggtgtcttcttcctaggaaggtcgagatctggaaggtggaggtcgacgagaagccatggatggattggcgattggtgcggaagtggaatcgagattggattctgatgtgttatgctctgctgtagacgggggaagaccatcttgcgagcgggtggagggccttgccattgaagattgggcaaggttttcttctgataccatatgaggattgagaaacctttgagaggttttgcagagaaatagagaaagaaaactcttttatttgagaaatgtaatgttctgtttcaatacaagtaaaagttgggtttatatactaagcaagaagggtaaaacagtaagtctaactaatcaagaataagttacaatgataacaaccaaagtaatctcttaacgaacataactaaccacctaatcctaatataactcattattttgataaattagtataattttttttttcataaatttggttatggtttgcgttagtactcccacgttttccttaatgattaatgggttgatgcatgagtttctttaagtcaaaaagagggttaaagaaaatgtgatctgatatcctttgcttttggtgttaaaaataatatatctatcaaccatctattgcaattaacaatagctcagaattttaatttctaattttattgaaagttttcggagctgaaattaactcatttgcattttttggatcattttatattttgcaaaagtatttaagttgatatccatttgattgtagtactgttaagagatttttgctagaaaattaatgtaaaacacgaagcatacataaatcgtgatgaagtgtgaaattaattaaatatatatgtacttatgaacaaaagatcgaaatacctctagttattgattttttttagcttcaatcacacactagctttggatctacaaaacaaaaagaaattgattagagtgggtaatcgggcttccaatctctctctactctctttagatggaataattacttttcccgtaaccgaatattgattgaattcatcccaagacatagtactaacatctcgagtttgtcccacaatgtctcaccaaatgtgggcatgctcttggaacataaatgcagcacaattaacctgttcataatatgggtaacagtgatcatccattattatgccttgatgatgtcagtacctcccaagaacgtcagaggttgtagcttaacaaactgctcaaagatcgagtcccaatatcgcaatattaatccagggttacccaccactagaacaggagctggtggtaacacttactcagttgaagctacttaagtcggttgcctaaactgacgcaactcatcttcctaacggagtaaaatggtttgcattttgagaaacatctgctgccagtcggcaggtggattagcattgttaacctccgtgttattccctaaatttgtggaggcatgggcagtgtcgatggattagtttagttattaccaggctctacaggctcaccttgtggtctggttgattgatcagggtctattttctctcaaatagccttgaaatcaacaactccgatgagttaggcaccaaatgttgggttttatgccct

SEQ ID NO: 231485 - DNA, 1218 bp, Cannabis indica
ttttttatttcgggcccccgaaaagtgtgggccctaggcgcgggcctagcccgcctatgcctagggccggccctgcatataatgacctgctacctttttagttgtattgattcttgagataatagcacacggattagtatggctccctttaatagtacaataatgaaaactgagtgttagagattcaaaacttatgagacttatgagattttgtgaagaaaatagactaagtgtctagtgagtgagtgaggaggcatgagagagaagcaagagtgcttatgagacttagaattcaggtcctttctaccttgcctaaggctctttataaaatctagggcttacaaaatatcattattcaaataagtaaatattaaaatctctctttttatcatatattttaggaaaatttgcggcaaaagctcttgaaaagttcagtttgatgtagataagtccccaacgtcgaaaaataacggcaataattctcaatgtgatattttttgtaagtccgttagtcctattttttaactgagtcgttactcatttaaaaatgccacatattgaaattttgttggtccaaattatattttaattaaaatatttttcttttttttttcgtttctcttttctctttcctcttcttcttcgtgttcttctaactgtccagaaaaatcagaaacccaaaaacactggcatctctcccgatttcaaccaaacccctccacttccattttttctctttgtctcattcatcaatctcaattcacccccaaattaaattaccaccataccctttacaagtccctactgccaagcaaaactcatctctcaattccatctcatttatgaacaaaacccaagaaactcccttaaaaagaagcccaaaaaactaattaagaaaaaaaaaaaccagaaaaccataatcgttgcaccttgctccgactgtgatttcactccatcccaagtcatcccacacatttcaactgtgatcgacgaccctaaccacgactagctcgtcgccgttaacatgcaaaaaagagagagacctagagaaggataaaaaaaatgaacatatgccctaggtataccttcgggtttcgaatataagagaaagagaaatttgattatggtgtgattaaagaaaatcgggattgagagtgaaggagattaagaagaagaagaagaaagaaagaaaaaagggaagaaatactgaaacaaacc

SEQ ID NO: 231486 - DNA, 1401 bp, Cannabis indica
gagttctagaaatctctcctttgcggggagagtggttctcatcaattctgtcttaatggccattcactcttattggtgtcaggtaatgattttacctaagaaagtggtgtccaatattgaagctatatgcaggaactttctatggaatgccaaagctgagtaccatgggccaggtgcaattgcttgggattttatttgccaaccaaaagcagctgggggaattggtttcaaggatataggctcttggaataaagcggcaatggggaagtacatttgggctattgctaacaaagaagatagtttgtggatgaggtggattaatagtgtctatcttcataatggtgattggtgggcctatgaaacatcaagccaaaccagctggtattggagatgtttagtgaggctcaaggatcaatttaaaatgagtaaccagtccatgatattgcagcagtataccatctcggcagggtataagctgctggtgcaaaatccaccaaaacttcagtggacaaggcaggtttggagccgtcttaatgctccaaaacactgcttcatattatggcttgcaatgcatcaacgactcaaaaccagagatcgactcttcaaaatgaaaatcatcacagatacaacatgtattttctgctgtgatagattgaaactgcagaacacttgttctttgcttgtccgagaacactggtttacttgcaggaaatcaagaattggctcggaatgagaacaatgcatacaaacctccccaacatcatcaagtggctaggaagattgaaggagacaaaattcaagctgctggtttttacagcagctgtagccggtttggtgtacagtgtatggcagctgagaaatagggtgttgtggaccaaagaagagaaatcaagctcagtacttctcaaggagctaaaaactagtttgaagcttagaattgagatgttttggccaaaaaaagtctcaaaagtagacactcaatggttccaaactttgtaaatatattgtaattgtatagttcttttttataggcctatttgggtgctatttgggtgtaatcaaattgtttcttgtgctaatacaaattctgattcatcaaaaaaaatgaaaaagtcattggtgggactatgagcttaagaatgatactagctggtattggaggaaattatgccatctaaggggcaaattcactcgggaagatatagaaaaggcaggggcaggaaggcataaattcaattcgactttattgtataatagcagccttccacaaacccagtttgacttcaacaaatgtatctggaattctctcaacatgccgaagcacagattcattttttggcaagctatcaatgctcaattttaactcgtgacagtttgagcaatttcagatcaagcttgaca

SEQ ID NO: 231487 - DNA, 1013 bp, Cannabis indica
ttatgttttgtgtttttagttgatgaagtataattgtttttactgcaatgataaatttttaaaagtataattgtttttaccgcaattattaattttttaggaagtataattgcgaagaatcatttgggattactgtataattgtgaagaaaatataaataggaagtataattttttaataggaagtataattgtaaagaaaatataaataggaagtataattttttaataggaagtataattgtgaagaaaatataaataggaagtataattttataatatttattgacactataaaatgcttcatctccattttcagcaactaataacttttcccaaacataaaacataatgatgtagattgtgtaatttcttatcatttaattaataagggcaacttgaatattgttacctgtcccaatttgggaaacttccaacaagataaagtaatcccaaggttctgcaataattttacaccttgacagaacaacatctttagcaatacctgagattcaagagagatatataggttaacaaacaatattctatactagaacaataaatggaaaaaaccgggaggctccatacccatatgtgtatgtgtaaatacataaaagaaacaatgataatttacctttactatgattcaatttatgttatatatttatgtactaattttttaaattgctcaagatactatgtttcttttttgtgtttgttacgttaaactgcttatgttgttgtttaataatgtaggtagtactgctaagatcaagactaaaatggttggtgaaaaaagagtgtttgagagagtatatatttgtttgaaagcctgcaaagatggattcagaaatggttgtagaccgctaatttgtttggatggtactttcttaaagggttactgtaaggggatattattggtggttgttggtatagatgctgagaatgtcattttccctattgcttatgctgtttgtgagaaggagacaatagattcttggtcatggttttgtg

SEQ ID NO: 231488 - DNA, 1503 bp, Cannabis indica
ttgttttggttttaggtttttaacttggttttttttttgtttactggttttttttgaatttttgtttgtcatttatgtttttgattattttttttgcatttgtaaagaaaaattattaattaaaatataagtgtaatttttttttaactggttttttttaattttatgattgtatgttttgttatatgtttttaactgttttttaagtttttgaatgttttttaagcggtttttttctgttatgttttgttatttgtgactttcattatttttctaactgttttatggaaaagtaatattataatattattatattttttttatttggaaccggttatttttaaattatatttagagaatcaatgttataggtaagttttttatctggtttttaagttttaactgatttttttttatgttatatatatttttgtatttgttttaattttgttttctttttgcattgttaaatgaaatgttttgttagaatctgattttatttttgtatttggaaccggtttcatttaatttttatgttttttgtctaatttaggtttttaactggttattttggttctggtatattttttttttgcctattatgtatgtgattcatacggttgttcttaatgttttctattgttttaaccggttatttttttttatatatgttcatcaaaatgccgtgtttcattttctttccaaatgatatatatattcttgtatacctgtaatgtttatatacctattaagttttatactgagatttcttgttggagttttgttgctgtgtttatttctgtttgatgtttcattttctggtttttcgatttttaggagcattgattttcaagttctacagatgaggaagatgataagaaggaattgaagaacttactggagctagagaagatgatcggaggcggcgatcgttgctgaagctctgtcttcagtagatgaagtttctggtttcggagattgttttgcggtgtcttatccttgcatttgagttcggtttgcagatcgaattgcagtggtcaatcgcacttgctaatcatgtgattctgagagtgacgatcagcaagaaaatcgcagagattagggagagagagagagagagagatcgaatgagatggaattctgttatgttttaatttggaaaatgagggtttttttaagttaagcctatttatatactttttggtttcccatatttttacaattaattattttttttctatatctttttttgatttaattttttatgccataaaaaagtaaatggcaccaaaaattcccatatttatgaaaaatcttctacgtaaaattaatcgagccccacaaacttaatatatattggtatatatatatcaactcatcacttgattctttcaatatggaataaaaaaatatatcaacaaataacaaatcaaaattataggtggaagatcaaaaactaaaaagatgtttggtttcataacttaaaaattattttctgttttt

SEQ ID NO: 231489 - DNA, 1961 bp, Cannabis indica
atgtaagtatccagatttacttttttttgtgtcaggctgaagtatgcctacacttgacttagaggcaggttcagtagcctatactaagcgttaaaatttccctacataagttctctatgctagttcgatgcattgtatagcgtggatgcccctaagtgagcacgcaaacttattgggaatttttgtggggttctacatgttgtatgcatgtggaactgaaaaagaataactttaagaagttaatcttgttagcaagtggtttaaacacaatatatttgaacataaacattgttttttattcattaattggtttttgttaccatgcaacttacataaattgaatctacaagcttacataataaaaagtctgcttctaaatgtcaaatggctatccctgcttggcatgccaagtagaggccatcgttgaagaacgatgggcggctacgccgaaagaccgtgggcactagctctttactcttactctaatgatgagttgatagaactactactgcaaaataacattatgtaagctggtcactaatagtacttgcggaggtgctccgcattctaatatcttggtaggagaactagctccatgttctcgttgtaccttcacaacttgtaggctcccttacttgttatctctgtaactcggtaggggccttcctagttggatttgaacactcctgctactggatctttggtgtttaggaacactcttcggagcactaggtctcctatgaagaatttcttgtcctttacttgtttgtttaagtgccttgcaaccttttgcttgtaggcctgcagctttaggttggcttgatctcttctttcttctatcttgtcaagggtttttgcaagtaggaggttgtttgtatcctggtcataggttgtcctcctgtgagatggtggcaccagctgtacaagcaacatcgcctcatagccataagctagagtgaatagagtttgcatgtggccgtcttctcggtagtcctgtgcgaccataggacatttgggagcaattcaggccaattgccttttacctcttcaaggcacttcttcaaggtgtcctttgaggatcttgttaacaacttctacatgcccattttcttaaggatgtgccacgacagaaaagcttttgatgatgccatgtctgttgcagaaatcagtgaacatgtcactgtcaaactgctttccattgtctgacataatcttatgaggaagtccgtaccgacatgtgatgttcttgacaacaaagttaaggacttttttggaggtgattgttgttaggggtttagcttctgcccacttggtgaagtagtctacagcgactatggtgaactgcacccctccttttccccttgggagttgaccaatctggtctatcccccatactgcaaagggccaaggagactgcatcattgtgagcttgttgggtggagctttagggatcttcaagaatctctagcacttgtcatattttttgacacagtccatagaatcctctatcattgttggccaaaagtacccctatcagagtatatttttagatagtacttgcccccaacatggttgtcgtagaagccttcacgcacttctatcatcaaccgcttaactttagtcttggtgacacaccttaagagtggcattaagaagctccgtctgtacattacttcgtctaggattagatacgtagcagcctttcttctcattttctttgcctcattcttgttttcaggcaaggatctagtttggaggtaagatgcaataggtgtcatccatgttggactgtcatccaacatgttgacttctttagcgatggaattcttcattcctttaggaactgtattggcaccaggttttccttatcgacaatggtgctaattgccaaatatgcaactacatctgctgtggcattctattctctggggatctgccttattgtatagcctttgagctga

SEQ ID NO: 231490 - DNA, 841 bp, Cannabis indica
agtgaaacaattagctatacaaagagaaataacaagagcaccatgatgagggttaagaagcctagctgattctgatgtcgtgaagctgatggtttgctctggtaaggaagatgttctgctagtctcccctttggtccagttagcctgacgtgcatgtttttttacagctgactgggtgactccacttacttctgagccacatgttattacgttgatcgttctctcatgaacaggtggcctgggcggtgttacgtccctctgattgtttatcgtgtcctctgaccctggtaagtcttctttcctttgtcagtgaggtggtcaactaggtggccccgttttagcaagttgattacttctaatcttaaggcaatgcactcttcagtccggtggccatggtcgttgtagaagtcataccacttgcttctatccctctggtcagttggagtcctcatcttctcaggccactttactttgcttccaagccccttaagtacttgaacagcctcagtaggtgagatgtacaagttatactcgggcatctttggtccacttcgaggatatgtgtcagtgggtcggttgtaatcccttcttcggttctctgacttgttagaagtcaacttggctcagaccgtttgtcgttgtgccgtctgtctactctggaatctctgcgagtctcttttcatggagaggatctgtagtaattgactgttgagttttgtgccctaaataaaaccctttacaatctgattagttatcaatataaaaaaattgaagtgatttatgtttgcatgaattttacatgccaatggtttaatatgtttattacatttacacacaaaat

SEQ ID NO: 231491 - DNA, 1119 bp, Cannabis indica
catcaaacatatagttaacacaaaacagacgtgtgtcatccatcgggaaatcgttcgtagtcatcccttcaaacgagttagccaactggctagttcgagcatctttctcggccctcatttgcagcaattcttcataatcagcaatgtacttgggtatgtcccaagactcgccttgttgtctcgatactccatcgccatttttccacgacaatggatctcagtctccagtccaatttcgattaatcgaccttccaacatgtccacacgagcttgggcagtagcaagaccagccaaggcagacttcaaacgactagaatcttgttccttagcatccagttaagttcgtaactcttctttgacacagtcaagctctttcttgcagcctttcagctccttaatctcctcgcataaatcataacgttcagacctcataaccttcattggctccttcatgttcttgatcttatccaaagcgtacataagcccttgcataccctatcatacaatataaagtatcaaaatggtcagacacaataatatcgtgagttttttcatacataaatcgtaacataaaaatttatccagacctgaaaggagcgagagatggacaattccatagaagttatttccccaatattctcaaatcgagctcgatcctctggaaataatagcttactagcctcaccaagctgtagaccaaactcagaatgcgcagccatttaagatggagaaaaaagatcaactgtattactcaaccagtcagtcgactcaaccggagatggtctcttgttattcttcttctgagctctcacagaaggacaagaaggagcaacaatagtaacaacctccttctcagcactgggagtcgtcccagtcttctgtttgcgcgagcgtaaacagtccgtagcatcgtcaccagccagaggaagagtgaaagaagattgggtcatgaatcgatctgcaaaatctcgttcgtctgacgtcaattcaggtagaaataaaggttcacactccaaaatctcaaaacttctttagagtatagcaacttgagacttagcacgattcttaggaggagatataccttcgtgttcacgtggaatgtgatctcacaaaatgttg

SEQ ID NO: 231492 - DNA, 1261 bp, Cannabis indica
gatgagcaatttcttaccatctccaaaaacaactgattcttggccaatgtaaggtgtagcagagtccaaagattccacagcaaaggcaacatgattggttgcgctagtatcaacataccattaaatatcatctccaaaatcagggagagtttgggtttgatgatcaagaacaggtccctgttctatgagatgaacttggggctgaggtgaaggagtcttgggtgtaaccaagttcttgtcaaacctgtaatgacaagttgctgcagtgtgaccatatttcaagcataattgacacaaaggcttgttattggagggagggcagccatagtttctgttaggcagccttgattgttgttgttcaccagcaggcattctgccagaggaaaatgggtgtcgataaggtccagctcttgacccaaaggtgaggtttgcagccattttggtggaaagatccatcatggatgtgtgtcattcaagccttgtctcatgagacattagaagtgcctgaacttattctaatgtaagaacatcactttgagaggtgataccagagacgacaggatcaaactccggtccaaggccattgagcaagtgaagaataagatcaagatcagtgatcgaatgaccaacaattgctaaagaatcacagatagacttgattttatcaacatagtcagagatgcttagattacctttgtgaaggttggacaattgtcctatgagttgtagcaatcaagctttggactaactagcaaatttctgttcaagagccatccacacaacattggaagagttgtaatttgagatagtgccaagaattgcttcagtcatagaagatcgaagccaagaaaggagtaattgatctttctttcgccattagaaatacattggattgggatcaccattgacaagagtgcgagggggagagatactggtaaacagtatttcatcaaggtcatgaccaatgaccgtggggactacctgggatttccagaaaaggtagttagctcgatcgagtttgatggtaagagacgaagttaaagaatttgagaaaggattccagtgaacaggagcagcagcaggtggaggcgcttgaggcctaggatcagtaacaccaacgggagacgagctgtcattggaggaagccatggacgtgagtcagagaagctttgacaccatgaaagcttttaaaacagagtaaaggattaaaggcagagagaaagaaagatagagatgaaagccttagaactaagaattgcta

SEQ ID NO: 231493 - DNA, 1036 bp, Cannabis indica
tcgacgtaaacctccatgttttttctgatttgattcgcaaacatttcattcaccagtcgttgatattttgctccagcatcttcagcccaaacgacatgactttgtaacagtaaagtcccatgttggttacaaaacttgtttgttcttgatctcggacatgcatttttatctggttatatccagaatatgcatccataaatgacataagctcatgcccagcagttacatccaccaactggtcgatcctgggtagtggaaaacaatctttttggcacgccttattaaaattagagaagtcaatacaagttctccaagttctgttaggctttgggacgagaacaggattggctatccacaaaggataaaacactttgcgtagaaagtcactgaccaataacttatccactccctttttgagggccccttgtctctcagaatccaagggtctccttttctgtctctttgttgggtagtttggatcgacatttagacgatgcagataatattagggtcaatccctatcatatctccatggttccaggcgaactgatcctggttcacccttaagaaacttattagctgctatttcaactgcttgtccaggttcctcccaatgtagatacactttgtgggatttcttgggtcgagaacaatttcctccaattcttcaattgcttttaatatgtttctttcatcttgaatctgaggatcaagatcttcatcctttttttctctttcctctgccaagactgccattaactggtgatcggcttttccgtgctgtagctttatgagataacaatcgcgagctagcatctgatcgcctcgcaccactcccacaccctctgatgtttgaaactttagggatagatgcttgatcgaactaactgcctttagtctgatcaatactggacgacccagtaaaatattgtaagcagatggcaggtcgagaaccagaaagtcttgcataattgtggcaaataggggcgcttcgcccaaggtcaatacgagctcgattataccttgactggtgata

SEQ ID NO: 231494 - DNA, 661 bp, Cannabis indica
ggacagcataacttttcccaagcgactgccccagccccattcataaggctcttccctgtccacagaaaacttctacaaactgcttcaagctctttaataacctgcttagaaatgaacatgatttgacaccagtaaacatgtattgacatcaaaacagatttcaccaagaccaaccttccagcaaaggataaatgcctggtgctccaaattctaatccgagcagtcattttctgcactaaaccgatgcaatctgaagtagagatccttctggcacatataggaactcccaagtacttgaaaggatcatgttgtcttgcaaatccagacatgtctaacaccctttgaatctcattttcgctcattccactacaatagattgctgatttagcattgttgggttgcagcccggaagttgcagagaacaacttaagagcttgcatcatgagataaatgcttttaaaatccactctgcagaataatagcacatcatcagcaaaactcaaattgtttaaccccagatcagcacatctctcatgataaccaaagtctttcttctttcctagcttcttcattattctgctaagatttccattccaaggacaaacagtaatggtgacataggatctccctgtcgaagtcctctcttagcttcaaagaatcc

SEQ ID NO: 231495 - DNA, 6651 bp, Cannabis indica
attgtaatacaaatacaaaaaatagtcaaatataattttatggtaccaaatttaatccaaaatatacagtagattagatggtcttgactaattttacatcaactccgattcaggcctaaagtagtaatttagcgtgcaaaagttttacgccttcccgtaacacgcaaaccaaacattgcctaatgactatagtcatttattacaaattaagagaaaaaaaatggcagagaaagagtgttgtgaaatgtgatgtattcaagcataaaaataaaacccaatacgcgaaccacacacaagtcgtctcgtttaggtgacgacaaatgcatcatttaataagtctacagccttctcctcttactttttcattctcgccacccctcccgaacccagacccaacctcattcctttatcaccaacgcgtaccttcccagctacgacgccgtttaaccacctcccacctctttgggtcccacatcgctagacgatccagattgttagacgaggactacttccttattataaatactcatcacaacaagttcgttgattccttttccagttctctttcatctcttcttcctcgtttctcctttctctcaaaccctttttctttctctgcgtctcagtctcagtctgactctccgatgtcgatcaacgagatggagcccctcacgtccggggccagcaaccgcataattcctatcctcaaggcgatgaggtcagcgttcctgtttgttcacaccttctttgtctctctcctgcttctgatcctccctcgtcgccgtcgccaccatgtgccgatagtactctcccaaaatccgtcttcagagaagtggaaggcgtcggtatggaggaggagggaggttgaggataccttgaggaggaggtccttggctgaaggattggacatgagttttgattacgggaacgaggagggccggtgccgttggaactcgtcgttgttctttggtgttagacgtaacgccctcttttcgcgttcttgggtcccggcttccggcgaaatgaagtaaggtcttcggttttgatttttcgaatatttgattgtgtgaattgggggttttacaatttgttaaagcactctatgctgaaaaatatcctgctcacgaactgtttgagattggagaactcgtctcgacatgtcttttgtaatctattatttttatttggttaattgtttttggtttttgtttgtaatttcaggggaatattgatcatcatacatgggcttaatgaacataggtaaggttgaactgttcgaattgggtcattctatatttttctttctatagttgaaagtagctgtttcatatgttcttgacaaaactttggtcaagcaacattttcttaagtgaaattggcatttgggttttctcattttgcagtggaagatacgttcagtttgcaaagcaactaaattcatgcaactttggcgtctatgcaatggattggataggtatattctgtgtttttttatttgtagtttcaaattattttcagggaaataattttagccttgaagttgtcaattcaaggtgatttaaatttgaaacgaggccgtgattgttatagcatacactgtatttgtgtttgttttaaaacttaagaaatgacagcgtctttttggaatgaactctcctttttactccgaagctagttaatttgagtctttgttaggaagttgaatcatgaatcctgccatctgaaatgacttataattcttataataaatttgttaatctagaacggattttatccaattgatttgtttgcatgatcttgacgatcctattttgttaggtcatggtgggagtgatggattgcacggctatgttccttcacttgaccatgttgttgctgatactgtaagttatctcaatgcaaaccatgacttgaacgttatgtattctgaacttttgattggaactcaaaagcatgtatttatattttaagtttctcatttcgaaaactgaaaattatctctacatatttgtttcccatatatcacttgcatatgtttatagacttgtcaatgcaaattttcagtctcgtatttgacaagtttatagtgcccagaaatctcgtattcatattttccaatttgctgattaacgctggcttggaaattttggctgcatgttacagtatgcaatcaaagggatgtataatctgtgttttctctttatttagggggctttcttggaaaagattaaatctgaaaaccctggagtaccatgcttcctttttggtcattccactggcggggctgtagttttgaaggttaggcattataatttctttatatatgtatgtttagttgatttcattcaactcctttgtgataagcttgctcctataggcggcctcctacccacacattgaagaaatggtcgagggtattgtactaacctcacctgctttgcgtgtgaagccagctcatcccatcgttgtggtaaattcttttccaccttctgcagaaaattttaagatgtttgatcagtcatcttcagctcttgttataattagtctcgttgatttcgtacttgtttatcatatgatggacattgcctcatgttcccgtacaggccgttgctccaattttctcgcttgttgctcccaagttccagtttaaaggtgctaacaaaaaaggcattccggtttctagggatcctgctgctttgttagcaaagtactctgatccactggtctacactgggccgataagggtccgcacagggcatgaaatactgcgcatatcgtctcatttaatgagaaatttcaagactgtcactgttccattctttgttcttcacggaacagccgatacagtcactgatcctatagcctcccaggatctctacaatgaggctgcatcaaagttcaaggacataaagctgtatgatggtttcttgcatgatcttctctttgagcctgaacgagaagacataggtcaggatatcattaactggatggagaagaaactgatgtggccttaatacaagaatatggcaccaatctttggtgtaggtgagttttcctggctctctttcttctactttctaagaaagtgggagaggacaatccacgtggagggaagtgactccaagaagtagaagctgggttggctgtatactatatgtttatatatatatatattaatatttatataaatactttttattaaattggttttgattgatgatcaagaatgaaatttgtagttaagaaaattggtttcgtggaaatgattcccatcaatagagtatgcttataaatatactataaagaaatcaaactgtggaatcgtaggagatatgtatgagtctggaaaaggaaggaaagatatctcaaccacataaataaaaaaaattaaaagatgttcctaagaacactattgaccgtttatatggtatatcttctatttattagtttaaaatttccaaaatcaaaaggaataatattgaccgttttacttgcgtgaaaccatcgatgtgatgtagatggtcatggtctgatcaataataatgcaataatacatgtggtactaatttgttaacaaagtagatacgagtgattgaataattacgatatatctggcgcgctgaccaccataataataatattaatacgagtaataatgatggtgatgggcgcttcaattacggttgccgaaatgtttgttagagcatggtagtatttttaaaagatgcttacaatttataacggtgtttacgtatcggtttagtttagatatttatattttttgaactagactagtataatggttttttgaatattagaaactaaattagacctataaatttttcaaaccaaaccaaaccattaagaacgatttggtttgatttagtgaaatttacaattattcttattttttaagtaattgtactatttttactaagattttaattttatttttcaaaatatatatttaacatgataagtaatagatctataacatataaataatgatataaaaatattctcaatagtcaaatataacataaaaatctaaaattcatgcaataaaaatttcatatacaaaaaagttcaaaattctacatatagtcatatataaaatatatgtagattaattatttattataaacggtccgatccggtttaaccattaactatttattacgaaccgcaaccgaactattatgccgtaaacggtccagattgaccaaaccaccaaaaacggtttctccggttacggtttacagtgattcggattgtcgtggtccggatttaaactgcggtttttcggtttatatgaatagccctaccattgaagatactctaacattcttgtgttttgtcaaataagcaatccacataagcaaccatcctccaaactttaaccattggagatgctaaaataaagaatactttttattagtgttgtttcaatcattgcctcttattttagttgatttattttaataatattttatagtttgaatttgtcaaatataaattatttttataaaataataaaaaagtaataatatttttaattaaaatattattaaaaaagtttagcaaaaaagtagaagttttttatatttagagagctccctatccattctctattatagagagctatgaagctcatttttttaagtcactctctattttatctaaggagtgtgtttagaaatggtttcagatgctcttaggtgtgattggaagtgagaatttgttgggagaaagaaaaaagtgaggaaaagataagaaaaaaaatgtggaaagaaagaaaaactttagaaaaaaatgtgaaaggctggttagcgacgatctggcatagtggagaagagatttagatctaggtggtgtggtggagaaggcgcagtctcgatagttttctcccattttctcaaacttttctcacaaaaaatgtggaaaataaaatcttagtttaattaaaacatttcccctaatttttccattttccaatattttgaatgccctttgactgagattttttttttgtttttagatttaatatgtgacatttctgatcttctgtcctctctccttgaagtttttgttgctaggcatagtgccaatataattgtacaatctgaagatataaaaatacatcttctggactcttccttcgagctgtgctagggtttcttcgcgagccaccatgcttcagtcgttgtcggcatgcatcattattgtctgtacgggatctgttgctctccgttaatgtctaatcgaagactgttggttcacgccgttaatggcttcgcacatcaacagatcgacacaacaatcatcacatgctactctgccattacgcacctaaaccttcctcgagcaggtatgcatcacttccaccataactccccgtattatgtcacttctgccattaattttgttgttcaaatcgctaatcgacccaatttctatccaaactgactttcccccttgcacttcgacactttctttccaaaaatagaatttaattacctccctggttactcatcattgccctaggatcattaaagccttcatcccatccaggcttcatttggaagaatttaggggcactgacagaaactcacaatcgagctttaatttccctggcttgaagagaccctcatttaatgttttgcatattgtgataatattatctcagtggtgttcgattaattctttttgctgcaaatcctgacaatcatttcgaagcccactacttgccttgattgtagccgatacactctccaacataattataacaatattctataaatatccccccaaacagtttattcttgcccatcccatatcatatatcacttctctgttacccgagtatttcatctcccccactatcatacacatttgttatggttttccatccctttcttgactgactttgccatggaagacctctctcaaactctcaactttgctcttaatctcattaacacagaaaccaaaatccattccctctctgagatacctgatgagcctaaagaagatacaggggaagagccctctgctttccttgcggtcaagctgctaacgaatcgtcaattcaacgaggatgctttcaaaaaatgccttcaccaaatgtggcccaaacgatattccattaatgtcttggtgaaggaaccaaatttcttcactgtggaatttggttgctttggtgatcgtaggcatgttcttattagccagccttggcattttgattacaaactcattattatgaccccccttgaagccagatcaatagtcactgttgatatgcttagttcaacacccttttggattcaagttttcggaatcccttttcttcatcagtcacgagctttagctcgaaagcttggtgaaattctcaaatgctttattgaagtggacacaacttcactcaaagaaacctagggcccctatcttcgagtccgaatagaaattgatgttaatcaatcctgttgggaatattttactaagatctagatttactaacaagtatgttcattaacatcctaaatatgaattctctaaaacaatgaaaataaacacatagggtgtaacgccctgtccaacagggacgagacgtgtgtgcaatttaataaagttcttgatctatataatatatat

SEQ ID NO: 231496 - DNA, 1624 bp, Cannabis indica
aaatattattcatttcaagtaagaatgccatcatggctggaaaccaatcaaatggaggtgctaacaacgggtgcatcaacatcggaatgatgaacgtaccgttatccagagctagaacaccgcctgtggacgtcgttaatggtagagtagggaggagcaacataagacctctcaaccagttctctgaaacaactgaccctcaagttggggacacgtccacaccaccagcaaccatgcactttccccctgtcactccggcggtggtatttgagggaatcatccacctcaccactgatcaatatactgcgatccaagacaaactgaacagaactgggccaaacgcccccctcgagtccctactactcgcacggacaaccctcaggtaacaaattctagacgtcgtaataaccgtgttcgcagggaacgaagagccaaccctgagggtctggacctgaattagcaaccatcgagagaaggaacacaggctgatgaagatcctgagcgacgcaatcctcgcagtcgaccatcgagagacaatgacgcagaatctgcctcttcgtcttcgcatggtcgtacaccaagcaggtacacaaggtccggctctgtagaaacgcagcaggggggacactatcaggtacatcgaggtgatctatgtgatcacctcaacgcagttttcagagcgcgctctcgcgccccccgtcacgaggaaacaccctgtgatccccatgtgggcgatcaaggtataagcactcacaataacccgcctatcgcaccgactgcgactactgggatcactatcccagcgaacctcgccgcagtagtcgcgactcctacagtcgcagcagtcccgactgctgtagctggaggaattgaccaaagcatgcttttgcaagctttgaaaatgctcgagcagcaaagaaagcccatatacaagctgcatgggacctctcctttcactacggaagtgcgacaagcccaacttcccaagggatttcgtctatccgaatccctaaaatataaaggtacctctaaccctatagattatcttgaaaaatttaatactataatggaagtggatcaagtaccgcagcttgcaaaatgccgcattcttgcagcaacgctcaaggaaaacacccatgattggtttacccaattgcctgaggcctcgatatcgacatgggaaacctttgtcgacttattcctcacgcactttcaggccacgatgacctataggccactctatacaactctggccaacatctaacaagaacccgatgagtctttacaagactattttaaacggtttaatgcagaagtaacaaaagtcgagaaggctcccgagtcttcgcttgtttgcatgttgataacaggtattcttccgtgaattgacttctcgaaggagctcaagcccgaaggccagaatcgctagtgaaattctttgctatggccgaacatcataaaaggatcgagaattctctggcacagttggagaagggcaaggataaacgtaaatcaccaataccgcgatcaagatctcgcagtccccgagggaagaattctagaggccgaagtgcgagaagacgcagcccacggagacaacgaagtccaaagctggccaaatctc

SEQ ID NO: 231497 - DNA, 565 bp, Cannabis indica
aatactatttttttttcaaacataaataatattaattttaaaataatcattctagttttattgattattttaggacaactcacacaatttatatacaattttcttgcctgggaatacatttctatgtttattattgatgcaagtctccaaagataaaaagaaaaaaaaattattcttttatctctcaaaattaattacataaaaatatattaaaaagaaaattgaaaatgatatttttttttaccaactatactgtagaaagaaactcgctagtaataaaaagttaacctctagagggggcaggatctgactgtattggttagggatgaggttatggatggttcgtcgaaggtggttgccgataagcttgacgttggttctcttagatcactcgctgagatgaaccgtaatggtggggtgaattctcttgacttggtgtcgcctgcagtgtagggccacccctcattatgaatgtgttggcgtggaacgtctaaggcgtaggtaatgataagacgttaatttcgagctctccacgttaatatttgagaggttaatcccgacattt

SEQ ID NO: 231498 - DNA, 1557 bp, Cannabis indica
ccccatgattgagataaacacactttaccttattttaattagttatacttgattgataaaaaaataggttacttttgatcactttatcttttcctttttattttaaagatcttttattttctttatttttatcaaatacaagaaaattgtttagccttataaaactagtgttacaaaaattctttcattttttaaaacttactgcatgattttctaatgaggattatgatgatgttgaattaaagtatcttagatcattatataagaatatttatttaagaataacctctaatttattatatatatacatataaaaaaaataagttataaatttaggtcaataataaataaaaataatctctaaattataattagttatgcattttataaattttatattaaaaaagtatacatctaataatatatcttaataatatgtatatatagtttataaatttatttatgtaggatattaataattatttatgtatattaataatataatacatatataatattatatttactcaaaaatattttttttatgatatagtattaaagattatttattgtattgttcttacatttgatatttttcagtgttttgattttattttttctaatatacatatacctctgttatgttataatactcaattaaaatataatttatttggtcacaagaatatttttgattgatgtttttattataataataataagatacatctcataagatgtttagcaccatcaaatgtccatttaacttattaatgataagaatatttttactaataatactggtagagcatctccaattgagagctaagatggtgatgtagtgttatgttaatttagaatttttgaaaaaactttctaataagggtaaatactattttgaatcttgtattttgcaaaagttaccaattgaaccatttgttttgttaaatgacaaaatgcatcttgtaatttccaaaatagtacaaatagaaccctgaattgattttttgtcaaaataaaatttaataataatttgatctaaatgtgttatgacaaaattatttacattttctgtatccgttcgtgttaggaattgtcttcaagttggttatattaaaaaaaaagttgtcaaaaattaagctcaagatcctatttttaccattttgaaaaatacatagtctattttgttatttaataaaatagagggtccaattagtaacttttgcaaatacaggatccaaaaatagtatttatccctctaataatgtgctaaattgtatatcaaatttagtacaagatataatattgtgataaatttgacacataataaatacaactttttaaattacaattttggcatcaattattgattttaatacgtacacattttaattacaatattatgattgattattttttaaatatttaatttaagtgatgattaatgatattttattttttattctaatttacatcttattaaaagttattctgcgttggagcacaatatattacaacaaatttaggattgatttatattagttttggcaaatttat

SEQ ID NO: 231499 - DNA, 1645 bp, Cannabis indica
tcactaaaattactctaaagaaaagaaagagcaacaaattctaatgatactataaatatatatatgtatatttaccttgaaagcaattatctcatatggttcagcggcaaagagaagatactgatatcttttgtcaaattgttggaccctctgtaaccatgaaaatgcaaaacacaagggaaagttagtttatcaattttttggataaaagaattccagcttaaattatttaaaaatacagagagatatgtatgtttcacgcagcatactcaaaataaagcacacctgctcataagatgacataaaccggtgccgtggcttagcaaggtcttcaatctcaggatattcaatctgcaggacataaccaagcagccacatcaatatctataatctcagaatttaaaggtatctttaaaaagtttcatttcagctaaacaatagagatctacctggaacaagagagatctctgcttggtctctggatcaaattgctttgtcacccggtagccaggcctaccaattttaactgcaagtataggttttgttttagtaataattatataacacaattaaagaaagaaagaaaaaactaatagcttgttagcaatagattatcaagaaaaacttaagacttggataaagttcaagaattttcatgttttgactaagtgtaaagatttattctagaagactacacactgctccaaaaatatgatcattcaaacttcagtactgtaaaactcaactgcgctatatccttgttaggcaacaactcaatttaaaactaaagaaacctataaagtcaagatgaatatatcttcagaaacctatggaacctcaagcatatgtagtaaatgtccaactaaccataaatttccaataactaagcggcatttctctacacaccaactgtttgataaaatgtatgaaatcattgttaaacaaacgaagaacgaaaagaaaagacatacctgttttacgaatattgactttccgcttgtgaggctgaggttgcgccggagcttccttggcctcccgagcagctctcttagccaaattcgtttgatgacgtttcccttgtgtatgagccaagtaattcccctcattattgtgaagagtcaagcaaagcttacactcatagctagaaaaccgaataaactcagttagaaaaatcgcattaaaaagcagttcgcaatattaatcgaagaaagggggaatctgagaaaggtaccttccgaggtggtttcgcataaaatagggatctttagcgagatcgattgtctccaaggcgagtcttcgcagtctttcgcggcggtcgactgcttcgttctgggcagaagcggctccgccgctgccgggcttggatccccactctctgtccatgtttgttcgccggaacccttagaggcctcggctgggtttaaatgttatggcatgtttctcgtcatcctcaacttttcttcgaccaaaaggcacgtgcggtgcacgggcaagactcttccactcgggacaaaaagaaaaagttttatcggttgggccttctacggcccaaaactggacaggaacatgtaggtagtaggtggtgtagtagtatgaggaaattacatgggaaatttacaaaaatactgaaatttgggttaatttt

SEQ ID NO: 231500 - DNA, 1201 bp, Cannabis indica
ctatttcgaaacgatcttttgaagctgactcttcgcctttcctctttctgctggacttccttcaaggtctcgatgatccaatccacaacatcaatcgttatagcaacttcatacccaaaatgtctagttctttcacaaatgcggacagagccgccatcggacgtcaaagtaatcatgaacaccttgtgtttggtgtggaaactccaatattttcggagattctgattataagtcgaagcagtattatttttccatcaaaaccagtggggtagtgaccttttttcttcccaaaaccagtggggtttcggtgcattccatggacagaagggccatggaaccccctcgtgtgcatggctcagttctcaatcagaggagagagaaaatttattgacatatcaggacctattaactgtgtaaaaagagacttgtagactctgtaaaagtatcataagagatcatctgtatagagaggtttgactgcctttaatcagtctaaatgttcagttgtaattcttgattgttctctcctttagaacaagttatcaataaaagagaaagaggactttcagtaacagatctgtttagctctaacaactctgttgtgtgtgttaaagaaaacttttttttttttttctgaaaaagaagtcacttgtcttagattgacccctcccaaattttattcgggtcttgcttatggaggatgaaaattgtggttacaacacaagcataagacacaaaaataataaataaatacaaacatgaatcttaattacagctgactatgttttcctagtgtaaaatgagactccattctctagtcaaatcttgaaatgctaacctttcaaaccattcgcttaaataagcaggtggccacccagaatttaatctttccctaaaccacttcagccccattttgaactcttgcaaaggtcctctcatttctttccagccaaccaccccaaaatatagccaaaaactgctgctgtccacaattgtttggttctctaccctcctttcagcttgcacatgatcagctggctacatgtatgatcataccaattggttggtgttatttgtagatgctgtgtacgtgacaatcacagaaggatgccacgtacagatcatgcatggttagtatatatcttccgtccttcggtgtcacggaaggtgctatataccagaagttattcggaggctctcc

SEQ ID NO: 231501 - DNA, 689 bp, Cannabis indica
atatatttcatttatacatataaattgtctaacatttagcacaaggtggctctggtactacttgttaagatttataaaacactcatacatatactcacaaatctaatcatatttctaaatgtgctttaatatagaaatcctaaatcataagtttaaaacatttgctaaatcaaagaagaagaaaatgataacgagatgagcggaagcattaacctgaagttattgttgaaaattacacagaaggttatgatcttcaaataatacactatttctttaaaatattttctctgatggggaaggagataatacaaaaaccctagtgtttactggggaccactacctatttataggctcgttatagaatgagttttaagtatctataatttggctcctcaataaattataaattaacttatgaaatctacataatatttttatgataatttaatacccttttgatgatacctataatataattggtcacttaaatttatattacactttacaatagcatatatattatatactatgtgcctataaatagtattatagtccaacaatatactcatagacgaacctaggatttccagttcaagggaggcatatatatttatatatattttttgtaaaagaggggcataatttatttggaaaatttgatattatatgcttaaaagtatttatctact

SEQ ID NO: 231502 - DNA, 1460 bp, Cannabis indica
cctggtcgtgaccacataatggcctactcgcgaccatggatcaatgtgcgatttcaaggctctctgtaagacccatagtcgcgaccatgaaaaagggtcgcgaccatgaatcaatctggtcgcgaccatggaacatggtagtcacgaactgagtgatggcccgaaatttttttttttcttttttcaacttttcacgctgtgcacagtttaacataaaacaaacgtctgaaagtttacaaaacattaaaatgctaaaaataaataaacaaaagtctaaaaataacatcaaagtaactaaataacttgggttgcctcccaagagcgttgtctttatcgtcatataaccggacgctgagttgcttttcaaagaagcgccaatatgatggcagacttggcttgatcaatttgacttcccaagtagagctttaatcactgtccattaactttaaaagtttctggactctcgcctttcagttccaccgctccatatgggaataccttaaccactttaaacggtcccgaccatcttgacttcaatttgccaggaaaaagtttcaaccttgagtaaaaaagtaagacctactgctcgggttgaaattccttcctaaccaaatttccatcatgccatttctttgtcctttccttgtatatccttgcattctgatacgcttcatttctgaattcttccagctcatctaattgtaacagtctcttctctcctgcagctgctaaatccatgttcaggatcttcattgcccaataggccttatgctccaactccaccggcagatgataggtttttccatacaccaacctatacggtgacattccgataggtgttttgaatgttgtttagtaagcctacaatgcatcatctagtttccttgaccaatccttcctcaatctttgcactattttctctaatatcagcttaatttcccagttggaaatttcagcttggccattactttgtgggtggtaaggtagagcagtcctatggcggactccatatctggctagtagagcttcaaactgtttattacaaaaatgactcccttcatcgctaatgattgcttggggagttccaaaccgagtgaagatgtacttttgaaggaaagacaaaactgtattaccatcattgggttgtgttgcagcagcttccacccattttgatacatagtccaaaacaaataagatatacagattgctgaaaagatggaaaaggacccatgaaatctatcccccagacatcaaacaactccacctctaagaaacctgtcaaaggcattttgtttcttctagaaatatttctcgttctcagacaatgatcacatgcctttacaaaatcattagcatctttaaaaagagtaggccaatagaacccgctttgaagaactttagcagcaattctgtgccactgaaatgccccccacattgtaaggcatggcagtggttcaaga

SEQ ID NO: 231503 - DNA, 1924 bp, Cannabis indica
tgagagcctttgtgaaaaaagctcagaaaaaccctccttacatacaaaaaaacaacgattttctccagggctggcaacggagaaaacgttaacacgcctcataaagaaaacactcaccgtcctggaaaggcgccagtgggctcccggaggccttccaacatgcaatctaaacgaactactcgctccaagaggacccaacttgagtgtggcccaagtacacgcaccactccctccaggaggacccaacctgagggtgccccaagtacacagaccactcgctccaggaggacccaacctgagggtggcccaagtacacggaccacatgttcaaggagaactcaacatgaagatggccaaattcctagagtaggggatgaagaaccaaatcttggctgtgctcagcccatggatgatggtgcttatgatcctccaaggtacattcctctagtcgagttggaaaatttccatctcaggtgccgcgtggaggaggcaaactggcaaaacgctgagttagagcataaggcaactacagccagggtggcacaggggaatactactcaaaaccaacctgactctcgagtaagaagaacacgaggcagacctcgtggctcataaaccaggaagcaggagacaactcaagggaaccctcaaacgccaaggaagaacaacctgaggaaattgaggttccccctaaaaatgaacaaccacatgatcaactggaaccatctcatagaaatgagaatagaaggcggccagaaaccagggaacaggaaattcctcatggaaatgagggaagtcttgggacacaacctggaacacgtaggtcgccagcgaggaacccccagcattcttcccaaacccatagggagggggctcatacaaaccctagcggggggaacactacgaaccatgccctggggaggaagaacggggcggtgaagaggcaagtgttaccttggggttgacaagaacccacaaccaatcaatgcgaggaggagaaagtactcgtcgcaacaatgattgataaagcacaggcacgagtaagaatgcaagtcactcaaggacgagctccatgagcaggacaagattcatacgcaggacatagtctgtgagtagaatgaggaccttcagcaattttaaccaacaggatctgcgagaacacttgagccaaaaaaaacctgatcttcgccaacaactcggtccaaagcaaggggatccactccaattgcgaatagatgagcagaggataagttcaggaggtatcaagtcagggagcaaggaaaacaatctcgatttgactcagatgaggaactcgagccataccatctagacatcatgaatactccttttccccaaagattcaaaaacccccacgtctcatcatatgatgggaccactgatcgagtctcgcatttaaacaattttaatactataatgtgagcttgtattgtcacaaacaatctacgttgtatttttgtttcccacttcattagttggggcaatgagtagctagttcaacaaatttactcatcactccatcacttcttgggaacagctgtctaaagactttaaaaagcagttccaggccgtgaggtataggcaaccggtagcgtcctcactcaccaacataaagcaactgcctaatgatacgcttaaggcatacttaagtcgttttattacccagcttactgcccttcaagcggggatcaccactgatctctccactaccggaggtaaactgtgggatgacctacagggtcgtccagttaaaaacatcactgagttcaacgagagggctcaggtgtttgtacgaaaggaagaagctcgaaaatagatgaacttgttcaaaactggctcaggaagcaaacccaacactatttcaacaagtactatctcgactaaagctgataacccgcgggccttt

SEQ ID NO: 231504 - DNA, 1045 bp, Cannabis indica
aagttttccaaattcttttctagatgttgcttaccgggaatatgctttaatgtaacgattatccatattgaaggcctctgtgcagtcatcctcaacatcttggaatctaaagaacaaaactgaattatcagtcaagtatttaattttgaaatatttagacggtttattttttctacatttaaatatgttttctaatgtttttaattttataatattaaaaaatttattaaattatattttataaaaaaaatatccaaacaaaacataattaatatattaactttaaaaaaaattattgctataaaaaaaaactttaaaaaatttatgtttcaaatattttgaacacgtttaagtttcactagatgaaagttacgtggcaaaccacgtaaatataagttttatttaaattctagtaaattttgtttaagaattcggtaacaaatcaaattgtaaattatttattaaacaatatgttttataaaagtaaacttgttaagaatgtcataattgtgtatataaacctataatacacattgttattcaaatgttataatatggatttcaatccgtcccgctatacatctctcacacactcacacacccagccacttgagctatccccaagtggctacacacttaattattgtattcataaagtcatgtaattataagtggatacaaataaatatagcttattaatgctaatcaagagtgataaaacagaatcatgcaatcgtaacaagtgctcctattagtaatgtcaaccatgctatacttcattacctctgccacgttttcatccattaaagtaccatcactacaacatataatgtaagagtacaagggttatagtcatgaataaataatacacataaaattttccaaaaaaattaacgaagaaacatttatgaagagagatcaatattacaatgatacgtaatacattagatgccataattttgatttcaagaaccaaaaactaaatttggttacaatatacacataccctcaagacattctttaagttttccaaattcttttctag

SEQ ID NO: 231505 - DNA, 811 bp, Cannabis indica
atagtaatatgcagatagccagcctctgagttatttcaacatagaaacaaaaagcaactaatcgcatcctgagaaattaccacatcgtaagccatattcaaccgaagcctttcattgagtataactccagcatcaggcctccttaaaagtttatacaaacaaccactacaattgaaataaataataatgttcagtgcattaatatattgaggtgaaagaggaaacaaataaatatagacatcatgaaagacaaaaccagatgatcttgttacttttttaagtactctgtaactatggagaagtttggtggctgagtaatggcaccaataaacctaacaatatttgaatgttgcaaacgtttcatgatagcaacctacaaccaaagtatgattcagaaattatcaactaacaaaaaatgacaaaaaatcttactataatggtgtttggaaaaggaagaagcaagaatacaccattattcatacttttaatgatttgcattgaaatataaattctagcaaacctcctcgagaaattctttgaagtgctttgcatgaaaatcttgttccttgagaactttaacagccacatcctaaaggttattaaaataactagtttcagaagcaggcagagacattccattagaatgattggcaaacaatacaatgcaaaatggtaagcacattaagcattttcagctttagaattgaacagaagaaaccatttcacatattcatagtaattatatactacaagtaaaagcttagccaatggctgacctgcttgctttcaatacagagagagagagagagag

SEQ ID NO: 231506 - DNA, 1085 bp, Cannabis indica
tggatacacctacaacaacatacttccaaacaaagaccttactagagagtacggctataaggtgtccaatcttgcacaacataacacatagaagtggtatcccaacaccaccaaggagcatttccaagaaagaagttgtatagctactgacaaaagtgcataaaggctctacagcaactaccccggggggcaaagccaatcaaatacaaatgcaatccaaccacagcattgaccgggcctttagaaggctggccgagcatgtcctcagcaagatggctgacaatagaatccacaatctagtcagccaccaccttcatatgctagccggccatggccttatccaagtgcccagccaatgctctcttaatgtggctagccacctagttttgccctagccagtctgatccaccagcagtcgtctctcaaacttctggtctacggtgaccaagaagtacacaacatcttgctagcaagatcccttaacaaaagggaaagaagaagagactaagccaactcaaagttgcatggttgtgcacaaggtgttactaggcccatcaacaaatatatcgaggaaaaaattattcacaagagaattactctttgaagaatattccttgacagcaaatcctctgcagcaagcatgttcagaccaaatagaaaaggtctacaccatgttacaagataaaagtagaggtgcatacaagtttggcgagtacgacgagagcttaaagtcagaacttctacccaaacactaaaataaggaaaatctcgataagtactctcactagccaacttgtcaattaagttcctctaacatttcatcgtgtaggaacccataaaagtgctcgtacccatgaccttcttggcgtggtctcccaccattcttcagcagtggccttaactttattaagccatgcaagggtagccactacgtgatttcaaaagcgaacactaagttgtaagattttattacacgttagaccgactgtgtctaaaccactttctcacaagattaatttcttaaagttactctttcagttccacatgcatactatggatagcaccccaaggaagaacccaggcaa

SEQ ID NO: 231507 - DNA, 1289 bp, Cannabis indica
gatggttttggttgattttagggttggtatattttgttcaaattctggtgtaaggctttgaagttctgggttttttcttgaagctttgaacttcaagcttaagcctatgtgtgcaaccttggtggttgatgtatgctttatttttgtttgttgttttgatttttgagcttggtgtgatgctcaaatgaacaacaatgttagattggtttggttttagttgaaaattttgattttgtatggttttgtttgagttttgggtatgttttagttgaacttcaaagatatgaaaaagttggcatttttagaccttaaaaatgggatttttggattttttgaacccagtggccgcggccgaatttatggttgccgcggccaaagcctagcagagagccatcccattttctcgattttgttttggccataagttttgactcgggactccattttagacgttctttatatcattagaaagcacgtttcgagctctatatgttaatttgtaaatagaattctaattatgtgattactaaaagttaatttttggattaaccctatttgtgaaatctcgggaatgtttgactaggactaccgacgcttgcttaggaacacccagggatttaaaatctccacatacttgggataccgggtaagaaaatagttagcacgtagagttaagcgcggtggtgctcatgtttaatattataattgtgattaattgagaaccaagattagggttattaccttaaagtgagcagttgttttgcctacggttattaccctagtgatttaaatgatttgaaatgctataccatgctatatatgttgaagtaaagaattatgcatttaaggcataatttggttggacttagtaattagaagcgagatgaagttctaagaccatattgtaattagacgtgtgagcgtaacacgtgggtctatgtcacatagacataaataggcgtgtgagcgtaacatgcaggtctatgtcaaatagacaataagtgtaatgacattaatatatatgtgataggtactattgtgtatgttgatatttatactgttttactgggcttggctcacgggtgctctattgtgtaggaaaggataaatctgcctgtaatcagtcatgagtttgagagcttaacgagggattgtacatgttcgggccatctagaccaagcgggttgggtctagaagcaagtgtgttttaaaatcttttattttaccgcttagctcggcatgtaaaactaacttgtaatatttgctaaaagttttgcgggatcccgaaa

SEQ ID NO: 231508 - DNA, 1242 bp, Cannabis indica
tgcaatgaagtttggtctagactaaatataccgaagcacaactttctaacatggttggctatgttaaataggttgaagaccaaagataggctatgcaaatacaaggtgatcgattcatctacttgccccttctgcaatagtgcagaagaaaccatagaccatctgttcttcaagtgtgttttttctcagcaatgttttctaaagctgaaatggtacacacgagctgatagtttgagtaacattttaaaaagcataaggaaagccaagcagttcaagttcaagaagtgtgtaaaagcggctagtgttgcagccctagtgtatctgatatggagaacaaggaatgacttaatctggaatgagaaaactcagcagccaaccaaactattccagcagctgaaaagaaatgttaaaattagagtgatgcttgtaatgaccaaaaaaaagtagaaactcaaagatagagaatggtttagaaagtttgtaaataattgtatagaaattattaaggccattgatggtgcttataggttgtaaataaaagttttgtgcaatgaacctcatctgattcatcaaaaaaaaaaataactatattatatcttaacaacaacatgaaaataattataaaacaacaaaaagacaattatgaagtaatagaatagtaacaagacatcaatttcgttgtaatttgtaaaacaatatcaactcctcggcatgtttttgtattacggtattctttttttttacttagttttaaccacttgatttatctttttgtactactacattacttttttggataaaatttattgttacaacttcataatttcaactcctttttttttctctttctttttgagttagtgaaagttaaaatgacaatttattttttagaagttaaataacaattacattaatgatagaaataataaaatcttatgattttaaaatgtggtatataatataatgtttaatatataattaaaataataaaaaaattaactagataacaatataattttaatatgtcaatatctaatagtgcacattatgtcaattaaaaaaataaaaaaacttacattgtattttaaaaaaatgtgtcaaaaaaataaactaaatatatgtatctacatctacaaagcaaaacacatacaacaaaaaaattaagaataaactaaaaatatacaccataaaaaatgcacatgaataaaaaaacaactaaaaaataactgtagaacaaaaaat

SEQ ID NO: 231509 - DNA, 1614 bp, Cannabis indica
gctttcctccaatcaaggctcattacggataacgttttggttgcttttgaactcctccactccttaaaacatttaaagagaggcaaggaaggttatgcagccattaagcttgacatgagcaaggcttttgatagagtagaatgacatttttttcacagcatgatgattacaatggggtttgctccagcagtagtagatcttatttaccgatgtattagcacggtctcttactccttttcagtcaatggttctactcgtggtcacctaattccaacccgaggtataagacaaggcgatcctttgtcccctttcttattcatcatatgcgcggaaggactctcaagactttttcaatttgaagagcaacaaagcaatttacatggccttagtattgcaagaggtgctccgagtgtttctcatttattttttgccgatgacagccttgttctctgccgtgctaatcaaaaatctgccatggctatcaagcactcccttgcttattattgcagagcatcaggacaaagtcttaatgttgaaaagtctgttctctccttttctccgaatactcttcctgcaatccagcagcatgtacagcaggttctacaaatggaaattaaaccatgtcatgaacgttacctaggcttaccttcttattcagtcagagacaaaaagatactttttggtgaaattaaggacaaactctagaacttattatcagcttgacaagagaagctcttctccattggtggcaaagaagttttactcaaagcggtggctcaatccatcccaacttatgctatgagctgttttaaactctccaaatctcttattgctcagattgaaaccatgtgcaacaaattttggtggggttccaactcctcctcatcgggtattaactggaaaacatggaaggctctaacacaatctaaggttcaaggaggtatgggttttaagagttttgttcattttaaccaagctttattggcaaagcaagcttggttaatttttccaaatcccaattctcttctatcccatatactcaaacctcgatattttaagcataattcctttcttgatgctactttgggttcttacccatctttaacttggagaggaattatttggggtaaagaacttctccaaaaagggcttcgatggaaggttggtaatggtgaaaacattttctgtgcatcaagtccttggctgcctggaatcacttcatttaagccgctggttttcaatgggacaaatatcaatatgaaggttgctgatcttataaataatgatagacaatgggaccatgacaagctttccttgctatttcttgaatcggatgtcaccaaaataataagcttgccattaacactcacttctcagcaagatcaacttatatggcatcatgattctcatgggttctatacggttaaatcggggtacaaacttgctacagatttggaagaacaacaaccgaatggcagcagtattcaagctcaacaatggtggcaaaagttttggaaaatgaaagtgccatcaaagattagaattttcttatggcgtgctattcatgattgtctcccagttgcggacatccttcactatcgacacatttcggat

SEQ ID NO: 231510 - DNA, 1219 bp, Cannabis indica
catgagatgagtaatcgagggtgctgtgcgagtaactttgaacccctttattcttccattgtttgtgtagtcctggagaagccgggatagcaaatctacagctacgatgaatagggtgggggatagcggatccccctgcctaagcccactcgtggggttgatagaaccttgtttcaccccattgatcaacacattcatactctggatttgtatacaactcttaatccatcccagcagagggttcttgaagccgtgaaagcttagagcctccattaaaaaatcccaatccatcttgtcgtaagccttctccatgtcaagctttatcatcatgaaacctttcgacccttttttccgagacatagagtgaatgatttctttggcaattgcagtattctcggtgatgcatctccctttgatgaaagtcgtttgcgttggggagattatggaaggaaggatgtctctaagacgggtggtaatgatctttgatatacatttatactgcacattgcacaaggcaataggccggaagtcacaaaccatagatggacagtccttcttcgggactaatactatattagtataattgatatattggggtaattctgccgttgcaaagaagtgattgatgaatttgataaagtccattcttatggtgtcccaatgagaacgaaagtaggccactgggaaaccatccggtccgggggccttgtcgatgcccatggaggctaaagctttcaaaacttcctcctcagaaggagcatccagcatatcaaccctagcaatgtcgtcgatcttcaaatgagtccactcctcagcattaaacttgagccgtgagccattcttggagaaagtacttgtgaatttgtcaatgaataactgagctatgtctttcatattttcaatccactccccctggtcattctttagacattgaatatagttacgtcgtctccttgttacggtactagccatgaagaatttcgttgagcggtctccattttttagccaggccactctcgacttttgccgccaaaagatttcttctcttcttaacccctcctctagattcgctctggcttcggtgtgagccttctcatcaaagttctgggcctcttcaatgaccttaagtttaggatagtttattcatgaaactagaaccaaactacaatactctcaataactaattctaatgtaaaatagctacaaaaataaaaatata

SEQ ID NO: 231511 - DNA, 1112 bp, Cannabis indica
ccaaaggttttcgaacctaaatttttttcttcccaccactttcggacccacatcaaaaaccacctgaattgggcagtggtccgaagtcgacacctccaaattcacaagcttagcaagtgggaaactctcaatccaactttgagaaactagcgctcgatcaatacgaacctcaatccaattactagtacccctccccctctcccaagtataaggataaccacacaactccatatcacacaacccacactcatcaagcatagtacaaaagccatcaataagccaattaggataggaattacctcctcgtttatcggattgggaagtgacattattgaggtcgccaacaacacaccacggcagagggcttcttgtttgcaactcacgaatttgatcccaggtgttccttctgagattgcggttaggctcgccgtacaaaccagtaagacgccattggactccattctcctctgcaatagaaacatcaataaaattcaccccgtaccccatcaactgaacatcactattctgcttccacaacatcgctacaccaccactcttacccctagcatcaaccgaaaaaactccctcaaaacccaatgctacccgaaccctttccaacatatcagcttttgacaaagtctcacacagaaacacaactttgggctgctttggataactaaatccttaatgaattggatagcccatgggttcccaagcccatggcaattccatgacaaaatactcataatgattggtgggcctgaacaccaaggcccacctgtacaccattttttgacataacatttgaattgtcaaccaagcccacattagtgtcatccgaaactatagtctcatgcaaagtttccttacccatacgtcttcttttattatcaataatcagcaatgagtcatcattttggccagccaattgcatttgctcattatgatttttaccataattatcattggtatcaatcccttgattctctccagtaaccaccccttgattctctccactttccattcctgaaaatcctccatccgatcgcaccatatcagcagaattaatgtccatatcgcccctgtgattccggtgccgttctccgccagtc

SEQ ID NO: 231512 - DNA, 1326 bp, Cannabis indica
gtgcagcttctgcagctttagtagtgtcatctgccaccaatagcccttttttatgcatcagataacagaaaatttctggagtattgaaagcatgcttcaacttggaaataaaggaagaggggaatacaaaagaactgtttccaatacccaaacgtagctggtcattatgaaacctagggctaaggtagatttttagatgaatgaacaaatgattatatctatagatcattacaaggttgctatatattgcctgatagccaaattacctgctgatgctgatgttatcggttttccaagttcagattccttggttttggctttcatttgcagtcctgaagcatctttctgaacagcagcctggcttgacgcttcattggcctccctttcagcagcctcttttgttgctctttgttgagcttccattgcagccctatttgcttcttcagctctgagcttcgcctgcattgaaaatacttttagtcctaacagcataaaaccaagataataataccaaagcgcactaagattatatctagaagaatatgtgcatatgactatacaagaaagaatagagaaatgtaacaaccatctttatgcatctaccaaaagaaatgaataatttgagaaaaggcaacaaacctcagcttctgctttggctttggctttttcttggcggagtttttcttccagaagagctttctcttttcttttggccccttcataagccgcatcacttcttattttcctttcttcaatctgggacctcagttcatggtccctttggatagcagtcaagtgattatcaagtgcctcggcactacagatgatggcaagtaattagaaaatagaaattccaaatcagacttggaacaaataaaaaatgcaaaagagagaagaaaccattcaaaaaaacagtattacagcaaagtaattgcggtcttacatttttcgttgatattgggtgtcaagctttctctcattttcaagccttgcttctgtgtacttatcaactcgaagaaatgcagaagcaaccttgtcattttcactcatcagatctgactctattgcaaagattttgttcctaatctcctcctgtaattgaaccaattaatattgtcatacctaagaagggaattctatgaacataagaaggagaaatatttgtagggaaaccctggagcttgagcatgtagccaaaaggtatgagaaaaagtcttcaagagatatgtgccttggttattcttgatactagtttagtaattaaacaatttgcaaattgcaacaaaaataatgcacaaattctataaaagacaaaacatcatcagc

SEQ ID NO: 231513 - DNA, 1177 bp, Cannabis indica
attaagccaagctcgaaagaaatcatagtttcacttctaaatacttatagaaactatagattccatctatgattagcgctcccactcaattatactatcaagttcctaagatataagtattcagccgatcaagctttaacaaacaactctaagaacatagataatacaattaagcagaacctaaccatatcaggattaagatctattgacctaagatcaacttactaatattgacttagatagatataacaatgagtttatgatatcttatctgagttcaatatcggtccagtccgatgtatactccatatatccaatcctaacatacttttccaatgtcctagaaatgacataatacttatccaatgtgtaagtaagctctaacgttgattatcatgttagtctaaatctagtgtactgaaattatgagacttaaactttagaacatataatcatgattatatgtcactgtgttgacaacactataatcatgaataactatatgttttggatttaataaattttatacattaaatatataatcatgaaataaatcatgtgaaccatgcaacataaaattatttatgatcttttattaattaataaatttgattacattgaaatgattttatatagggcacaaaacccaacaaacactcacttgcactaatataaaactaaaattacattttaattaatctcaataccttgatttttatatcaagtgtagtatgtagtatttctttgtaataggatttgacaagttgtattcaatacaatctttctccaccattacatctctttagtcacaaaattcttgatattgtgaatttcctttctatatgtctactcctcttgggatacaaaattccttactatttgaaaactatatttgtgcaggtctgaaagcaacactagtagttaatccattattggaataatgccaaaaattgtatagaactttccataggttgaatacttatctagtagccttcctggccactttaacattcagtctcactggaagagttagagactccaaataggtttttacacttctccaaaaatcactgctccaccctaaagtaatcgtcatctcataagtagactttctagcattaacgcaagtctagatatttaatttggtgtagtctaagagtattaaaataccaccctt

SEQ ID NO: 231514 - DNA, 1247 bp, Cannabis indica
ccaagctacgctatgaacgtgtttctgctgccacttgagatcacaagggatattgagaagctaatgactaagttttggtggaagtcttcatcgaaacaaaataaaggaattcattggatgtcttgggatagaatgtgcaagcacaaggagctcgggggaatgggttttagaagtttgcgggattttaatcttgctatgcttggtaaacaaggttggcgtctccttcatcacccgaatactttggcgtccaaagtctttaaagcaaggtactttccacacgataactttctttcagccaagttaggaagtaatcctagctttgtttggaggagtatcttagaggctcaatccttggttcgcaatggctctagatggttagttggatcgggtgagcagattaaggttattggagatgcttggctaccagatatgactaatcctatggtcacttctagtcctctcggcctgcaagaagcaagggtgcataatctcatgatcccatcgtctcgtgaatgggatgtggacttaatcaatgatatgtttaatgttcgtgatcgcgctcttattcttagcattcctctaaacttgacgacccatgaagacaagattgtatggattaaggaagtgtcggggttgtactcagtcaagtcggcttacaaactgttacaagaaacaaatggttcatggaatagcgccacttcctctgatttttggaagaagttctggaagttgcacataccacccaagatgaaggacatggtctggcgggcttgtacaaattgccttcccaccatgattcaactccgtactaagcatgtggatgttgcaatagagtgcccgatgtgtaatgagagtgaggagtcaattgttcattgtttggttgagtgtccagcggctcaaagatgctggaacagagtgggaatcgggactggggtggctacggttgctggtttttccagctggtttgaggcgtgtttccagcagtcaaatgaagacagccgtgacatgcttgctgcaacatgttgggcaatttggggggcccgtaacgacaaggtttggaaccaaaaaaacaccgatgcaatggaagtagtgtcatctgcaaagagttatcttgaacaatggaaagttgctcaagtttcgggattcgaaactacattatctggtttaaccaaagatgatggagcggagcaatggagattaccaccgtcgaatagtgtcaagatcaatgtagatggagctatttttgc

SEQ ID NO: 231515 - DNA, 986 bp, Cannabis indica
aacgattgaaatataataaagcaatataaagacatagacattttatagaggttcagccccgagcagttcagtaatagcctaatcctcgttatttgtattaactcaagaacaaggagaaaggttctttttcttatagctcttacaacaatatctctgaatatgaattcttagacaatatttctcaagtaaaaatccttcgaccctttgcccagtgaatatgcatcactatttatagggctatgagcttggagaagaagtatttcccttctagttacaatggatataagcagaaagattgtatagtaaatacagaatacatcgattatgggatttggacagcttgccatatctctgcaatctgatccttaagttatagggatttcctggatactcacgatgcgaaagctgaattcgctaagtgttggtcgtcctgtgcggattgctgattgctttgcctcaagcatgcatatgaggtatcctactcagactatatcttgcgagcagatactcggagtcgattccacgtgtcaccatcatgtgatgccacgtcagagtgcaaaaattgggataacaaatatttcggtatctaacttgctaaaaaaggactttacaatgtttcactcttatttataattaaaaatgtccttataggcttttcaaagcataagccctaacaatctcccactttccctaaaagaaaattgggcttctcccttaatcccatatcagttatatgacccataaatgatttcaatggtagagtctttgtgaatagatttcccaggttatgttctaatgtaatctttaagaccgtcacatcacctctctctactatatttcttagtagagagtacttgctctcaatatgtttccctctattgtggcttctgttgggttttatgcccaaaataaaactcatttcaatataatcatatttacttattaatatagatcagaaataacattcaatgttgcatggttcacat

SEQ ID NO: 231516 - DNA, 1681 bp, Cannabis indica
aaggatgaggcatgtagggtacttgaatggaatggagaaaatttttttttgagattttttatttttttaaaaaattaagcttacacatatatggtataaaaaataccataaaatgatttaaaaattaaaatatgccataaaaagtggtcaaatttaaaaaagccatatatttgtaacaaattttcaaaaaaaccatatactgtaatttcctcattgaaaaaaagaggcccattatttgtcactgctagacaggccggccctaaaaaattatgggcctaaggaaagtttaaaaaaatgggtctgttcttttgtctctctgttcttttttttttaccttactttcataaaataatgcttttttctatagtcaatgcctcaatagtatagtttttctttttcttttttaatctggtatggataaatgggaggaaattatactctatactctttttatattgtcatcttttacttttaccctcttttttaaattctatcattttacttctttttataaatactttgtcaattctgctcctgtcacttcaatatactctatgtgactcttttatgttagggtattttgagtataatacatataaaaagaaatatgtttcaattaaatataaattaaaagtaaatttggttaattgataaataaaagaaatatttttcaatatgttatatataagatttttgggtcttaaagtgccggtgggccctaagacgggcctagctcaccttagctcagaccgggcctgctggtaggtgacccttaagactatgaattcaaaagtcaacaaaaattaattttgcatgctttaatatggctgtgctgtacctggaataatatgtttattttgaaaatggatcaagacactaagaagtaatgattgtgatttggtgattcgtatgttgtagctactataacgtcttgtgaatctgttattagtagttggttaaacgtgttgttttatattaggattaattaggtacttctttcttatttattgaagagcatagatgtctaattgtctagctagtccaagcatttgtgcatgtttcctggaacaagcttttatacataaaaacttgtttatgaattgtgtgttttgatatcttgttctgaattccttaaaaaaattgttaatatgtttaatacgaccaaaccaacaatcgttttgtcaactagtttattttatttggtttaaacaaagcgttacgtttatgcacgtcgaataaggtatatatataatatatagataataaaaatgtacgttgcttgattatagtatttcccagaaatataaaaactaggctgcaatctcattctcgcgtggaaatctcttttaccaagtgtgtcactattatagtttatagaattaattatgacctagatttatatatgtatagctattttgtgtacaaggatattttctaaaatatacaatataataaaaggttttttcaaccccacacatagaactcaaagaatttgttggaaccttaagcattttcaaattgtgagaggtaggaaaagaaattaaccaattaagacaaccttcccaaataaatactttaatcttaagagggatagaaagactccataaatagttccaccaaaaagaaaggcctgaagaagaatcaacttgacctcttcctaataatcgaatagcatttcaac

SEQ ID NO: 231517 - DNA, 967 bp, Cannabis indica
aatattacaagttatttttacatttaagcgacaaaactgagattacaaaatacatcaactagttgacccagcccgggtggtctagtatggcgcaaacatgtacaatcaactgtcaagccctcaaactcatggctgataacaaaatgataaaccctttcctgcagaatagagcactcgtgagccaagcccagcaagacagaataataatacaacatgataattataataataattacattttatcccacacgccactgcgtatatattgtgccactgtactttttatcacattattcctatgtaatgatgtcactataattaattattatatggcatagacccacgtgttacgctcacacatctattaatgtctatatagcatagacacaagtgctacgctcacacgtctattaatgtctatatagcatagacccacgtgttactctcacacatctattttacatttaaggccttaccaatatttgtctctgttatagttaccgagtctaacctgattatgccttaccggcataactcaactcatatatacataatccatacattatgttcttatagtggtttatcctgatgatgtctaccaggtctaacccagttatgtcttatacccataactcttgaaatatatgcatacattcaataccttcaatatatactctaatgtatgaagttttagggtaataaccctaacttgcataactaatcgtttactcatacaacgcattatagcatgctcaaaataatacatattgagggtaattaccctaattcaccgtatatatatatgtatctttagggtggtaaccctaattctcaacaacttaactacttaggaaaatatccctaattcacaacacaagcgcttaaggtaatgaccctaattcacaacacatattattttagagtaataaccctagttcatgcgctcctttgattaacaatattatat

SEQ ID NO: 231518 - DNA, 636 bp, Cannabis indica
cgcctgatttgattcactgcgctgtttctttttgtgtgcttaatacacagccttctatctaaaaataataataaaaaaaaattaagagaaatactaaaaggcaccagcggtgccaagtactttcctacgtgtcaatattgtcctatatagtttaatataatagtttttagggagtatcgctaatcaatcgcaaggcaatacgtcttaagggtgttaggcaccactcatgcccaatagcaatgctctaaaattaatgagagctctaataaaataatgcttaggctaataaaacaaatacacacagcctacttcttttttctctatctggaaaattaaaaaaaaaaagaaacaataataaaataatgggtagggctaatgaaatttcaaaagactctcaatatatcatgagaaactctaaaccattgcacaattataagataatcaccgcatagtgttaaatttggtacactaaatattaaatttactaaaatttttaatatttattagggtaaatgttattttagatcttgtgttttgtaaaagttatagattggactctctgttttgttaaatgacaaaatagacctgtattttctaaaatggtaaaaataagaccctgaacttaatttttgataa

SEQ ID NO: 231519 - DNA, 2044 bp, Cannabis indica
gaacggaaggagtcatataattcaactgccattaatgtagagttttctacaacttttatgtgtttatttcattgttttatggaattcatatttaggatgttagattacagatttataatcaaacatacatgttagtaaatctagatcatggtaaaataacatccaacaagtaagtgatctcatattggccgagctcaatggcccacttgagtagtcggtcggatgctttaggcttctgtaacacctgtctcaacgactggtcagtgtacacccttattgggtgagcctggaagtatggtcttagctttctagaagttaaaagaaaacaatgtgtcagctctcaatgagtgggtatcgacttttagcgtcaatgagccttttgttggcatagtacactaggtgctaaacaccatcttcttctcttattaggagtgcgcttacaacatattctgtaatagctaagtatatgtccaattcctcattgtttagaggtttcgataagataggaggttgagctagttgcttctttagctcttggaatgttgtttcacactccttcgtccatttaaatttcttattttctctgagtatgttaaagaaagagacacatttgtttgtggattttgacacaaatctgcttagtgctacaatgtgtacattaggctctgtacttcttttgtttttgtgggtgacttcatgtctaaaagggcttggatcttgtccgggtttgcctcaattcccctggcgttgactatgaagccaaggaatttgcctgagcctactccgaatgagcacttcagggggttgagcttcatgttgtactcttagaggatcttgaagcattcatttagatcctccacgtgcccctagcctttttgcatgtcatccacataaacttctatattacggacaataagatctttaaacatcttatttacaagtctctgataagtggtccctgcattctttagcccgaaaggcatgactttataacaatacaggcccaagtctatcatgaaacttgtatgctcttaatctggtggatgcattttgatttgattgtagcttgagtatgctaccataaagcttaggagctcgtgaccagttgtagcatctactagttggtcaatcctcaaaagtggaaagctgtcttttggacacactttattcaattcgataaaatatatgcatactctccacttgttatttggtttgggaacaaagacaggattggatacctatagcaggtagaaagcttcaatgatgaacttgttggcactcaacctgtaggagcctgactgagtgacccttcttggttgggctgcaaccctgggttggccagaacctagctgggcataccctgggagagggtatgtccatggctggtcagccctaggcttgtcatcttactctggccagccagccctaggccaagtagctggccatggccgaccagccctaccatgggcagttgtacatgggcggccactctatgctgggtagtgtctggctgctcgttctcccctgattggccagtacagcctgtgtgttgacagggggttgatcacactaatttttagggtttggtggattcaactgtccgaagtgattgttcaatggtggaacaaaatcacttcaattctcactccttaacttaatgttgtcttaggtgtttccacatgttcccagacctagccggttaaagatagaccttagaatgatttgctcccaaatatttcagagaagaattttgctctgtaggactgctagagtttggctgagtgggggtgttaatgagccacagatgcctgcctggtcccccatgccactagttgccaaggtttggctgctcccgtcactagatctatgtggcaggacttgtccgtcttcgggcaggggaagtttgtcctcgttctcaaagaacttagttagactgtttgcctgtagaccctacccaatttgtcgatgagtctccattggagaggatctctaatcagatcctatcctctcccagtagttctctcattgaactgccttatcatgt

SEQ ID NO: 231520 - DNA, 1098 bp, Cannabis indica
tgagctgattcaagatgcgttggaaagataaaaaagagatctaaaacttttatgttttgacttcttccaaaatatgatcataacatagccgaatttaggcttaaagtttcagctttattttctttcaaaattttctctattttatagattactgtttttcgaaatttgtccaatttctacattccaagtgtagaaacctgaaaccaaagaaaaacaagcataattttattctaaaaataataataaagaagaaaaataattgtaaaatgtgacccaaaacttaggctaaaaatagcctaacagagagaatgagataaaagattctagttggagttcatcttatttgggcgttcgatggtggcgtgagtaaagaccgtgttgttcgttggagctttaagatctggtataggaccggtggaagaagactccatagaagatgttagtcaagagagacgactgatactatgtaaaattttaaggaaaaaaatatcaaagaataaacaaagaaagaaagacaagagaagatctcacagaacaaagctcactgatttcatcgaattcatggatatttatacagtctttttaactaaaatacagttaaaataaattgaccaaaacggttagaaaattaattaggaagcctaactaacttaaccaaatatgctacctgttaatgcttacatttactaataagcccatctcaaggtggttcttgtaggggtgacaagtttacatactaatgatgttaaaaactaaaactaacccattttaatatgtttatataaaaggggaatattgcgaattaaatctctaaaagtttattttgatgcagataaatctacaacattaaaaaatagcagtaatagtcttcaagctcgaaactcttgtaagtccattgatcctcattttaacataatcattagttgtttctaaaaatatcacgtgttgatattaaattgctgcataagtctttaaaaagctcattttgatgtagataagttcctaatctaaaaaaattacattaatagtctctaaatttgagattctcattagtccgtaagtacccaatttaacaactttgtttgtagttcttaaaat

SEQ ID NO: 231521 - DNA, 1286 bp, Cannabis indica
aaaaatttgaatggaccgacgaatgcgaggacgcattcaaaaaactaaaagaacacatggctaaacctccaatcctttcaaaacccatcctcggagaagacttgttactatacttggccgtctccaaaaatgcggttagtgcgaccttagtctgggaagaggaaaagacttagaaccccatgtactatgtcagcaaacgcatgataggggcggagacacgatatccagtgatcgaaaactagtctttttcccttgtgatagcctcaagaaagttaaaaacctattttcaggctcaccccattaaggtattagctaaccatccgctccggcaagtcctacagaagccggaggcatccggaagacttctcaaatggcccatggaattaagcgagtttgacctgcactacataccgcgcacttccataaaaggacaagcactagcggacttcataacggagtgccatgaagcagaagctagtgcaaacatgcccaaaccacaaaccccagcatggaaagtttttgtggacggtgcctccaacgaaaacggatccggagctggggtagcaatgatatccctgaacggacttcagctctaggcggcccacttttcaaattcgaagcttctaacaatgaggccgattacgaagccttgattgcagggctgaggttagcaaaatccgtaggggccacaagagtagaagtcttcagtgattcacaactggtaataaatcaggtgttaggagagtatcaaacgcgtggagaaaaaatggtcgcgtatgtagcaattgtccaggatctgctccatgagttcacagactacaaagttgaaagaatcctcaaagaaaagaatgctcacgcagactgtatggctaagttagcatcagacagggaaattgagaaactgggggtggtacccattgaacgcctctcggaacaaagcattaaagccaaaattattgtgccggcagttgaacaagagctcaactgaatgatccccatcatcgaatacataaccaatgtcgagttgccccaagaaaaattactatccagaaggatacaatatctagtgcaccgttatgtgatgatgaataatattctctatcgaagaggactcagcatgccatacctaaggtgtgtatcggaccctgaagctaagaaaattaagctagaggtctatgaggggttctgtggagatcatacaggaggcccgagtctctcaaagaagatactgagacaagggtatttctagccaaccatgaaaaaagattgtatagactacgtccaaa

SEQ ID NO: 231522 - DNA, 1041 bp, Cannabis indica
agtttctcatctttttctccctttattcttgaatcttcaattttttgggtttccattgtagaaaattcgattgttcttgacttgttttaggaaaaatgtagaaaatctaggcttaaaactttgtaactttgactgtaatagatcatatgacttcattgttgcggaattttgactttaaatttgcaatgttcggttctcactttgtccattcagggtttagtgaagattaacccataattcaaaatttatgaaattttaggttacgaacttaacctttacgaaatttttcatctttttaatttgttgattagacccgatcggtatatttgcttgtttttgttcgatatcccggccaaatactcatctcgtgtattgtcttttgtagatgaaccctggtgagttttggggaggcgaaaactatatcaaccaggatcttcttcagctttttatacgaggaccaacctcgtcttcgcgctagtccgtcctcttcgagtgacagactttctagctcgagttttaaggattgggaggtgagtagtgaaagttcacctactccagaacctgaggtgcaacaccatttttactccgagcagatcgtaggagaaggctatggtgatttctttgggagcttaggaagcgctggagacgttatcttccatctaactggacatatatcatccggccaggtgttgttgacactattcccgtaggcatccaagttctagtgcctttggcatccttatcgctactcctgccatgactgttgcacgacacacacagcaatagccgtctaagaggaggatgatggcccgcacaaaagaaacgatgcgaaagattaaggcaactgaccctcatgtggcgcagcgtgccacgttgccgagtgccgaacaggacctgcccgctgcagaggaagaggcctataagggggacattgaggttcaggaggtagaagaccaggacaacgactgtcctgatagcccttttgaggctgaggaggagggagttgcttggcctctgcgctttgggggctataatgaggcc

SEQ ID NO: 231523 - DNA, 627 bp, Cannabis indica
gcacgattccacaccagaacctgctgttcaacatgaacaaaataatgcagatctggctgcaagtcaacagcagcagacccccagacctgatcctattctgctgctaagaagatcaaatcgagtctcacgggctcctcgctacttacaagactttgaatgctataacttactacaggataaatcttctacatcttatcctatttcaaagtttatttcatattctaaactttccaaaacttataaggcctttattcttgcagttgccgctgaatttgaaccacaaagttacaaacaagctgtccagttcaaacggtggcttcaagctatggacgatgaactcttggctctcatcacaaataacacctggactgtggtgcctcttccatcggacaaacatgctattggatgccgttgggtatacaaaatcaagtataacaacgatggaagcgtggaaagactcaaagctcgtttagtcgcacaaggttacacacaacaagaaggcttggatttcttcgacactttctctcccgtagcaaaaatggtcacattcaagctccttcttgccatcgtcaccatcaaacaatggcacacattacaacttgacatcaacaatgcatttctaaatgg

SEQ ID NO: 231524 - DNA, 942 bp, Cannabis indica
aacaccagaaatatcaactgctgaagcagaaaaaagttgagaaaaatattctgttatcaccgtaggaagaccactctgccaatcgacccagtttccagcttcatcacatagtttttgaattgagttattgcgtcttcttgctgtagcaacggcatgaaaatacttggagttgttatcaccttcacgcaaccagagttgtttacttctctgcttccaaaacacctctttctgcagcaatacttcagcaagcttccccgatgccactttaaagttctcaacagaattcgcatcccttcctttcttccatctcctcatctccaatttacaatcttttattctttttccaaagtttcctgagtagtccttaccccaatccattaacacctccccacaactaattattttttcaataatggacttcatgggatcattactccaacattcttgaataatctttaaacacagcggctctttcaaccagtaattttcaaatcgaaaactccgattattagcaatcacaatattgttggcagtagctaaatggataggacaatgatcggatgtagaaacttcaagattataaagtttagcataagggaaaaaatctaaccatgcttgattaaccaaggcgcgatctatccgaacttctacccaatcagcagtaccacggcttctctcccatgtataagggtaaccacacaattccaaatcatggagattacattcagcaagagcttcattaaaaccatccacgagccaattcggatacgggttgccacctctcttgtcatcttgagaagtcacattgttgagatcacctatgatacaccaaggcaagttcattctagtattcagctcactcataagatcccaagtttttttcctttggcttctatttggttcaccatacatgcctgttaacctccaatttccactttcatt

SEQ ID NO: 231525 - DNA, 742 bp, Cannabis indica
agagtagtactctcttttacactatttgttggggtttatactctaaaaataagtatttaatggataatatattatagaatataagaaatacgattataagataaatgaatacattaattatagaagtataattaatagatatttaaaaatttcttattcatatggagatggtataatcttgtaaggtcgtataagagaaattacgattataaatatgaataaagtaagtcggtagtgtattaaagtaagagatctttaatatgaaactactaagtatgatttactatacaatgtactctagtctgtgtgattttgattcagattacatagatggatatacatgtagtaaatgtattgtgtatatacatgactggactgatgtgtcaataacatctttcattaacatcccgttttattatgaaagaagtattcatattacaatgataatcattagtagatcagtttgaatcctgagtatacatgaactcctatttgtgttcattgagttctttgattcacttgttaaagtttttcagagaagatgattcttacaaatttgttttggggacttaataaaatgagtgactgagaacatattatacaataatggaattcaagctttctcaaaggatcgaatattagttcccttatagtgttaattctaggagtgctaacagttagatccaaatatataattagattattgattaattgttcacattgaatttatgatacataaaga

SEQ ID NO: 231526 - DNA, 1254 bp, Cannabis indica
gggagtggtgtttgatgggaagaaaagtccttgcctaggagtgcgtttaagatattgtagtattcgatgagtagcttgaagatgaggtactcttgggcatgttaagaatttactgagacgattgacatcatatgagatatcaggccgtgtaatcgtgagatatatgagcttcccaattaaactcctataggtggtagggtcagggagaacctttcctttgtctttgctgagtttaagattaagttccattggagtggaagcaggcttagctccaaggtaacctgtgtcagcaagaagttgtagagtgaatggtctttgggaaatggatttaccattctttgttcttcctacttctaatccgaggaagaaccttaaagtccctatatctttaagcttgaattttttgtccaaatattgtttgaagtgggtaatagctagttggttattgctagcaactatgatgtcatcaacataaatgaggacatcaagtaagaatgttggggtgttcttgatgaaaagagaattatcagagagagattgatcaaatccagcagacttaagggtggtacttagtttttcgtaccattgtctggatgcttatttaaggccatagatactcttgtttagtttgcaaacagagtttggtggggacttgtaacctggagggattttcatgtagacctcttcatggagatcaccatgtaaaaaagtattattgatgtcgatttggtgaacatcccaatttttcatggcaacaagtgcaagaaagatcttgagggtattgaattttgccacgagggcatatgtttggtcataatcaatgccttgtttttggttgaatccgttggctaccaagcgagctttgaatcgaacaacttcaccttgttcattgtatttgactttgtaaatccatttgcatccaatggctttgtagccaggaggcaacttggttacggtccaagtattgtttttctcaagtgcttcagtttcactatccatagccttgagccaatgtgtgaattgagaagcttctgagtaagaacgaggttcaatgtgagaataagtgcagctcgaaaatgagggcttagtttagcataagagatgaattattcaatggggtaaggtgttgatgaggtatgacagacataatcatttaagtgtttaggtttggtgatatgaggaccaattctggattgggtttctttttttgttgctgaagtggtggtgttattttgtttatcatttgaatattca

SEQ ID NO: 231527 - DNA, 1879 bp, Cannabis indica
atctataagcaaagggaattgctttgaaaacaatcaagcttatgaagtttgcagcaatatttttctagataaaaattagtatataaatgagcatctaatatatgtatttatatagtatttagaatcacatattttcaaatctaaacaagtataacgcaccatggatgttatcagctctcaatatagctaggcttaaatgaatgatttgggtattataggagttaatagaagcgaacacaacattgtcaaaacgctcaagtttacaaaaatgacccaaatgttattagtaaccagttactataaaattcaacatattttgctactaatttaaccattatagagtactaaatctaatattatatttataaatatcattttttattacaaatatatatcgtgattaactaaattgcatttacatttttttttccaaatttttttatcttggcgactgtcccgccttgcttacatgagtccgccccacatgcactgtcaaataatataatataataataataataataataataataataataataataagatgcttctaagtgttcatatgattaatatagctgacgaaacgaggggtgaggcgttgatgttgtgcaccatctatgagggttcaaagcaacatattctagtcgcgtgttactattgtgattcaaatcccaagtcagagtgcaatctttctggttaataagcatttcaatagctcagtatttcttaaaatataactcactgctttgtccctcccattagccgcagcaaccatggaggataatattttggttttgcttatcttcgcatagctcactcgaatccggagagtgcttaagaaacccttggatgatttcaacatgacccaaaaccaaaaaaagtacatcaagaccaacttggttaattaagttcctcgaataagaaaaaaaagaaaagaaacaaggaaagagatgagtaaatagttatacttactcgttatgtgttagataattccacattgctaatgtgtggaaagataatagaatatataagaggaatgggatactcctcccattgccaattggttttgagatggaatctcatttatcttattccaaattctaacactatgttgaaatcgagactgagagttggaaatctcttcaatgcgaagctagaagtgtagaaacagtagtcccggatatcgtaagaatgcttcacagtactaactggacaaaccagggagttggaatacctatcgaacctatagaaatcgatcttctatttatggttccgcatattttggggcttgatcttgtagaagtacaagatctcttccaaggttgaaacgcttaccttttgttgtttttcacaagacataccattcgacaagcagacgataaactcgtgggatgaattgaaatagtgacactccggccacagcgcagaattttgcaaagtagcttctgttggaaattattttaccaggatcttagatctactcacaagtatgttgtttaataccctaaatatgaactttctaaaacgataaataaacacttataaagttaagaaaaccttacattgatgcagcggaataatgtctccttccactcagatctctaacccttgtatcctttctgtcgcgagtattatcaagatctgagcccgaatctccttcttgttgaatgtctttcttcacgatcttcctcactatgattgaggtatcacttgctgtgtgtgggcactaatctatctctaagaggttcaaaattctcaaggaagaagaagagggtgagggtggcagctaggtttagagagagaaggctcaggtttttctctgaaggaaaccagatgaaaaagtgttaagtgtccagtgttaatttcctgaagcctt

SEQ ID NO: 231528 - DNA, 1588 bp, Cannabis indica
aaacccgaacctgaccacattaaccccgccataccagacccaaaaccagccatacccgaccacccaaaatttaggttcagttgtgcatttccaacacccaaaatctaaaaacctaaacccgaccacctaaaaacccaacccgtgtgcagccctagtcaatggtgaccaagggatgagccctggttccattgtggattgcccagccatgtcacccagggttaggggcgatatggcaccctttgctacggacatagatctaactgccaacatcatatgtgagttgacaatagagaaatgggcatttcgtagcagcactgatcatgtcatgttggcacgcgcctctaaacaacaagctacaatagtaagtctcacacatttaacttgttgctttcctttggcaattttactcatgctaacttttctacatctcgatgtactagatggctatgtttttcgagaggacttgccaataggttaactctatggctgtcaagttggaccaacttaggggcgataaaaggactctagcttccaaagtggaggagatcaagattcaagctgaggatttctagaggagggccatcgaagaggctgatcggatggctgaggctaaatataaccacttcataataattccaatgaatccaataagcaagaaacccaacaattacagaccaagttgtctaatgctaggactgaagtggaatttctttctaagaaaatccaagaggtcaacgatcctaatgatattttataggctcgagtattatagaagagcactgaaattaacaataagcagattgaggtcagtggtctaaacattaagctaagggaggccgatgggaagttcaaagaagtcgaggctaaatttgagaggtggagggaaagagtgcacaagttgtagatggatatgttggcagagaaggattggcgaaagaaactttcttataacaagagaattctgctgaaagataacgaagcttgggaagctgaaagacacaaggcttttgtgattttcggggctttttataggtcagctgccacttatcgccaacacatcaaagactccatctgagattccataaaggccgtgaaggtagctacggagagtgcagaggcctacccatgcaaagcgtcgagatagtctttgtaagcacataccttctggctgactcctccgaatctaatgaagaggctgcttctcccagaaattgtggttgtctcttctgaaattgaaccccaacttgaaatataccagactgaccaaccttcagctcaagaccaagtctagaacaaaactcagccatgaggttgtggcactttcttcttcctccttctcttctttatcatgacggttctcattgataaactgtcccttacgctaggtgggctcatctttgccacttccagctttggatgcttccccatccttcacatggctcggctaagaacgccctggagggagtggattaacatcgcccatgacgacatcaggatctgcttgaggattgttgtctaccacttttttacatgtagccaccattgttgcaaacgtactgtggcttcaagcttccttcagctctcaatg

SEQ ID NO: 231529 - DNA, 870 bp, Cannabis indica
caattcagttcttgaaagaatttgagaataggaattttttgatatcaaagaaaggattacaaattttccaagcttttagagacacttggatatctccctgagtaaattttactctaaacaatacaatttaattcttattccttacaattaatcagcccctctatttatactaactcacctctaactgtttctttaactaaccctcttgactattaccatagctcacctaagacattccatctcagccattaagagtttgacaactcagcttctataatcctagtcaattttactggttagactaatattaaggcgcaactgattacatggtacttggttatgaatgagaatttctgtgaataagcctcaagaccttatggaaaattgattgttgaaatcctcctaatatccaactattagttgttcacaattccttttggaaaacctcttgatgtactctgcagatttcattgtgcttgttcaactcgatataatatttgttatgttttccagtttttttgttctttctttctcctgataagaaacataatttttaagttcagaaataatgtgaggaggaaaagtacactactagattgtgctctactctagaacatatatgttttttcttttacaaactttttcgtattattttgcctttggttagttttttcaatttctcttttgtaattagcttgtaaatattttttttttctattcttccccactcatatttgttctaaacacttctttccatattgtaactagtcttctatactatgtattttcattaaccctgagatatttcttctaaacacaaatcttacaagtgatagaacaactcaatttacatgatctgtaacttgcagg

SEQ ID NO: 231530 - DNA, 3822 bp, Cannabis indica
ttcattcacttttcggggctaatttctgatgatgatcgtcagatgagtcgagccccttatataggaattagggttgtgccttgattagaaaaatatcaaaaagtggtcaaaaatcttgtgtttcatacctggtcgcgactacataaagggctagtcgcgaccaaaggcaaatgggaaaaatcaccctctctgccaaaatcacctagtcacgaccatagtcgcgaccaaagaaaaaggtcgcaactatggcttatgctagtcacgactactggagaaaactggcagcttcagcatatttttttacaaaattatcccatctttttgccaatcgacagaatttgaactacaatgcatcggggaacctgaaacaagaaaaatcaagcataaaaccgttccaaaaggcaaccttaactgagaaaatgcttaataattcgacctgaaacttagggtaaaattagacgaacaaaattccctcaaattagatccttactcgccctcgagtaagaccaagactactactaactatgctatcagataattataatgctgctgcctcaagttccatttccttccattgatcaaactagaatttcaattcaacaaacaaagatatcataagcacctttataacccacaagcttcccaaaaattaaaatttcccgaagtgttcccacaactaaccatgttgagaatttttttttttctatttggtttttcaatcacctgacatcactgaaattttcttttatttttgaatatacttttcatataatttttttctttttttttctcaagtgatgccgagttacaaaatttttgtttttcttctttcacatttctcaatcacggaagattttttttcttcaatactttcacacactatgtatttcactcccccaaacttattataaatcttatgatatcattcaaaatgtaaagaggacaaaaataacagtgtggatacatcttttggttcaatgggtgaagaaacgaagcaagtttaggctcaagagggttcactaaagatattcattttatggtaggcttgaaaggctcaaactatccaaacaaactgcctaaatcatgttcctattgaatgctgtcaattattttacctcaagagaataagacatgcaagttctatgctatatattcaaccagtcttaccacaaaccacagtaaaataattataacatatttcacagatcatcaaattgcaaccatacacaagtttcacaggcatccaaactaatccaaagagtttacaggattaagcacacagtttttaaaacttcaggacacttcacaatcaacaatagcatacaactatccttagcttattgccaaatcctaaaaaaaaaacttaattaaaacagagtaaaacaaaaaactaaaatagaaaacgtaaaaattaaaaattttaagtcagcccccaaactaaagatcacattgtctccaatgtgtaaataaaattcaacagaaagagagacttacctgagacccccatcagaaggggtttggtggcggcggttgatcatacgggtgcagtcgaggaggtggcgccaaattattaggattctcaatcccaatgttcattggggtgattagagagttaagttgattaacttgaccctcgtcatatatactccttcgcaccatgtagttttgcatgtggttgttctgctgaatgatataattcaactatgcatgagtatactgcatttccggatcaatgggcccaagaagttgtggtggctgttcctcctcttcctctacactttgttccatttggtgccttcaaccttgtggttgcgtttcaggttgtggctgcccataaggatgaggctctttgagcctattaaccatgcttacatcaatctttctttgcgatgccaccttgttttcatatggcaattcaggcacatcataagtcccgcacagatcaataatcactacagtcagcccaagtccccctcctgtggaaccctgaacagttaactcaatgctaccctggacaacttgacccacattgatattgtaccccttcatgatggcgtacacatatttcagtcgatccatctgaacatcggaaagtgcttgctcagcaccaaccaagcactcacaaagtacatccagattcttgccacaaggttgatttcacaacagtacagtaaactgggcgacccatcctgcccatcattatcgtggaacctgaaccccagaaaccccatagtttcagtgacattcacttaatcaaattgctcttcttcttcttcaataatccgcaagcgttgatcctctctagtgtaatcgggcaaggcatacattgcattgatggcatcagatgtggcagggactttcttgccacgtaccttaacttctccatttcttcgttcgggccaatttgccaaaaaattcacaagccatagtaacattggctcgctctttagcatcgacaaaggtaccccacttcatcctttcaatttgacctcagattgtttcaaaccgacgttgacgtctcaatggagcatcagggaactcaatcccccgatcttcaatataaggcctactcttaagcctaaggaagcgttgttgagccacttcactcacaaaccgagttctatcaaaagaaggttgtgggttggatgatgaaccaccctcttcactaacccttgttcttttggggggccagtatgaacacaaacaccattttttcaaaaaaaaagttctcggaaaaattggacagcacctcccctaatatttcttgatttcggaaaattcaaatttcaccaaaataacacagtaatgccaataacaatccacaatccacaatactcaaatgataatattccaattaatccaaaaatcctcaaatattccaatcaatccaaaaattcttaaatattccagtcaatcttgtggaaattcaatcaatcacttcaataatgaaaagaaatgatacttcctgattgagaatgccgctaatccacctccattgttgaatctccttgaaaagattgaggttgaagatgatgagaagtgtattcttggattttggtgagaagtggtggtttttggtgtgatttttgaaggaaatggaggattgatgagagaaattgtgttttaagatgatttggatggaagaattgatgaatgggtgaagaaatttgatgaatggtgaaaaatatttggtttttggctgagaagaaggaaaactcaggtggaaaaaaaatgattttagggtttgggatatttgagacaaaatggggcttttaaaggcaattttaggtctcagcccgtaagctggtcgcgaccaaccctctagcttcatgaaaaaatttcagggcttttggtaagccctttagtcgcgaccatggtcacgaccatggaaaagggtcgcgactactgaacctcaaaattttcctgggttctcgcgactactaaacctcaaaattttcctgggttctgtagaacccccaagtcgcgaccatagtcgcaaccatgaaaaagggtcatgaccatgaaacctgatggtcgcgggcactggcttttatggcctgaaaaaatatttttctttccaatttttcacgatttgcatagttcaactaaaaataacgtctgaaaaatttacaaaaaatttaaaaatgctaaaaacaaataaataacaaactaaaacaaataaaaaaaagtctaaaaaaatatagtaaataaaacacttggttaacctcccaagagcgctgtctttatcgtcatatagccggacattgagttgcttatcaaagaggcgccagtataatggcggacttggcttggtcaatttga

SEQ ID NO: 231531 - DNA, 1551 bp, Cannabis indica
aaacaaaaatacatatagtaccttaaaaatacatatatatctttggagcctaatctttgtatagaatttttatatataaccaattaattatgtgcataatctaataaactaacaataaagttcaaaatccaaacatattagataaatagcaacaaattattataaatatatacacaaattaatctgtgatgacaaaacaactcatatcaaataagaaattgcaacaaaaaggtaaattgatttgaacttttcctttaaggcgccttcacaaagtacaagacaataataataataataataataataataataataatagaaaatatgggtgagaacatattttttagcaagaaaatatggggatatgattttgtcccgttattgtactttcacggattgtaatccgtgatgtacaacagctgttagatgagggaattatttaatctgacggcagagattgatctagaggtaattagggttaaaaagtagaaacgtaccctgacactcatttaatgtaccctgagacccatctaatgtaccacggaatacattccgtgaaagtacatcccgggacaaattatatcccagaaaatacgtgtaaaaaaaaaagagaagaatgcatgaatataaatatgtataaaaaagaaaaatgaaataatttaatttacctctttttgattcttattattaatttaatttctctttgaagatgaccttatcctggtgggtagggccaatctaaatgaagctaattgtgtctggaattgcttggagagattttgctcgtggtctggacaaaaagttaataaactaaaaacatctatattcttgagcaataatacccctgatggtatgagaagggagattaaggcagcgttgggcattcaatctccggaaggtgctataaattatctgggtttgccccttttcagatccagacagaaggatgcagacttcaactttattttggataatctcacctctaaactgcagggttggaaagctaaaacgctgtcgaaggcaggccgagctactcttatcaagtctgtaggtttgtcgctgccggtctatgctatgcaaaccacaaaactctcgagtagtatggtcacgagggttgatggattagtcagggatttttggtggggttttgaaaaaggaaatcatggtcttcatctaaaggcgtgggataagctgtgccttcccaaatctttgggtggactagggtttaggaaaaaaaggaaatgaatttggcttttcttgccaaatggggttggaatttgctgaaaggctctcaatctttgtgttgcaaagttttgaaagccaaatatctaaaagggaaggagtttcttagttgtagctacaaggattccgactcttggttctggaagaatgtcgtcaaagccaaatccattttaaggaagggggcttgtaaagtggtaacaaatggaagggcgactagcatttggagggatccctggattcctcacctgaaaggttttatcccgaaaccaaaggttttattccacacaccaagaattcagttatcacact

SEQ ID NO: 231532 - DNA, 635 bp, Cannabis indica
aaatgattcaggcgacgtggatgaaatgcgattgtagttctttgattccatgtctttagaactagaagcagacttcgagctcaatgctgaagtagttagcaaaggtgttctggccaccacctttgatcaacgaactattgctagaggacgtaataaagacatactatccaagatttggtcactcttaggaaaatggcgcatgaaaactttgaaacctgggttatggggtttttactttgacatggaaactgataaaagggaagtccttaggaagtgaccctggatagtcaatggactcctcctcaatatcagagaatggcccgaagatggaagatgggaagaggttaatatgtgcaaagcaagattgtggatggaagctcatggtctacccacaccatacctcacatgggaaaatacgagtgtcattgccaagaaagtgggagaattcatagattttgatagagcaaccagagagaacatcgctcggagaggatttctaaagttccaagtcgacgttcttctcaactagaagcttgtcccaggtttctacctaaatatctctcgcgatagaaaagagtgggtgcagttcaagtatcacaaactccgtcgatttgcttcaactgtggccatttggc

SEQ ID NO: 231533 - DNA, 1974 bp, Cannabis indica
gtgttcatcaatggcggaatgatctgaatctggaattgttgagttcaaactgaagggatttcagtgtcatcttcatcatcagatctgaagggatttcagattgaagacatgttgaagaggagctcagttgctgcacaagggattgtgcattaacaatcagtgttcttgattgtcgttggtaattcattactatttgctgtaaaggttgtatttgattcctttagagagaattggaaattgtaatatgaacctttgattgatagtggatgaatttaccctggttcggggaacccaagcactagtcggctgagatgtgttctcagtgcagatgaagcttgtaaattgatgtgtgatttactgcttaaagcttaattcttgttcataactcatatcttgaaatcgatcaatttaaagatgtacaacttggtaacttgaatcaataaaatctactagtagcactttcagtgctttccttaaaaaatgtgccattgttgtagatgtgatgtctaagcaaatagggaggagatttttgcaccattggaagctgactctgaacaagagggagactatccagaatgattctatggcaggttataacagtaacttaattgagggtttcaaaattaaggttgatgttgccttctcgaaggatgtggcgggtataggtgtagtggtctgggaccatttgaatcaattgcaggccatttttgcttgcaaaagtggctactgcttgcatgttacacaatgagttgttggcggctctaaagggaattaaagtgtcgaggttgctggggctgggtaggggagttattctctcggactgtcaggtgattgcaaaggctgtggcaagatggctccaaattggttgacgatgtcttcttttgccaagctgttgcaggcaattgatgggactactttctctatgcattggattccgagatcagctatgctgaagctcatgctattgccaagtgggttttaaggaataattattcagattttcttaacttctgggaggtgaatccccgtgtgttcaccactatctttgctaactagactttttttgggagatacttctccttgtaagcataaattttatcttgttaatgcattttgttttttaagcaaatatatatattaatatatatatatatatatatatatataactaagttatctaaaaaaaattagacgaaactacttgagaccaactaaaaagatacccaatcaaaataaataaattaaacaaacctacaaaatgaatacataaaatagaatgttgattagcacacaaaacaaacaaaagttaagaaatctgtaagaaaattgcctaactattttccttttctaacaagaaataaaaacaaaaaaaatttctttgaaaacttcttgaataaaatggtgtcaccctttattgaaactaacatgtttactctaatttttacatttatcttctaaggcagaaataatcaaacaatgacacacctacaaccacaaaaatatcaatacaaaatgagaattagcgcacaaaattgataatgataaagttaaaaatatttagcattgaaacaaggtagctcaaattaaacttcataataaaatttttattattgcgaagaacattttctatcacactctctagttaatttaatgacaaatatcatcttttcaacaagacttagttttacttaataactagtcataatattcataaaattatacttttatttcaataatggcattcccactaatttactccgaatcatttttgacttattaaaaattaaatatttttaaaaaagtaagtgatgataaaaataaataaataaacacaatactcatataagttttttattattacatatgttttattaattcctcttaattaatataaaagagctttttcaaaaaatttaaacacctctataccacacctcacatgagtattactatctatataaacataattagtat

SEQ ID NO: 231534 - DNA, 1850 bp, Cannabis indica
aaaagtaattgaaatattttttcaagtatcacgtacaactgattcttttattgttattatattattattatatcttaatttttttaaaaaaaaaaaaaccaaaaatgtacacattagagttgttgttattattattattattattatattttaacttttttaaaaaaaaaacaaacaaacaaaaaagacaaaaacgttaaggtatatatattgattgataacagttaaatttttattattattattattattattattattatatatatttttattttctaaattttttagaatattttatatttttatagaaaaattattaaaataacagtaaaatatcaatttgtagatttatgctttttttatagaaaatttattaaaacaatagtaaaatatcatatctaaactgttgtgtttgagactttcccaagtgcttcctgatttattagttaatcaaaatcaaggagattttgtttaagggagatccattgctcataatgtcatgattcttcaagacctcttgaagaattataaaaggaagaacatatccccaagatgtactatcaaagttgatatcaccaaagcatatgacacagtgaattgggagtttttggaagcccttcttaatacttttagtttgcctgccaagtttatctcctgggttatgacatgtttgagagcaacttcctactctatatattgatgaatggaagagtgcaagggagttttaaatgcaagaaagggttgagacaaggtgatcccctctcccttctattatttgttttgatcatggagtaccttactagaagattgcaattggctacctgtcaatcaaattacaggtttcatcccatgtgtaagagcctcaaaattgtaaacctttgctttgttgatgacctgatgttgtttagcaaaggaaatttacaatcaatacaggttctaaaagctatattggatgagtttagtgctaccttagggcttgctatcatcactaacaaatctcaactctattttggagcgatgagagaagtagaaaaacagtctatactgagagaggtgaccctcttagaaggaaattttcctctcaaatatttgggagtccctctaagacctataaatggagagctaaagattgtggagtgattatcaacaaaataaaacaaaggcttcatatttgggccagtaggcacctttcctttgcaggaagagcccaactcattcattcactgttacttggtctacataactactggatgagcatctttatacttcctcatagaatcactaaggaaaatgaaaagttgtgtagagggttcctttggggttggaatgggaacagaagcaagcttcatatggcaacttgagagaaagttttgttgggctttatgccctaaataaaacaatatttcaatgtaatcttttccattcaattatcaataaagatacagatttaatttcattaatcgagtatagcctccaaaattgtacaggatacacaaaatgagtttattatagattactaattgccaaaaaaagaagcctaaaaaatcatgagaggatttacgtagagaaaatatattgtgagtagtttggtgtctcgattgagctgattgcttagtttttggtgtatttgtttgagagaattaaggagataagaaaaagtaaatttttgagtaattttaaaatgcggtgtcaccgtaggatacttttcctttatatatatatatctattctatataaagtgtgcctatataacagaattcttagtttatgagaaattcatgggtgactttttatttatattaaaaataaaatagtttattattaaaaataaaatggtttatgagaaa

SEQ ID NO: 231535 - DNA, 2029 bp, Cannabis indica
ataataaaaacatttataattatgaaaaactctattaatcgggttggtcaggttagttcgggttgatattattttcaacctacccaatataaagattgggtgggttttatttttgtcgggtttttcggtttgcacttttcatcgagttatctcggtttggtttgggcgagttgtttgaattgtgcggtttacaaaaatttatgtacaatcctagtttatatatctgagaagactataaattaccttactaaacttgctattgcatagaaattagcaataggaagataatcatattaggccatagttaatagatacaattgaaatcgaagcactaactttaatcatccttaatttccttattgatttatttgctccttaatttcactgtttccttagtgtttctaaatttcattttctcttaattttgacatcaccaaatagaagtaaatatttaattttaaagtacttaactacaacccttgtgggattgacctcactctttgtgagtctattacttatttacgatatgtatacttgctgttgaaattaccacaacaatcttagttattgtgaaaaactagacgaacagttgaaatggaatcagaatcagataagcagaacccaacgcaccagttcatttatcaacttgggcgctgagcactcatttcagagcttctggaatgtcattttgatacttccaaggattttgaacttgaggacgaggtctcctactccatttttgaacattttggattgaatgggcatttgaatgatcaaaaccaatgcaataggttgatcgtcaacctaggcactaggcctagcaccaagtcaacttgggtgttgggctttgcttccaaggcctcgggtttgtggttttctcccagagttttcatgaatcttcgttatttctgatgacaaaaaaaatacttggaacgctttttcgagaacttgattagaaatagccctagttgacaatatgtcaaactaggcgctaggcctagtgacatgtgtcatctgggcgttgggtcccctttatggccctttaaaagttctgttttgtccccaaaaatagttgaatcttaatctttgctgaaaatagagaagatgtttgaaagaattcccgaaaaatatcattagaatcagcccaggttggcaaaatgtcaacctgggtgctaggccagccccaggtgtcaacctgggcgctgggccttgcttctggcacccaggaagtattgtttcttccccaaaagttcctatcttcccatttttgatgaagataaagaatatgcaaaagtcagatcgtggatctaatacttggaaggcacccagattgacaaattgtcaacctgggtgctgggtgctcggcaccgagtgccccaggtgctcaaaaatagactttttctgaatctgatttcgatgtctcaaatatgcatgtggtatgtctagttcatgtcacaatgcaaagtttgacccatttgcactaagatggtcccgaaaaccaaaaccctcgttaaggatgtcaacttgggcactagtgaaaccctaggtgctcaggttgacttccaaggtgaaggttcatgtaaatttagctcttagggcctggatttaattgcttcatgtcttcatggtacaaaatattaaaagatagtgagttggaaataagttattgaagtctaaacttccatctcggagctcccaaagtcaacctgggcggcacgcagggctagggacccctcccaaatcgattgctatgactcaggtctacttgattctgtgacgtcatctttcttaccagatatcaaacattgatgtccatgtcaccagagaaaaattctggattaacattgtctctaaggcatatccctagaaggacgctgacaattgagtaactaatcattaaacttaccataattatgcaatattgagtacttggggtatagtgtatacaattcaaaagtccaattaaataatcttaaaactacatatccatattttctacgcctattagttcactagatctttaactttt

SEQ ID NO: 231536 - DNA, 900 bp, Cannabis indica
aagatgaagaagaagggaccaacgtctcctatggatgtttgaaagataatattcattgatgaggtacttggtattgaaccgatagaattctctgaggaaaaggatgaaaatttttataagcaaggattgcgaaccgttggctttaattcattgcttaaagacctatttgaacctgctctttcaccaaaatcatctctgagagatataatgcaataggaggatgttcgaagagactttgtacaatttctggcagctaatgatcaatgtaacagtaaaattgctcaaggtaagaactccagacctccaatattgcgatctggttgtgcagttcgtacactagaatccccctttaataattctgagaaacctacaaaagttaagattactttggaggatatagaggatgaggtagcattctggaaacgttcacttgtctgttatgtgcttggttcttatccaccattgcacattttggaaggacttgcaaaaagagtatggaaagataaaatagatagagtaaaggtactatcacatgctatcttcataatttgatttacaactattaaagatcgtgatgaagttcttaattcaggattacatattcttcaacaaaagaccagcagcgatcatgaaagcttgggatccaaacacaaatttcataaagaagttgtttgaattgtgccaatttgggtccaattagaggatttggatatgaggtactggggcaaaggttgctattcaagattataggataggtggggaaccgatgtcatggtagattctgttacaaaggatcgagacaaactcaattttcctagagtgctaattgtggtaactttaaacaaagagctaccagacatgattgattttgaagatgaacatgaagttagcacacaagtt

SEQ ID NO: 231537 - DNA, 1074 bp, Cannabis indica
ggccaaccccaagtgtcaacctgtgcactggccttgataatggcacccagaaagtgttgtttctttcctgaaagtacttatttctccgtttttgatgaagacgaataagaagcatgagtttgatttttgatttgatacttgaaagtggcctagatgacaaattgtcaacctgggcactgggtgcctgggcaccaggtgtttcgggtgctcaaagttgaactttcttcgaatctaattttgatgcctcaaatatgtttgtagtatgtctagttcatgtccgaaagaaaaatttgggccattttcactaagacgattccagaaactaaaaccctagttgaggatgtcaactcgggcgctggatgaaagcctaggtgcccaggttgactttcgtggtgctggtttgtgtattttcagctctcgaggcttgtatttggttgctctatgtcttcatggtacataatactgaaagatagtgttttggaaacaacttaacaggattcaaacacccattctggagtttccaaaatcaacctaggcgtaaggctagggacccctcctaggtcaacttgctatgatttgagactactcaactccaggatgttttttttcttgccacatgttaaatattgatgtccacatcatcagagctacttttggtgtaaacattaataatatcatattttctctaatatttacttaagtataaattaattttcaatttttctcaaaagaatactatgattttatcttttagttgcatctatagtactaccaataacaatgaagtttgtaatattagctacatgaatatgtactttttatttattgcaaatttttagcccttgaacttttgaaaatactgattttgtttcctaaaatatatgacttgttaataatccccctgaacttttacattcatagaatttttttcatcctgttagattccgtccaattagttcgtttaaatgctgacatgtctttgtaaattaacaaatttgtaccctaaattttgacaattattaaatcgtacctcctcaaaataaaaataagaaaaaattaacattttttttagta

SEQ ID NO: 231538 - DNA, 863 bp, Cannabis indica
atacagttcatgactttatccacccatcgcttgtcataacccaaacaaagcatcattgcttctaagaatctccaaccgactctatcgtaagctttggacatgtctagtttaagagccatctttttcccatttccaaaacgaccttttttcatacaatgtagactttcaaaccccaggatggcattatcttgtatgagccggcctctaatgaatgcgctttggttctccgagattacttccttcaaactatctttcattctattggctatacatttcgcaacaattttgtagctgacgttgcaaagacttatagggcggtagtctgtcacttggtgaggacttttggtttttggaatgaggcaaaggagggtcttgttgatcgctcggcaatccgcatgattattaagaatatccaaacaaattctggttatgtctgaccctatgaccgtccaatgatgctcatagaataaccggggcatcccatccacacccggggccttcaacgggttgatttgcttcattgcttgaagaacatcagctgctgtgaactcagtaagaaggctttcattttgtcttctactaagccgtgagggaaaaaatctttggaggtgagccattaagtcacacttggggtcttgggctgtaaagaggtcttgaaaatgctcacaaatgatctgttctatctcttctttagaactctgccaattcagattttgatcaaaaagaccaataattcgatttttcttcctacgagaggacgccttttggtgaaagaatcttgtgtttcggtctccatgagcaagccaaatcgcctgactacgttttttccaaaacagttcatcttttgcaaggtatccattcag

SEQ ID NO: 231539 - DNA, 1052 bp, Cannabis indica
ccgaatcaagtacatgttgtgaaactattaggttcagcattctaaactaaaacagctataaagaaacacagtcttggcgaattaacatggtgtgaaactaataggttcagctctcaaaccgaaactaataggttcagcgctcaaaactcaaaccaaatcaacatgttgtgaaactattaggttcagcattcaaaactaaaacagttataaacaaacacagtcttggcgaatcaacatggtgtgaaactaataagttcagctctcaaaactcaaaacagctatttcaaaagatctaatcaactacaacctatgttgtcacagaacaaaaacaagtttctactatggaatgtaaaaacattattcaatcagttaaaaataccccccccccaaaaaaaaaaaaaacaaacaatgcttgtgcaattatacacatgtacatatcaagaaaaacaatatgatcaaaatcccaaatgcataatgataagagtttaattttattaattaaaagaaccaatctcaaagggttttacaatgtcgatctcattaatcaactaaacatctaaaattcaataacactaaacactaaccccaaaaacccttataccagatcaaaagccaagtcacaaacaagaaaacccagaaactgaaattagattcaaattcataaaaatactaactttttcctgcaagatgttggatgagtcaaaatgctcggtcataccgacttgacccacatcttcaatgaaggaaagcttctcagcatagcccaaagacatgatctttactcttcctttctgtaacactttctctctctaacgctcctacttcctctctctctctctaataaaaatgaaaactttgaattaaaaaattgaaaataaaaataatcccttctattttcttcttcttcttcttcaatttttgttcatttttcttttttttttactgctgaaaagcctaagaaaattttgcctcttttaaggagacccctatggccaatagagccattgatatttattatgtacctataaggaaagaattttttcatcgtgaaa

SEQ ID NO: 231540 - DNA, 1689 bp, Cannabis indica
tttttttttttttggataaaatgtctagttgtattctttacgtaaatttaattctctttataatagaattgaatagattctcaattttcaaaaaatttcattctaacaacaccaaatataataaacggcagctgcatgcgtagttaaattttcgaaatttattcagatttaaatattatgtatctacttgggtaaattattaatagaagttgtggatgtatgtcattttaaccaatcacaaatactttctaaaatttaaattcaattttcatatatttttttttttaaatataactaactttaagataatttctaacacaaacaatgtaaaaaacgtaattaattttatcataacacctctatatcgggttattattaagttttattttacaaaaaaatcagtttatgattctatttgtactattttaaaaaatacaaggtttattttattatttaataaaataaaaaatcaaatcgataacttttacaaaatataaaatctcaaataatactactttattagacattcttcttaccatataataacttaatcttaaattaattttgtatgcttttcaagtaaataaaaaacttgttattaaggaattttcctttcttccttttacactgtcacaaatatgtaatacattttttttttcacaataatgtaatcaaaaaattttcaaatttaatgcaaaagataacatgactaaatttatattacaataaatttcactatttatttactttttttttagcacttatatatgatataataagtaatgttttatattttatgtatatttaatagagtttattggatttgtagttttgcttctttagttattattttcatttattaggattgaccatttattttctctacttgtaatttattttttgaacttatcctctatttgttgattattgtaagaaattttctagtcatattagcagaagttgttacattagtggttgcgttggattggtctctcactcttggtctttctcttcatgtggtggagtcagattgcttagccttggttttggctctcccaaaacgttagccttggttttggttttggctctcccaaaacgtttttccctttgtaatgaactaggttccttattgaatgatattgctagtttgctttccagttttcctggggtatccctaatttatgttcgacgtacagccaacaaggctgctcatgaattagttgtgcatgcacttagggtagatggtgaattggcttggattgaagattttacttcttttctattaaactctgattgttgttaattagagtttaatttaaaaaaaaatagaatttttatatattttttaataaatctaaaatttttggtgccttttatttaagttaattttacacctaatacaatactattattacatttgagccaaatataacacattttttaagctaaattggcacaaattttacatcttcattagatatggtggtatacttctatctatttcaacatttaagagaattttttaatttatttttattttttcatgtatgttgtacttgtaccacctacagattttcaaaaagattctaaatagtttatagttaatgaaaataagtttcaaatagttgctcatcccacgtaaaaaaaaaatagtcattcgtacaactagatatttgaagtttgttttcg

SEQ ID NO: 231541 - DNA, 878 bp, Cannabis indica
ttgtttcctgtgacaattatatcctcgatgtaaataagtacaaggatgatggccctggatgttttcaagaaaaacagagagttgtccgcctttgattgtctgaaattccatgttacaagggtggctttgagtttgtcgaaccatgctctaggagcctgttgaagaccatataaagatttattcaatttgcacacataatcttcctttccaggttcttcaaaacccggtggttgaaccatgaaaacatcttcctcaatttttccatttaggaaggcgttatttatgtctagctgccttatttcccagcctttagttactgccaagattaggacgattcggactgttgaggccttgataactgagctgaatgtttcaccaaaattaatcccgggtctttgatgaaatccttttgctaccaatctcgctttgagtctttggtgagatccatcagcattcctttttattttataaacccacttgtttcccacaagattctgtccaggtgctgtaggaaccaggtaccatgtattgttggctttgagggctatgatttctgagttcatagccttgttccacccagcatggttgatggcttcttctaggctacttggttctctaagaagagactcccacttcgattgtccaaagaaaaatcgtggtttgaagatgccggccttggcacgagttatcattggatgggtagcttgtggagcaacacgtgttgtgacagccggttcagatggttgatcactcacaaatgcagcagtggaagatgagttcataggagagacagtaaatgacaggatcatggtcatgaacacggggtgttactgctgctgtctcccaactcaatatctgaagcaacaggctgtctgaag

SEQ ID NO: 231542 - DNA, 784 bp, Cannabis indica
ctctctctctctctaatatgtgtgtagtgtgttgagggaatatctcacactattctgcttgatactttgatcacactgtgaagaagaaaatattttctttgacaagtacttgataatactctgctattatgagagaattaagactaaaaacagagaaagaatgagagaatgatttcttgttattgagctgagctgaaaataagcctttatataggcaaatgtcaaaatgacatgtgctacaattccacaacttgacaagaattaaacagaaaaataactagctcaaaaaaacagttggagtggcctagtaacaacttctaataaacagttggagtggcctagtaacaacttctaatagcccccctcaagatggagtgtaaatgttaattacacccatcttggaaacaatatttgagaagggattaggaagtaagggcttggtaaagatatcagccaagttttgttgagaagtgacatggagaagctgaagagagccttgctgaattttctctcgaatgaagtggccgtctatttcaacgtgcttggtgcgttcatgatacacgagatttttgctgatgtgaattgcagcggtgttgtcacaatagagattagcaggttgtttgtgagagacgccaaagttgttgagaagggcacggatccatgtcagttctgaagtagcattagccattacacgatattcagcttcagccgagaaacgggatactgttggaaattattttaccaagatctatttactatcatgtatgttggattaacaacctaa

SEQ ID NO: 231543 - DNA, 2537 bp, Cannabis indica
ctggcttgtctaactagaaacaccacaacaattaacatgcacatataaaagtagggtttatttgtgttgctgctgtgctgccccgattccagaccccctaacccgaacccctggccctcgacccctgtaccccgaccccaacctcgacaatacaacctaagttcataaatattacaatacaagctaatacgaacaattttttatacattgaagaataagattcgtattgtattaaaatttctgattgtaacattaaatgattaataatacaatacaaaactcaatccaaacaaagtgttttacttatttaatacaatacaaccctcttatgtcaaatgagccctaaaagtttataagttgggttagttggggatgttttcagttgggagtttgttgtttgttgcaagggtgtattgttgtatacataatataaagatagaatagtgttagagttagcgaataatttggtttgttttgagaaagaaaagcctctttgagctaactcactgtacaatcttggaataagtttaagaccaattcataatttttgcaataacgagaaatttaatcaattatttatgtgttttatgtagattggatacttagtatcttatcttatcttatcctatatttatcatataatttttgcaaattcagcactcactagaagtttgtaaccaatcaccagaaacatactctcttgagctgcagctaaatttttaccatcacttacactacttatcaacaaaataacaataggaacttacagggtcagcatggaaaaaaccatgagacaggatttgctccaaataagattcaacagcatatcgacccaacctgcaaaataaaagatgataactgaattcatagaaaacgtatgatttgtaattgagaaatataggagctgaatatcatatcattatacaaaatcaaatccagatagatggcggagggtgtattgaccttttccgatcaacacccaactgatctaaagcttttatcttatttattttgatccctgggacatactccatagtcaaaacctgcaatgatagaaaaggttacatctgaaaagaataactgcaatgctaccagcctgaaattcaggattgctgaaatattaaacctgcggcgttgtgtactcccacaatattgttgggactttaacatattccaagttcttaaagttgcttgcaaataattctgcgtttgcggcttccttggtgtaatcgatttcctgaatttttttagatattattagatgttttattccaaaataattacagaggaaaataattctataaattaaaagaaaaatgatgagcaggttaatagataacataagatgtcaaggttctaatagacactgaaacttgccagtagaaagatgaactagattaagttctgtttccaacaaattagagtaaaatggaaaattgtttagaagaagctcccatactattttcctcggtgccttttctcttgacataaaaatttatatgctggggacaaaggtaaatgtttctagaagagttttaaataagttctcaatggttaacatcttatgatctccacagtaatcctttcatttgcaaactggctactttcaccaattactctttatttcatcatttattatcataaactaaatcacaaaatattcagcaaaatgcctattagcagaaaattattagttttcacgactcattacaattacttagaggttacattttaaatggaaaggccattctgcctttactcaagtccaaacaacaataaatggtcttccactatattgtaacacaataaatcaatgattttttattttcctgatgtctcagaaatcttcccaaactctgcttaacgatctcgagttgagaattggctgagccctgaaatttttgggagacaagctactcaagcatactgttttgtaggtccctgtgataaactaaactgacagctcatgagatcctatcttctatttttattgtcaattctctaaatgttctatcttcatcattaaaccattgtttccagccttccctcctcattcacacatcttccaacagagtagacaaaattttatgaaagtatgaccagataaagtgatttacacctatatatgaaattcttcattgatcaataaaaaaagaaaaaaaacagtgatttttcacaccaaaatatatgaaagtgtgatcagccaaagtaattttatatggatggaccaaaaaaaatacagttgttaatgtgaaacaactttattgaacctttgattgaacaatataaatcactagaagcaatttaactttctcaagacaagtgaaaactaaacatcatttgtttttttgtttgaaatctcccgtgttaatacctggtataaaacggaggcacactcatcatatatagcaacccaatccctctttgccccatctgattttggatcaatcttttgaaggtactctgcaattacctggtagaaaaaatgaaaacaattccaaagttgcaaatgcatgtcagtatgtatacatgcaaat

SEQ ID NO: 231544 - DNA, 1244 bp, Cannabis indica
ccatttcgagatcgaatatatattttatatattattgctcaacaattgtagtaataactatatatagacaaaatctgtttatatatatatatagtactacttatactccttgtatgtgtttatgtgtgtgatatagctatattctagctctcgatattaatttgcttctaattataaattcaagcaaatgagtatgctacatatatacacacacaatattactgtacatgaccgtgttttttctttttagtcttatttctaattaactaataattttgaaaaaaaatatatatatatataattaattgggtataagtttgacttgacttactgtactcatgaccatatatgagattaatagatgactatatgaatgatcagttgagatgatgaggtcaaatatgatatactataataataataataataataataataataattgcattaggttccacgtacccatctccattccttgtttttggttacaattattacaaatattatatatataatgcaatttgctcatcaattccaacaatattaatattattaattataacataacataccatagttgattccttctccctcaaatagtcgtcaaattaatcgtcttcttccttccctaattttatttaattaattaatatactatatatcatcatatatgtatgtctatctatctacacccttccattttgtccgtacttatattagttaattaacaatctaaaaaattaattttagtagttacaataacctagctagtagacgttgctagcttttaattaattttttgtattatcgttatataatatatatttaggtgacatttagtaacacttttataatcagttttctgtttttaaaagtggaaaagtgaaaatatttttcaaaaacatgttctataaaactgtttttacttttcaattttataattagaaatcaaaattttaaaaacaaaaaaaaaatacacttttaatatttttttaaacagtttttttcgtaatcaatcttttagattacgaccagactcggaccaaatctccttcccgcgaccttggcactgaacccggcttctgatctgaaaaaaaccacaccccacccaaaacccaactaaataaaatcaaaaaataaaaatgaaatttacagagcacactttattttctgtttttaaaatttgaaaaacaaaagtagttaaaaaaacaaattttgtttttctaaaaataaattttttaaaa

SEQ ID NO: 231545 - DNA, 809 bp, Cannabis indica
aggctccttgtacacttgttctcgctgaaggttggcgttcttaggtataagcttgtgttctcgcaattttgcagtagtacacaacagtcgccaatcgcgatcttgaataggaaagctacctaaaacttcgacaatttccctatgagtagaatccaatacaggtcgagccggcctatctgcaatcaacaaaaaatagacattagggactatacagagtaataaaaatatatactaagtgttaagagacgtgacatactaggtcaacgattgaagtcagtactaactcctggtactttaaatgcgtagaaccagttatatttctaatctcccatattagaaaccgtaccttctagcccgttaatatcaaaattgacccatttgctaaaacagtaaaagtcattgtcatggtcaacattctttatttaatagaaatagctaaaatcttccatcattggttccccttgaacatactccatatacaatgcataaaaccccagaattatgcagtaattattcaaagttagttcgaagggagagacatcgtaatttctaaggataactttgacaaatggatgaaaaggtaaagttacccctcatcgaagaataggaatcgagaccaccacgtcttgtgtggggataatctcgaggttggtaaaaggaagatgaggctgcggagatgctgaaggacgtaaattccctattcaaacaaaattcaactgtgcaaatgtatgcaagtctgattttgtgacttgcgagaccagatccttgcatgaaaatagttcattaaattgagtgttgtcaactgaatc

SEQ ID NO: 231546 - DNA, 859 bp, Cannabis indica
tatatccaagatttcaacacttcaaccaaataaacacaacaagcagcccattgttcaaaacctccccaaaaattccactatcgcaccaacaatttcaaagctacaccaccaattatgcccaacacaaataatttcagaaccacctcaacaattccaaaatatcaatatttttcaaatcaaagaatctacacaccaaatcaacacttctaaccacgccacaatttcaatttctcaccaagactttcagaatattaatggaaataaactcagtcactcacacatcaaacaaatacttgactgcagcagtaaaaatataatccaattgacaataacgttttaccaacaaaccagggagagtcaaatgacggaaatggctggttcgaggttgctgggttcggatgcggctgggcggagttgctggtgcgatttgactcgggtcgaagatggtgaggacgaacgttggagctggttcgtatgaatgctttgatggctgggtcgaagtgatgatgcgaggtcaggtgggactgctcaactcgagttggtgttgtcgggttgttggttcgagcttgatgtcgaactgggttgattgggcgaagggtgcgactggattgagtgagggtcgcctggaacttggctcgggcaatgtgatggtgcggttcgaagagcttggagctgggcgatttggtggttcaaatggtgagtggaagctctgtttcaggtgagattgtgggtagttcgaaggtgcgagcttggaagttgggtcgactgagactctatgcaatggctcggcttggtgcttggttcgtggttgatgagtgaggtggtgaaaatcaaacggaggtggtgcgaatggcgagct

SEQ ID NO: 231547 - DNA, 1300 bp, Cannabis indica
aatttgtgtaaattgaaataataataatagtagtaataataaacagttatattacaatttttttaagtaaagaataccactgagtaaccattgatttttataatatatactcattaaaatataatattatacagctaagaagtacaacatctcaaacactaaactcaaagtagacatgccaattcatcagtccaaatgtatacattagcaaagaaaactaataaaagacagtatcactacacaaaaccatggtttaaaatgttataccttttccattatagatagtctctttaaagaaggagaaatccacagtagagcatctctcaagtctgattccctctctactttacatgtagtgaaaactctaagatgctcccaattaactaaaggagaacgacatattttcttctttttttctgggaatatgctcccaataaacagttatattacaattcaatttctaaagtcatattagatgtcgtgatggcatctgatctttgactctggtaggaagtaaaggagatatacgttgatacattttctgctgttaatagtcaatatgacttttcttcaattttctttatttgtttcaattgctttttccttactgtacataattttttacctgtataacctttgatagagcattggcttctttttctatttgggaatccaaagcttatttgtacaataatcatggatttgggttttctttaataatctctatttatataataccaattcgaaactcttaatggggttatagtgattcaaatctcatcttctcaaaattagttctcttacaaaaagttagatttgcacgggaattaggtagaaacataaggttttgtttacttgtgaattgtttatgttttctaggtacaatggaaagtaatgggtcgaaattccaaaaggcaaagatcccttgatctgttcgtcgattggttgtagtttgccagaacccagaatattgataattgaataatttgaattacttgggcatttataaccgtgattaagagctgtgctcaaaattatacataaattcatcacagaactgtgctatgaattgtgtagggagatgtattggccacttatttattacagaataattgatttgcttgattgtgatatcatacgataaaatatgccccgaattataggactatgttagtttatgtcctcattttaaaaaaatatagtaaataaccctaaatcataagactatgttagtaaatgttctcatttcaaaattattaattttttttttattttttgaagcaaattatttaaacattat

SEQ ID NO: 231548 - DNA, 1021 bp, Cannabis indica
aatgaaaaaaaaaatcttttgggatatgttattttcttgcacatatttcctttaattttattgtctttaccccaaaaaaaaaatatcattgagaacgacccttgataactttcctaattaaagtgcataaaattaccaattccaattcttccctaaatacccttgtccttatcactcacaaagttagtaaataaaggtgtaaaaatcacaaagaagtgaagggtattttggtaatttcagattgaatgaatctcttctctctcatagttttcttcttccccaaaacccatattcgccaaaaattcccaaattggttctgttattagggctttcgctgaccaaacaaaatttgacaacttttctgaaattcctttcctctcaaacctttttcacaccaacaaaggtaccatctttgctactttctctcgatctctcttccttttactctatattctcattatacatatattcatgtatttatcgttatgtttgctgaaattttattactgtaaattgggttttatgtattgaaaactatggggagtttcgtttggtttaatgtgaatggtttcttagattctcaaatgggtttctaaatttgttgtctttgttaaagtttctgtttttggtaaaaccaattagaaatctttgatagtgtgtgcattgtactcttgaatccctacttgtctaattggtatgtttattttgaatatgtgcttttgtacagattaaaaatctaggttgagcattgtactgttcatgtacatttgtattgagtggtggaattggttttatgtggtcttttagggtcttaaatgggttattatgaacctttttttttcttcttctgggtttgtaaatttatttggacactttttgatttgtgtggagctattaatgcatttgtgtgtgcgtgtcttggtaaagctagtgagttcagtatagtgtgtttaaaattgtaccgtaaaataggtacgatcataccagcactaatgctttggatcccatcagaactccgcag

SEQ ID NO: 231549 - DNA, 1459 bp, Cannabis indica
atcagattgtaatgggttttatttaggacacagaaagacaagtgatctattcttagggatccccccagaaaaatattataaataccccacaaacagattaaaaaggggtcgatcgattttatttaaggaatcaaagagagaaaataggagagaaatccaccaagaacattctctataataaatactctcattaataccaatgactcgtggactaaggctcattaatgccttaaccacgtaaaaatctcctgcattaaactttctacagctcttcttatatattatttaattggttgccgaaaatctcggtcaacattttggtgctttcattgagagctgaaaaaagcgtcttcaacagacaacagtcagaaaagctagatcaacaatggtggaaactcacaatagtacacgtcagcccggtcctcctcatgatgctcaaaatccaaaggacgaagaagtagcttcaagggtgaacgtgggctctgaggagtaagatgaggccaatgacgaggagtacgaatagaactttgacgagtatgacgcttacaacgagggtacctatacagagttactggtcttcaggcaaaaggctactgatcatgaagctgagatcacagcctaaaaggagcaaaatagaaaaatgcaagaggtgatggtcaccatgcaaaaagccatggagacggcagagattcatatacatcctaaggccatcctagcaggactcaaagaaacaccggaagattcctcaccaagcacttaaaaacccaagaccagggaaccaagccctatacggtaccctttcaaagaaaaccatgggaaaaatcccacttccatccctgggagaaagaaaaaggtgtaggatccgcgaaaggtccgctcaagtttcccgaaagggaaaggtccacagaggggcaagctcccgaaagcgagtcttggccctcaggatcgagaggatcgaaagagcgtatccgtgcactaggagcccaaagagagaggaaggaaaaactggagatactctccagttgacttaagacaaaaaatcaacgaaaaatacggtgatctacgagatcacctagacaagaagaaacatttactagcggtctccacggggacactaaattaaggaattctggctgagttggcaacactgcgcaaggacattgctcgggtctcccagaggcaaaaagaggacgactcagattccaattgcgagaaccgggagccatgcacccggcacatattggaggcagagctccccaagaattttaagatgcctgagatggcagcatataccgggcctcggaccctagtgatcatttatcctgtttcaaccaggtaatgacagtcatgagggtcagcaatgatgccaagttatgctttccattaacattaagcggttccgctgaggaatggttcaaaaagtcggaaccaggatcagtgtactgctggaacaaactac

SEQ ID NO: 231550 - DNA, 950 bp, Cannabis indica
taatttgtgttctttactttacccatttcccattaattgcaaaacaatagaagaaaaaaggaaaaaaatcctaaccttttattaattacatcctcatattacaacgtcgtggaaattttttttatagtagtattcgttataataattccattaatttaatggttacggtgagcggtacaaacctcttatagacggttgcattgttttcgattgatttttttttattattattattttaaaaataaaattagcgattcattaatttaagcattcagaatacaatatgacctttatattagttgtagcgtttgatatattttctatagcaccataaccaaagtagtgcataagacacacttcttgagctctaaagacaaatacaagacagtagacaccaccatgtcaactaaaatttaattgtatgtttgacatcataactaaaaatttattttttatttttaaaaatagaaaattgttttttgaaaataattaggcttgtttggtgttgttttttgaaaacagtttttaaaaaataaagttacaaaaaataaaaaaattgtttttagaaaatactaactaaatgcgacttgtgttttgaaaactttaaaaatgattttttgttcttatttctaaaaatacttttttgaaaacaaaaaatagaaaataataccaaacatgctctaacactccgcagtagacaattgtttagaacaaattggaacaacaggcaatttcttaacaaaacttcgtgcatctcaaattcacacaacccatgatagtatatcattgttttaaacacgtttgcttggagcccaaaagtctctaagaaccttgatgggatgtcacctttactgaataataaattatttgtaatgttaagatggatttaaaatttaatttttttatgcataaagcgggataaaaattataaaatgatccgaaattggtca

SEQ ID NO: 231551 - DNA, 1073 bp, Cannabis indica
tatccactcgctctaaatgaaagtaccaaattgttcgcctcaaaaagtgatcaatcgatagcagggtcgtataaatttgatgtttgtcacgtgttacacaattagaattagaaagtaaagaacacagagaattttatagaggttcagccccgtgaggtagcgggtaatgacctactcccattttagttgtagggataatactattcaaatcactataggtgagatttgatacagctcccttaaggatacaaagtaggaatcaaggttggaaaatctcaagtattgagaaagcttgtatgggcgtgtgagagaatgacgaagagagagttatcaaatttagagacttaggcttagaatgaggcttagcagttaatggcctggaggctaagattagacttaggtttttctaggttagagttaaggcatttacataggagagcttaaccctaatttacaactgaaatccttcgatatttgtatattaaatttattaattacaaaagactaaattttccttaaacatagatattttctagctactttattgggcggttagggcccaattcacagtccacgtgtaaaattgtacagaaagtatgccaggtcctttcctggccagccaaacacctgcaggaagcaggctggccggccttgtgaagtctagagggtggctggccataggactggccaggggtggccgatcaactcctttgtggaagctgggtttgttgaggtgctgacttggccttcttgttggtgacttgtattgccacatggcgttgattttgtccacataagcaaggccacgtcaggtggacaaaattagggtaacaattatcatataataataaattatattaacatttctcacacacatacacaatcacaaatcaatttacaattagtattacttttaaatattctaattgtatggggaagccaaataaaaacataatatatatatattaattatataacagggttttttggtgggtttgggttttgggtttctcaaatttctagaactcgaacctagcctggttggtaacaggttgaacctgaacccgccctgc

SEQ ID NO: 231552 - DNA, 1843 bp, Cannabis indica
cttaaaaaacagcagcaatggctctcgtatacgggaccaaaatcaaattctatcaatattaggggtccatataagattgtgtttttctcaatcttgtattatccatgagtaggctttgaacaagaaaaagtaaaaacagttcaataaaatgacaaatataatataaattaagaaagcaaattaaatgttcaatccaaattgacagctcaaaatccatatgcaataaaacacaacaccgttacaacgatcagatgcattttattataaaaaagtttgtatgtgttatataattcttagattaaatttattatacaaggcatcataccttatatttgaggctcatttatctttgctgtaatagtgtttcttcaggtatttttgccagatttgtgaatgttcccaatgctctattcttgttgttctaataccacttttgtacaagactgtagaggcattctattaattttgcaactggtaattctctgatttctttgattgctgcattaactgattcagctatgttacttgtcatggttgcatatcgtttgttggagctgtatattcttgtccatttgccaataccaacttcatcaaataagtacggttttatcctctcatcaatactgtccaagtctctcataaagtcttcaaattcagtttttgtgtaagctctggaagcaccattaaatgcattttttagtccatctcctccttttttgaatttagactttatgtttttgtacaagtgatagcaacatacaccatgcattaaatttgggaaattttattttgcagcctttgcaatgctttcatgtctgtcggaaataatgcattgtccatctcgttccccataggattcttgtaatttttgaaagaaccattgccatgattcatcattttcagagtcaacaattgcaaatgcaagtggaaatatatgtctatttgcattctgtgcattagcaattagtaatgtccatctatgtggattttttaagaaagtgccatctgttacaagtattggtgtacaatggttccatcctcttattgaagctcctatagcaaagaataagtacttgaaccttcctttttcatctgttactaagtctatacagttcctgtgatgtaaatattttacaattaatatatttttctatataataacacaaaaatttataataaaacttgtaaattgtaactaacagttgcaggtatactgttgtttacatcacaaatacattattagaaaatttgtgaccaaaattgatcacaagggccagaaaggtttgagatgcaaaataagaaaaaaatccatccatatatgtatatttaaataacaaataagatacaagcttaaagcaaagtaaaattattatgtactttgatttgtatctgtaattttcttgtatttttacagttttgagtacaaacaactcaagttgcttgccaaccaaaggttggtcttttctgccttaactttataggtacagtaagggttgaaggacactttaatgaaagaaccaccattaactatcaagtaatggaaaaataataataataaaaaaaagattgaagctttttctaatgtgcttaatccaaatctttttctatattataataacacaaaaatttataatataacttgtaaattgtaactaatagttgcaggtataattattgacaatataaggtttgcaactactatttagtggagtattttattttagtaagcatgcttaatagttgctagggaagcttaattgtatttagctactattgaaattttcagatatacatacaaatatgaaatacctgggttttttttgctgcatcatgtacaaaattg

SEQ ID NO: 231553 - DNA, 612 bp, Cannabis indica
atcaatgtacgaattggcacttattgtattaacgagaagccatatgtcgctaaaggagaatagcgaggcacaggagaagagtaatacacaccttagcttacaataaccaaacgaagtgtaaaactcggatcggctcgaagaacaagaatgcaagatgaccatctcgctacgaggaaacttcctatagtttcatccaactaacggaagcgagactcataaccttggcaagtcaaaatatttcaatatacccgcaatcgacgtaaaacatatcatgttgacctcggaaagaataatggttgaaactcgccattgggatcactacaatcaagtttctgtcgagacatctccatattcaacaattaaagacatgtttaatacgcgatattcttgaccattaaaagtgggaaaatcacagctaaatgattttcaaaatcatgcaccacatttacatttcatgatatgtaatcagatcccatgatttaaggaatgatgactgtaattacattttggtcagccttgtaattaactgccactatgcaattataaatagtggcaaacagtctaaaaaaagggacagaaaaactcttaggcaagaggccctgaaaaaaatac

SEQ ID NO: 231554 - DNA, 1525 bp, Cannabis indica
ccatacccatctggtcccggggccttatctctatcaatagcaaagatagtgtcttctacttccttaccttgtgtattcaaccaatagaatatcattgtgaatgcttgttaccttaggtcccaaatccacaattgcttgaacaactttccttctagctgatattgtagaccccaaagcttttggtaataatctaggaaggcatgctgaactttttcaggagtatcacaccaatttccatactcatcctcaatcgagaaaattctattttgaatcattctcaattttagagaagcatggaaaatgtgtgaattttcatctgaccttagctttttgtgccatgaaactagaaaaagctttactaacttctgtaaatttattcctcagttcctgctcttggttcatcaattccacatcctgtggctccttgttcaatttagcttgtagctcagccaaggcttctcgtgtagacagcattgtcttttggctatctgtaaacccggtttgatttatgctcttcagcaccagcttcaccctctttaatttctgcgctatacaatacatttttgtccctatgatgacttcctcccaggccttggttaccactttgtcatactcaatagcttgtttccacatattgaattatctaaatggtttcctcccacagaacctattttcatagatagtcaccaatataggactatggtcgaaacttagttcaggtaggaaaaccgcttcagaacaagggaaggcattgatccaatgtgcattgaccattgctctattttggaaaaaattctctcttcaggcttttgcttgttgttccatgtgtaaaaggaccctgagtacttcagatctgccatgttacagttctccatacagtcttgcaatctctgagatggaatgcagtgggctcttcttcctattctttcatccccattcattatctcattgaaatctcccattagaatccatggctcatttattttctttgccaattcctctaagtctgcccataacttttctctctttttctcatcattaaaagcataaatcagtgacacaaagaacttccctgcttgttgctgtgattgcacataacagtgcattatttgactagagaaatatttaatatctattgaatagacatttggttgccaagctataactattcttcctttgtctaaccaaggattattgtttgagaaacaccaaccttggaagaggcttgtatagagagttcccatattcttattctgaacctttgtttctaggagactaacaaacccagcttgcttcgagtacatcaattgcttgttttcattgtgtttattctggctgttaatccctctcacattccagcataaaaacctatccatttgaggaagagggatctccctcccctcttgtgttgtgcccagtttcctgttctgctatgccaccatcaatctcagtgcctactgcaacatcaacatcatcattaagagactcaaacatattctttatcattgtcccttctgcctccttc

SEQ ID NO: 231555 - DNA, 848 bp, Cannabis indica
ggttttgcagaagagccatgaactactctgtttctttctgtccagattgaccatagagtgcaaacaatttgttccatctcttgttttttataaatcgttgagagatgaaccaagtagtcccctttatacattgcagaagctttaccccagtcaaaaaccagatccatatgacgccacactgctttggcatatttgcatccaaaaagagcatgcccaattgattcccacgctgatttgcatactgaacatgttgagtccgtgatgatctttcgccttaccaaagatgttgcaactggaagagcgttatgaataactcgccaagcaaatatcttgactttttgaggaagttgcaaagaccagaagtatttccaccaagaagcttgtgaaaccgaactggagcaattattttcagtggcatcagctatagaggttgcaagatggtaccccgattgcaccgtgtatgcacctgatgtagtgtggtgccaaattagagcatcagaatgttggaaaaaactgagtggtaaggtcaggatacgatcaacatctaaaggagagaaccattgttgcagaagagggacattccaaacacgttcttcagtgattaaatgactaaccattgcatcagcaggacccaaaaaaagagtgggagtgaaagtatcacagccaggaatccaaggatcagttgcaatccgaatgtgtcttccttcaccaattttccaacgcaagcctttaaggagcaaagcacggccccaaatgattccttgccaagttaaagaggggctatgtccatgaggagcattgagaaaatcattattagggaagtatcgacttttgagtaattttccaag

SEQ ID NO: 231556 - DNA, 825 bp, Cannabis indica
acttgcttgcaaaatgacaagaaaagattagtaacaagtaataatcaaatatttatttattatcaaaataagtgaatgattgacttttggtcaacagaccccttccttctgagtttgtgccccctagggctcttttcccagtcgacatgttgtctattcttccacgactgacttgtcatgttgagtattttccatgatataatgaaataaaagggagatgtgttttgagttttattttacaaagactctcaatgaaagtaccaaattgttaagtcagatttttgttaacaataaatgagccttgtaaataaataatcaatacttataattagtaatatatatggaacactgaagagtttttatgtggttttgtacttaaaatctatatattccacgagttagtattatttttgagtatgtcttgattatatacttagaatacaaaggaataactatgaaactttacttaatctcacagggtctctctttcccaaaatgattgatccctttcccttatgttctatccccatttataggagttctaggaataacaattattcttttttaatcttgtctaagtaaccgttcatgaaacgtggacaatccccacgtttcatatttacaacatgtggataaaatgaagttactactgataactgccttttgttcttattcgaaagcaatttgcctttattgagatgacacattccagctatggctgacattattcgatagtgtatagggatagctgatcgtattttgtgagacgctagttaagatgttgtccttgctataaccttttaaggtaactcttggaataattat

SEQ ID NO: 231557 - DNA, 1031 bp, Cannabis indica
ccaacttggtttcatggagttcaaagtagcaaaagacaatgtcccgttaagcatcggagccttccaaatgctactgcagaaatcacttggcttcaatctctgcttgctaaaattggtctttctttgactcatgtccttacaatttggtgtgataaccagtctactgtgctaatgtctgctaaccctgtgctacactctaggacaaaacacataaaattagatctttactttgttagaaaaaggatactgcataattagctcagagttagacacactccagcccaagatcaaatagctgacatactgaccaaagctttgtcatctccaaagttcacaatgctgagaaacaaactgagtctggtctctctttcccagctcagtttgtgggaggatgttagatagagtgccatctgttagttagcatagtttgtacatagagttagttaagtagttagttaaattcggttatattttctaactgtatatttaactacttttagttaacttatctctttatataagagttgattgctctcttttgagtaactacttttagttaacttatctctttatataagagttgattgctctcttttgagtaactacttttagttaacttatctctttatataagagttgattgctctcttttgagctgtaatgagaatggcactttcattcatttctttctctctttttgtttttctcaacaatattcatttatgttcataattcatgattttcattgaacaatgaaccttacgtttctactttggattttaaataattgtttttttctataaagaatttgggtgataataaaaaataaaagaaagttgaccgattgggtcaacttgttgacccgaccaatccggtcaatccggtcaacctgaactcacgaacatgaaactatttcacgagctgtgtctgagtacaactttttgaacccaaaatccaatcaactcgctcaatgttcaatcctaagagcatctccaatggagagctataaatgtggtgtattgccatttttt

SEQ ID NO: 231558 - DNA, 837 bp, Cannabis indica
tagtgcagaagcatcaatgataactggtgcagcatcagctgttggtgctggtgcaagaggatcatgtataacaactggttctggtggcagattctttgctggtgtaggagcattgtactcatgtaacacaggtggaaaagcacagtgaggtacactattagaagctgcattattgtctgtcatagaaaattgagcagtagggaaaatagaagttttagaagttacctgagatgaatttttgattctggttgtagggtagacaagcccattaaacactacatttcgagcaataaagatcctgccactagaattttcacataggtaccccttgtgtttgggtgaatatcccaagaagatgcattcttctgatctgtactccagtttgtggtgattataaggtctcaaatgagggaaacatgcacatccaaaggcctttaatatgttgtagtcaggtgactgttggaacaaacactcaaaaggactcaaatgatttaaagcaggggtaggcattatgtttataccataggtagcactctgaaaggcatgccaccaatatgtcatgtcaagacccgattgagctaggagagtaagacctgtctcagttatgtgcttatgctttctttccactcttccattttgttcatgagtatgtggacaagagtgttgaaaccaaattccttgatctcttaaaacttgccaaatacccgaaactcacccccaccatcaccctgaactttcttaataggtagattaaactgtttttcaaccaaacttttgaattgaataaacaattcaaaggattgagacttgacaaacatagggaaaacccaagaaaac

SEQ ID NO: 231559 - DNA, 1628 bp, Cannabis indica
ttcaacagatattaataaagattagccttcttctctttctaattgtaatgctgctgtttacaattctactctttctcatggcataaatctgtggcacagcaagttaggtcatccctcacctgctattctcaccaaaatcttgacccaagccaacattccacactcttggaaaaacttacagttttgtaatgcttgtcaacaagggaaaaatcataggcttccttttcctttatccacatctcgagccaatcaacctttagaacttattcattcagatgtgtgggggctatctcacattgcttccaaggataattacaagtattatattgtctttattgatgattttagcaggttctcttggatttttcccatgactgtcaagtctcaagcttttgaactattcattcaatttaaaagtttagttgaaaagcagtttaatctacctattaagaaagttcaagctgatggtgggggagagtttcgagtatttggcaagttcttaagggatcaaggaatttggtttcaacattcttgtccacatactcatgaacaaaatgggagggttgaacgaaagcatagacacataactgagaccggtcttactctcctagctcaatctggtcttgacatgacctattggtggcatgcctttcagagtgcaacttatagtatcaacagaatgcctcacctattttgcaacacttgagtccatttgagtgtttgtttcaacagccacctgattatagcattctcaagccatttggatgtgcgtgtttcccacatttgagaccctacaaccaacacaaactagagttcagaactgaagaatgtcttttcctggggtactctccaaaacataaaggctatctctgtgaaaattcaagtggtaggatgttcattgctcgtaatgtggtgtttaatgaactttcctatcctgcaactagagtccacaacccctctcaggtatatactgaacattctaattttcctacagctcagttctctaccaataatcgtactgcagaatctaatcctatgctttcttgtgttttaccacatgctgcacctgagcctcatgttcctgcaccagcagaaaataatcaggcccctgctgcagctacttctgcaccagcagcaatcactcaggcaccagatgctgtaactgagcttattgctcctgcaccagcagctattcctcctacaccatctgttgacacttctcctgtagcttctgatgcttgtgcaccagttgttatcattgacaacatggtgcctgctgtgtctcactcggttctacatcccaccagtaatgtctctgctggttctggtgcatctctcccacttcgaactcattcaatgactaccaggtctcaaaaagggatatataaacctaaagctcaccttgctacttgacacaaatttcctgaatccctttttccaactgaaccgaagagtcttaaagcagcacttaatcatcctggctggttaatcgatgaacacagaattcaaagctcttattctcaaggaacttggactcttttcctatgaacctcacatgcacttaattgggaataagtggtgcatcgagttaactaatgcaaatggtactcttgacaggttgaaatctc

SEQ ID NO: 231560 - DNA, 709 bp, Cannabis indica
atctagtgcactgatgaatcatgtggcatatgctttgaaacatataatcacaattatctttcactgtgttcacaacactataattgtggataattatatgttctggattgaataaaaattgtatattaaaccataatcatgaaaaacacgtgttaacttaaataacttcttatcttctattgatgacaaataagattatattgaaatagattttatttagggcataaaatcccaacaccaacatctttagatctaataaatttatgacaatcttctaaaataaccctaaaagaagaaagcatatgtaatgaatttcgaacaacttctattgctaccaagcaatctgactccagctccactttctgccatggttgagatttaatccagcatagcatgtgtcttgtaatgtacttaatggtaaaataaatctcacttaacatactcaaaataaaatataattatcatatggtcattagtgtgatactcacatgataatgatacatcatctattaaagagttgcataagtgtatctctaatggtgatgcatcaaatagattatgtgtatagcttatcgtgcaaaaaaattgctccaacattattttaaaaattgtgtcaaaattgatacaatgcaaaaaaaaaaatatatatatatatatatactaaatttagcacatataatataatctaaaatttatatcattataaata

SEQ ID NO: 231561 - DNA, 1378 bp, Cannabis indica
tacactgatcagattatcaaaggcttcgtattggtacgtacatataataattattatcagattatattagggttatattttatatattgcaaattaatttacagtaaaaacttttatagtagtattgaactaataattgtcataaaacgtatcagtcatgttattagtttttgtttgacaaaaagttgaaaagtatattaaaaactaatgggtaatttgcggtcaaatttcttgaactttgaagtttgtcacggtttaaccctcatactaaaaaaatcaggagcttttttcacttcaaaattagtttttttttttttaattttacatagaactccatattgcaactaaattgcaactaaattgcaacaaaaaatcatatagaaaccccatttttagaaactcaaaccgtaaattaaaaaaaaaaaaaaaaagttaaaaaaataaatatatggagtaattcctcaaaaaatatggctaaactctctaatctccacaatcgttttggtcagcattccttctgttagtttctagctgttaaatgccaaatagacctgccactgtgtatacaagtgtacacctgacgtgagggtaaaattttaggggctttttcatttttacacttcaaacctagttttttttttttttttttagtattttttacggaaattctacatagaaacctatattatttgcaattatcgctgcaacctaaattgcaataaaaaattgtatagaaacccctattgcaactagcactgcaaccactttaaaaacgtgaatttaaaaaaaaaaaaaaagttaaaaaatagtaaggataattccccaaaattttattagatcacttaatattaataactaaaaaataaattaaaatatttaaaaatttaaaaatagaaataaaaaaacttttaaaatttttgaaaaaatcagaaaaattataaaaatattttaattttttttctttttccttttccaaatcagaaaaaaaaatcttatccttttctttttcgttttcttttttttttctttcttcttctaccaagtaactttcttcattcttcttcttcttcaatctatgaacaccaaaaaactcaccacagatctacaaccaccgaaacaaccaccaaccactaccactaccaccgctgccaaatattttctcaaatcaaaacacaacaaaatcaaacaaaaacctaaataaatttcaaatcccacaaaataaaataaaaataaaagtaaaacaaaataaagcatatggaacaaggaaaaataatgaatcagatcctagcctcgtccttgatgttctcatcggagcagtggcaccgagcctcatccctgatgttctcattggggcagcaaaccttaggaggaggagagg

SEQ ID NO: 231562 - DNA, 1293 bp, Cannabis indica
tccaactatgatcgctatagaacggatttctccaagggtaatgcttggccattactcacccgattggccaaaaactctttcatctcggccataccaagtcttaagaaccgtgaacttcctcatccaactcctctcactataggagagtcctctattgccactgatttatcccctgttgttactacatcaccgacctcagttcttgctgaagtttcaactcaacgcaacatggtcattggaatgcaacatattggtactggtagtggtggggaaggtctgtcccagcggcactaacatctacaccagcgaatactctcacaccagcaactgtttctactgctactaataacacaaatctcccactgtctactgctaaaaacctttccataccacggccatcacaaagtgaattggttactgacttatctggggtgtttacaccttttgctgtcataaataaagcaccaaatacttatgctacatatccaccacaaggccctacgtttccagcagcaagctcattccaaattcacactccattaccatcctcacatagtcacataccaatgcctattgtcacaccatatgcaaatcagcaaactgggaaagaaaacttatcaccaaatcgcttcagcaaaaggctttcggatggaccaaacttaaggcaaacactcaaaagatgtagaggttctccctcagcagtgttcgttccacctttgtctggtgaaattgaacctcaccttcatgtttctattgatgaaatggattctgttggtgatcatgacagcaatgcggagtctgatattcagctccgccatcaaccatgaaaatcataagttggaactctcggggtttggggaacccgagagctctccgtcatctcaagttgcttgtcaaagagcattctccaagtgtgttatttattatggagactaagttaggttctaattctattactcgtttacgtagtattttacattttaataatggacttgaagtccctgttgttttggaaagatgatgttgatgtaacacttttaaattataatataaacattttcgattgttacatggcttgtggacatggcccaacttggattttacagctttttatggagcacctgctgctcaaaatcgtcaccaatcatggacccttttagagagattgaaagacgttgcacctttgatgccatggttgataattggggattttaacgaaatcttgtcaaatcgccataaatctggtggagccttacgtaatgaagctcaaatggatgcttttcgtaatgttct

SEQ ID NO: 231563 - DNA, 486 bp, Cannabis indica
tatttaataattatttataggtttgatgaaaactgagaatatgcccagaagacttctcagaaaaatttcttggaaatggcccaggttgacactttgggcgctgggtcccaattctaatctcttattccccgaaataactcaaatcttaatcgttgataaaatggagaatatgcccaaacgacttcatctgaattgctgatgaaagtggcccaagttgacaaagtgtcaacctaggcacatggcccaatgcctaggtcaaactaggcgctgggtccttgttttatcctccatgtcgatctgtatttcacccaaaatcacttgtgtttctcattttggatgaagacgaagaaaatactcgtgatagttcttcaatattagggtttgaagtgccccaagttggaaatatgtcaacttgggtgttgggtgcctagggcacctgatgcttcggtttctcaaaattgaaagtgctccaagaacttgaacacg

SEQ ID NO: 231564 - DNA, 807 bp, Cannabis indica
actattaatcactaacaatacgaactaacacagcatagaattatccaatcaatccaagtatcaataaaaccaataaaagttaatgtaatcctaaataaaaaatttaacacaagaagcttgatggacccactatttttgtgataccaaattctccacaaaaacaccaatagtaactcaatttcttattttactaagacagcctcatgttcaaaaaggaaagaatagaggtttttcctaggtaaataagaagaaggaatcataaaatcaactcgcttcacaatatacagaaggctagagcaaatctaaagagcatggaacgatgtctcgtcttcaatcccataaacaggacaagtaattgtcatggggactttatgagtggcaagattgagagtggtcaggaaccaatctaagcaagctttctaaacaaacacttttactttaggagggatagaaaggctctaaaaatacttccaccaagaggagggaccagaagaggaatcatgttcctgctccttttccgaatagtctaataacattctagtagctactcttcatagtgtacccacttgaagagttatagtgccaaagcaactgatcaacccattgttgggaccggggtaacgataacatatggcgagcttcatccacaagaaataactcatcaataagcttttgtccaaatcaccattagagagtttgagagcactcaccatagagataagaggttggggttgaaatgaataagagagtgcaacaaacctttttagaatccatatatgagacttaatattcacagtagtatcatca

SEQ ID NO: 231565 - DNA, 878 bp, Cannabis indica
gagaattccctctcaagtacttgagagtccccttaagaccaaaaaaatggaaagcggaggattgtggtgtgataatcaagaaaattaagcaaaggctccacacttgggctactagacatctctcatttgccggcagggctcaactcatacattcagttctgcgtgggttaaggaattattggatgagtatattcattcttccgcatagtatggcaaaggaggttgagaaactttgtcggggattcctatggggttggaatgggacctcttgggagaaagattgtcttccaaagacctatggaggccttggcttcaaggatggtatcaagcggaatcaagctattcttgcaaaatatgtttaggccatttctaccaaaagggacatgctttgggtgaaatgggtcagcaattatctaaaaggaaagaattggtgggaatatgatcttaagagtgacactagttggtattggaggaaactatgttctctaagggacaaattcactagagaagacatacacaaagcaagggctggtatgagattcaaggctgccttactgtataacagcagcattcctcaaactctctttgagtacagcaggtacatttggtgctcattcaacttaccaaaacacaggttcattctatggcaagctatcaactctcagctcttaacccgtgacaaatttgagcaattccacattactcttgacagcatccaatgcccggtttgtgagaatgcagccagaaagcaactcccatttatttttttcctgctagttttctcagcaggcagggaagagcatcagcagctggctgggaattaggagctggccgactggattcaatggttggaagcaatggctgatcatgaacagagg

SEQ ID NO: 231566 - DNA, 1111 bp, Cannabis indica
accaaatataacctcacataattttttaaaattagaatccctaatgcacaaatgggatatgacctataaaaatgggtaaagagtgataaaaaaaattaaaaataggaaaaaaaaattagtataaagtgtcatgaactttttttttaaaaactttaagaggggaattcgaacttgaaactttcacattgtgacagaagtgtgaaacagacttaaaaaaagaaaaaacataaatctctcttatattaaatatgactatctaacaaaaaaatttcgtttaataattatttattttaatttttcgttaaatttaatggttaaaactaacattaattaattaatcaattaattatttatttatttttaaaaaaaataattttaaatattaaaatttaattatttatttaaaatataacttaaataattatttaacaatatcaataaaattaatttattattttttatataaactttaatttaaatatcaataaaattaatttattatttttttatataaactttaatttaaatttaaattaaaagttaatttaattaatttatcatactttataaaaaaaaagggagtatcgctacccaatcgctaggcgacatatctagaggtgctaggcaccactagtgcccaatgataatactcaattatatggtggaaaatgctctgaaatttgcagctacctccgcggatgaagctttttgggtggcggttatgccacaactggctgccagcaaagaccaacctcattcatcgaggcatgaaggtaagtccaatgtgttatctttgtggaagagatgctgaaacacttactcatgctatgtggaactgtaataaagttaaagtagtttggaaactccttccttgctataaacatgatgggaattttgataccggttccatgttcgatttgttcatgatggtcttattggtgaagctctcaaagagtgaattcgaagatgtgataagagttatgtgggctctttgggaaaatcgcaacaggaagtggaaccatttacctgtcatgaatggagttcagttgttagattgggtcttcacttcttatccggcctcgacgagaaaaagtggtgaagctctgaatcc

SEQ ID NO: 231567 - DNA, 1443 bp, Cannabis indica
ggttctcacactctgcaactgaccattccatgtttatgagatactcttcctctagcatcattatactattggtttatgttgatgatgttattattgcaagtaataacatcactgacttaaacactttaaaaatcaggttgcataacaggttcaagctcaaggatcttggagatctaaaatatttccttggcttggaagtggcaaggtctaacaagggcattttcatttctcaaagagcttatgctctacaactacttgaagaccttggctatctgggaagtaaacctgttgagacacctatggaaccaaacctgaagctgtcacagtttggggaagacaagtttgctgataaaccagccgattgctctttgtacagaaaaataattgggaagctgcaatatcttgtgatcactaggcctgacttggcttactcagttaacaagctaagtcagttcctatctttgcctaaagccaagcacttgcaggctgcccaaaggatattacaatatgtaaaatccactcctggacagggaattttcttctctgctgcatcagaaatcaagttaagggcatacactgatgcagattgggctgcctgtgttgatactagaagatctacaagtggtttttgcatttttcttagaagctcggccatatcttggaaaagcaaaaaaagcaacaaaaccgtttcaagatctctgcagaagctgaatatagggccatggctaacactacaagtgagctaatttggttgctttcactacttaaagagatgaggattgaacatgagggaccagcaatcatgtactgtaataataaggcagctcaacatattgcagccaacccagtcttccatgagagaacaaagcatattgacatagactgtcacttggtaagggagaaggtgcaacaaggcattgtcaaaactgatcatgtttcatcaaaggatcaggttgcagatattctaactaaagctttgtttcctaatcaattcaagacacttaaagacaagatgagattggtaaacatttaccatctattttgagggggagtatcaacaatcacaactattgtttaagtgtcttagagttagttaggagttagttttgccagctgtatgaattagttagagtttgttattttggttgttagtctgttgcacagtcttctggtatatatcagattgtatataaagctttgctcttgtactttgaattcaattaatggaattcaattaatggaaattacacagagttgttcattctttttctctgttttgtaatactatgctagtaatacataccggtatataaagtagcttaattataaactgcacaggagaatttccctcttcacaaaacaataatcaaatgattataactacctttctcttaataatacttaaccaaattactaccctactaattaaagatacaaatcaaa

SEQ ID NO: 231568 - DNA, 1179 bp, Cannabis indica
ttaaaattaattaaaattattttttggaccaataaaaaattgacacgtggcatttaatttggttttgacggatcagttaacttggggaccaacggacttacaaaaaatgtgaccttggggactattaccgccaatttttgaggttggggattaatctgcatcaactctaaatatttggggacttttcccgcaattattccttatatatttcttgagtgtttgataaatcttaacattactaactaatattcgataccaaattttaaactaaaagtcatagacaaacatgctgtatttttcaagagtacatatctcttatattttaagtctgctaatatcaatgctcataaattgttttttttggtgaacactgattgtatttaggtaaaagatactctccctccattattaacggttgtatcttaactttgaatatttaatatataacagttttttattccaaacaaaaaaaaaatgctgtattactattagcacgcgacaatagaggagaaatacaaataccataacacaaattataagttggaccgtttgggattatgtgcctggtttcaactttcaaccatagtgtcgtgtttttgcgggtctaatgagatggtaatttggatattattattattatttgagaaactctattaacatagctaattattacagatatcaccttacttataaaaagtctttggttacaattttgtttcgccagtattatttttgagtgtaatttatgatcaaattctttgcacttttacgtttgttatggtttaactcatagaaaaattatagctaaacttcctaatttttactattgctttattagttagtattccttccgttaatatttttaactatttagtgctaagagaaatgctaaaagatactcgtggttaggcatgacaaaaagatccattcattcggattgatccgatccgactgatcattactgatccgaaacattcggatagttattgaatcttggattagatccgacccgccccgcttaaatttttttacggataagatctgacccgatccattttaaatatatatttttctataaaaaaaagatttttactttttaatatatttttttaaaaaaacaaagaaatttaaatctaccctaacttaaatcccaatttcaccaaatctcattttcttctc

SEQ ID NO: 231569 - DNA, 788 bp, Cannabis indica
aggaaagttcagctgaaagtgcaactatcctaactaggaaaagagcaactataacgaatatacaaggtacgaaatcgggtatgaagcacaacaatcttaccataaaagaaaaaattattttgtcaactagccaaaaaaggactttacaatttatatgaatttggttataatttttgaatagagctatgtatattttttttctctgtaagttgacaaaggcattgggatgatttaggggtttcatcgagcccatgacttgggttgtggttcccaacccctgatttggtggcactgatttcgtccgtttgctcaaaatgcaagtgttagaatattgtcataatatctgtgtaaaaaaaatgctagtcattattataacaaaaagattaattcattataaaattcacttattatccaaataaattaatatatgtagtaacattttttattattatgacaattaataaaaattaattgtttgattaataaatctatgtactaattgctacaatagtaaatatgtgatataacattaaaacaaaaaaattcaaatgagagtgtacataatatataaaataattattaaaataaataaatgaataagtatagtggctttttttgtgtgtcactatatctccaaaaatattaataataataaaaaaagatatagtgacacttcatgtaaccgactctatatgcatatagtgacgcgcaaaaagtgaatgtaaaaagggttcagtgacacgtgtgaagtgtcactaaaagttgtttttccattcaccctcattagt

SEQ ID NO: 231570 - DNA, 1044 bp, Cannabis indica
tcaagatatcccccttttgaaaaacttgcattatgcctcattcacacatctcgcaaattacgaccatatttccaggaacatccaattaaagtcctaacggatcaaccactaagacaagtgttaacgtagattttcgttaaccaatattgagccttttcgtaataaatttaacacatatgtatattaaaaaaaattgataagtataataataataatgacaccaggtattttacgtggttttttagttaaatctgcatactccatcagtctatcttattcaagatatttctggatattggatacaatattacaatttctctcctagttttttttcgtccctttttttgtagaatctgcgctatttataggaatataggttggcagttatttacatttaaatttgaattatataatcgtttatcataaaatgtaggctttgatcacattttatttaaacacgtgtagataataattgataactgcactaccgcttatcattcctatcttcaaggcggttaacactaacgtggatagagccatctcgctttgcatatagatgaccaccaaataataacttagtctaattttatgccttccagcaatggcatgagctccagtgtactgagcaaacttaagaactgctctttgaccataagacctcgcagactggacaatcatgtcctgcatgtttccaagttgctacacttagttattataatatggaatatacgctaagtgtttcactaactaatttgtctcgtcaataattccttttatagagtgagatggatgtctcgctatacattacctgtagtttcctcgggattgtgccctctgaggtaagatagtttctcgtcaatataggaattgatagtttgtgtatccttgtcttgcctaaaattatacagttagcgagttatgaatatactctattaattctacatttaatgagttattccatcttgcatttaatgatataattattaatatttcagttggttcatattccacgagattgacacatgtcactgttggaaattattt

SEQ ID NO: 231571 - DNA, 1281 bp, Cannabis indica
gaatcacaattagaggcaattgtgaaaagaagattgctataagggatcagtggtgcctagcaccttctcgacatgtcgcgttgtaattggctagcgatactccttaaaggctattatattaaattatatgcgacacgatacttaattggacaaatagcgatattgacacataagagggtatcaagcaccaccggtgccctttagcatttctcatgtaaaaattgtctaataatttaatgaaccaaacaagggcggacacatagaagcaagtaggatgtaacaaaagataatatttataagtataatattaattttaatacaatagttaagttagattgttaatagaatatatgttaatggttcaaattctacctaaagtatttgtttattaatttatttttgcctttatcttaaaaaaaattacacccctcactctaaatcttgaattggcctttgataccaaatatttttatatactaaaattgttatgagacactataaaatgacactctataaataattaacagatttttataatttttattaaaataaaataattaaaagttaatattaaattacactcataataatataagaatgccagtagactttagcatttctttttcaataaatacataactatatttatgtgtagcgtgtttgactgtttgtataattggaaagagagaaatgagaaaggttgaatacatggaattaaaataacgctgagagccttcagtcttacgaaaaaaaagtaacgctgagaggaagactgactgactgactgtgaaggaagagagaatcttcttgaattttacattaatggaatgaatgacagaaatatggtaatggaaaatgattgtattttttctttttttttacaataaaaaatgctatggttaatttagtaatggccaaccactatttatgtgtgagtactaattaagtaacaaaggggtgggtttatctttttaaattagttcaccatttcaaatgggaaatttgaccattcattcttaaatcttaatattatactttacaaaatattttagagaaattttatttacacttttaaaaatttataaaaacactccattttaataattttaattttatataaaatttataattatattaattttttttcaacttttttctttcaattcatattcttaaaaaataggctaattatgatttttacccctgaactttgacatgcaccaaatcacgtcccctgaactttaaggtcataaaaataccccatgaactattaagattgtt

SEQ ID NO: 231572 - DNA, 2289 bp, Cannabis indica
tgagatccttgaacctctcccaagcctcatggaaagattcattgtccagctgacagaaattattaatttctcctcgcagcttagcagactttgctggaggaaagaacttagcaaaaacttcgttgccaaatcagtccatgttgcaatagagttcggtggcaaggagatcaaccaactcttggctcactctctcagtgagaatggaaagagtctcaagcggatggcatcatcactaattccattgactttaaaagtctgacataactccatgaaatttgacaagtggatattgaggtcttcagagcggagtccaccaaacgggactgacgactgcaccatttcgagtatggtaggatttattttgaagttgttagcatctacggcgggtggtcttatataagactggacccccatcagagttagaagaacgtagtccctcagactacgaccatttgcttgatattcaacgacacctccattattatcgttgttgcctccattattaccaccattagcattctcatccatgatttctgcagttgctgaaactctttcttgcctcttgtttcttctgtttctcctacaggtattcttaacttcaggatcaactggcaatatgacactcttcccttggccttgcatacaacgtcaattcttaaaatagagaaagacaatgttgaaaaaaacaagttagcaactagtaagaaaaataaactaaagtagaatttaatgtaatcttatgcaatatcaatctgtaaacaattccctggcaacgagaattaatacaactagataaaatctatgattctatttggcaaatcgagaattttatgattgcgataaaaataaaagctaacaagaaaataataactaagagtgattatttatggataagcaattaggaatatgaatcctgttggttcagtttctcaatttctaatgttaattataattctctccctactggggatgacagattatcaatttaatcctaactcttctcagatcattaagatcctaaatcataaatcatctattcgaatctctgcaatagaataacatacaacttgcattaagaacagaatctacaaatcacatgagctatgtaaatactctcgttttacatcaacttatctttattttattagagcattcctaatactcacttctcagatttcatcttaggatcataagtcacatttaagatggccagtttaaaatatgtaattaaagcaaataagaacaaatggcacaatcagggatgaaaaataataagaacattaactgaattagagaaacgtcatctaacaatcatcaaatccctaaattgggaatttatttcatgtccaaattcataacaatactaaagcagaatttaacataaaagaaataaaaggagaagaagaaagaaactgttggtggaatgaattagggccgcgactcttctccttctgtcgttcttgattgcttttaggtctaaaattctcttcccctcttctctttctcgtagtatcctttatattttttgtcccagattttaaaagatgaaattggcctccagttgtacggaacctcgtcgtggcaatggattacctcaccgcggcggtggagtagctcgccgcggctactgggccagtctcgaaagcttcattctgccaaattttggccatcgccgcaagaagtgaaccaaatcctgcttttctgatttttcttggctcgactttgtcttttatcatacttttgaaacctcgaacatccacaactatgggaaacttgaaaacatagaaacacaagcgtaattctgtcctaaaacatcaaaaaacgactctatttgtgacccgaaaaataggcttaaaatagcctaacactcgtacactcttctcctttaacattaacctttttgaactgtgggcaggcccttatgagatgacccactaccccacataaaacaagatctggctctacattagcccgaatggcccctttttttttgcatcttgaacactcaggataaggttgacctttcttattctcgctttgaccattatcgtagttgcactagaaccttttgttctatcccataattggtaattcatttagtttctgtctactgatctacacgtaagttgggttcatatatatttcaccacatccagtagtacaacactaagtgtcagtattagaagaacagacataagatgagccttttgtactttcagatctccaatctgttttgccttgttgtctaatcatatcttgcatagcagaatttacatgtttctagtatta

SEQ ID NO: 231573 - DNA, 940 bp, Cannabis indica
cgtagacctacgtgttgctctcacacgtctgaatacaataagaccttagaatggttcatctcggttatggttactgagtcgaacctgattatgccttgagtgcataatccttatatctcattacatttaacatggcatggcatttatacacatatatcactagggtaataaccctaggcaatcaaccgctcatattagggtaataactctaatctcggatactaaacaatcattcatatcattttcaatataagctccactgcgcatactctattgctaataactgtcttacctgttgtcccgcagtattagagatttcgaatccccgggtgctcctgattaggtgccggtaatcctagtcacacaaatccgggattttcataaatagggttaatacctaatttcacatttataaaatattcacatggcatttaaaattcaaatattcagatagagctcgaaaagagctttccaacggtatatagaactctaaaatcggagtctggatcacaaagttatggctatttgaagtttgcaaaaggatttgcccagaaagaaatggacgcgccgcggcatgctaaataccatgccgcaacacctgggttcaaaacccagaaaaccagcagcaaaactcgaattttcagcctccaatcaacacaaaattatcccaaatcacaaccaaacttccaaaccatcaaatagggttgctagcgaacaatagatgctcaaataaacatatttcatgcatcaattcccataataaatcctcaatttcagattgtaaaaatcaacttaaaataatgttcaaactccaaaacttcaagctctaaacttgagcttcaactcaaccaactcaatcaattttccagctacaaacactgtcaaaaatctgaattcaagacatgataataaccctgaaaatttatctagagctcaatca

SEQ ID NO: 231574 - DNA, 1590 bp, Cannabis indica
tgatcagtagccttttgtcttaataacagtaattctgtgtgactgccttcgtcgtaggcatcgtagatatgtaagaaagttttaggatgtttaatgcatgagatttttacgtggttggggcattaatgagccttagtccacgtagtttttcttatttatgagagtatttattacagagaattttctgggtagatattcctcttagttgctctctttaattcttatgaacccaaaattctcgagccccatctcagtgcatttggggggtatttatagtgttttttaggggtgatccctaaaactgaatcacttgtctttctgtgcaggtttgataggggcacatattcctaatcgatgcaaaataggaaatatatggcctataatgtgggtatcttaggtgttaggtggatataattatttatcccttcttgattgatgtgatccctcataaagtagttgtcactagccttattaatcataccgtaatagctgcaaaagaggggttccgctgtaatacttattgcttatggctgttccaatacattttctcccatgcagcattcaatgagaggggactgttcaaataaggtcctgttccacccagagataccttcgcattcccctggtctcccggagtatgtggagccttcacctctcctccgggagggcatcttctcattgacactcctaatgccaaaaagacttagtcgatttatctaatcgttgtgcttctcagacccacgtgttgtttccatattggtccacgtattttgggcaaagttaagggcaacaacaaccagcacttagcgaattcagctttcgcattgtgagtcatcaaccaaatccctataacttggggattagactacagggatatggcatacacatgatcccacgatcagtgtattcagcatcgatcccacgatcagtgtattcatcatcaatcccacgatctttgtacttagcattgatcacacgatctttctattgatacacattgtaacgagaggggaaactcttcctctccaagcttactagccctataaatagtgatgcatgttcactgggcaaggagagagaacagtttggtcgcaaacagattagttgacactataccctaaagatattatctaagaattatatattcagagatacttttgtaagagctataagaaaaggaatctttctccttgttcttaagtcaatacaagtaacgaggattaggctattaccgaactgctcggggctgaacctctataaaattcttgtgtctttatattgctttattacatatcgattgctataaatcacttatcgcttattaaattagactcgttgtcgttggctaaaagcgaggtcaacattttggtgctttcattgagagaaagatcacgaatcgctctttattcaacatctaaccacaaatacgatggtgtagactcgtagaggcctgaatgatccaacaaattcacagacggtggatcctgcattgcagaacccaggaaacgcaagggttccaccagctgttaatcctggacagccggcaaacgtgggtaacggtgtaacaactcctatagatgaaatcgcgcc

SEQ ID NO: 231575 - DNA, 2178 bp, Cannabis indica
attagcaacgagctgcacaacatgtttaaaaatcacgtaatacgcctatgttagctagggtgttacaagaattgagtggggttttctagaagctatgttgagaaaattgggttttcaagaacattgtattcgacttctattgaaatgtgtttgctcagtttcttacaagtttgttgctggaggtcaagaggtaggcccgattgttccaactagaggcttgaggcaaggtgatccattgtcaccttatcttttcatcttgtgtgcggaaggtttctcggcattgttaaatgactatgagagaaggggtagaatctgaggttgtacagtcgcgaggggtgctcatttggtgtcccatatgttatttgcagacgatagttacatctattgccaagcgacagaggaaggtgctagaagtgtgatggaactcttacattgttttcaagaagcctcgggtcagcaagtgaatcatcagaagtccactattttcttcagtcccaacacggatccgaatgtcaagaatgcaatatgttccttgatgggagttgctgaagcgggggagaatagcttttacttgggtttgcctaacacattgggacgcaataaaacatctatgcttggttttctgaaagacaaaatgaggaaaagaattcagagctgggaagaaaagttcttgtctaaagcagggaaagagttgctaaataaatctgtggctcaatcattacctagctatgccatgaatgtcttccttctacctgtggaaacttgtcaggaaatggaacaactgatgtgaaaattctggtggcaagcatctgccaagaataatatagggattcattggaagagctcggagaaattaacagttcacaagtctaaaggtggaatggggtttagaaatctcagagattttaatttaagccttcttagcaagcaaggttggcgtttgttaagtcaacctgactctttggtgggacgtatcttcaaatcgcgttactataaagatggtagttttctatcagcagagttgggatgtaatccgagttttgtgtggcggagtataatggaagcccaagagttggttcggagtggggttaggtgtcgtattggggatggttcttctgtaaacattctttcggacccatggctgcctgactatgataatccgagagtctcctcttctcatccggcgttagtagatcaaactgtaaatgtgttaatgtcttctgaagatgttgcctgggatgtcgacttggttcgtgatttgtttaatgacagggatgctaatttaattcttagtattcccttatctttaagtcgtagagctgatgtttggttttggtgttgggaaaaaacagggcatttttcagttaaatcaacatataagcagttacaattgtcaaaggatggggagtctcaacaaagtaattctgagatttggaagggcatttggaagttgtatgttcctcctaaagttaaagatctagtttggcgagcggcatcagattgtcttccttctaaaacacgcttgcggtcaaggcatgtccaagttgatcatggttgtccaaggtgtgtcactcatgctgaaactccttaccattgtttggttgattgttctttcgctaatagctgctgggagttagctggtttgaagagatctgtcccagccgtgacatcttttgccggttggttggaagctatgttccagcagttggataaagataagcgagctaatgttgcaatgatttgctgggctgtgtggaaaaccagaaatgatctggtttggtcgaatactcactcaacagctgctgctgttatttttctggccaaaaacacactagtgaactggtgcaaagctcaggacaggatacttgttcctgcagcagcttttttaacagatcttgatgggcattcggcttggtccagacctgctgcaaacacgttcaaagtgaacattgacgctgcaatttttgacagcaatggcacctacagcttcgtttgtgtggcgagggatgctaatggtcattttgttgaggcgttaacccgatgtcgggcagggagtgtggctcctgaattggcggagcaatgggggttagggaggccttgagctggataaaacaacgagattggcaagggtcggttgttgaaacggattgtctatcggtggtacaagcaattaggagt

SEQ ID NO: 231576 - DNA, 1093 bp, Cannabis indica
agaagctaattcaactaaaccaattgcagaaacaaatacatcaggtagacaaacaagctaaataggcagaaaataaaacttggatatataattaaggctttttctatgtacactacttattactaatccagtgaggttaataaaatatcacctaggcagtgcttgctttgccatatgtatttttattttcggagcatggggtagacattgacacatattggtcaaaaagataaataattctgtttgcagaaaaaatcataggccaaatctacagaagttatttcatctctaaagaaggtgcagaaccaaatacatcaatagttaattggttaacatgtgtcatgaccatctacacatgattggttaagagagaaaaaaaagttgaatattcacttttatcatcaagattagcacaatctaggagaaccattatgaattttcggcatatagatccaatcatcattgcaatttaaacaaaataaacagaaattatcatgatctaagttctcaaaattcaaatggggaaatccatcagtttgttgtatgaattctcatcgcccttcgacagttgttatgcttgtattgcatgatgggggcttaagaacggaggaatgagctccttcccacaaatctgtgttagagaaataggctggcggtttgggttgaggcaatatgctcttgtcactcaacatttgaacgacggaagacatattaggcctatcattacgtttttgttgcacacacaagagaccaatgtggatgcaacgcaaggcttcttcgatgttcatatacggattacttaacaagcacttttcaataagcttaaaagcattgccttctttcatcaaagtccatgcctaataaacattataaaaatataaatataaaagaaagagccattgtaacatttaagaaagtttttgatatgaacacttaccaatccattgaggttaagaaggctatcttcgtcgtaaaggcttctacttttctttccacttactatttctaacaccaacgtgccaaaactaaatacgtcagattttattgagaacagaccattggaaacatattcaggtgccatataaccactgca

SEQ ID NO: 231577 - DNA, 938 bp, Cannabis indica
tgaggctaagttgaagggaggtgcaggggccaagcagtacgctcaggagcattttaagcaggaagacgaggttgaggaggagcaggtgactccactcaagaggaagaagaaacttctaaccaagtacatgcctgttgaacatgcaattcagatcagggagcccagtctgcctactcggccagccactcctgtaataggaaaggggaaagtcgtctcagaggagataagagacttgtcaggtgatgatgagcaatcaggtcttgctcgggcaaacacttatttcaaagagcaagatactccatcttgcctttaacttccttaattattatgctttcataattctagtgcttttctctaaccattatgcctttatttcgtgcagacatgtctcaaaagatgctcaaagctttgaggaagagagtgggaggaagcccaggcttatcccctctggccaagaagtctagaggcggcgagacaacctcgtccagggaaaaggcaccggccgaagcagttatcgatctctcttaggagctaaccggtgtggacctttctgccccaaaagctgctaagtctaaagactctctaggaggaagctcgaacaggcccgaacagtcaaagggcggatccgaactggtgaagagcggatctaagtagattcgggctcctaccccacctccatcactgcatccagagactaagagaggcaaagatatgctcacccactacatgaatcggtcagtccctgaggtgaatgagaagctggccacagctgacaacgagccttcgctggagctgttgacgggaggagtcctgaaggagtttacgatggtgagtcttccgtgatagtttcctttaatcctctttacttggctcagattctaatgtttttcctctgtgcagactgatttgaagatagcttatgtttattcccgagctaa

SEQ ID NO: 231578 - DNA, 1279 bp, Cannabis indica
ctgatggttccataactcatgatccaagaactatcacgtctcaatttctccaattttacaactctcttttcacctcccatggagtttgtgttgaggctgtccatactcttctccaagggattcccaataggctctccacccctcaagtcgattttcttgctgaaccctatactgaagcggaagttaagaatgctttatttagcctctctgctgacaaagctccgggaccagatggactcaactctcacttttataaacgtaactggtccactcttggaactgatttcactaaagctatgctccacattcttaatcatcagggggacatctcttccatcaaccaaactataattgtcctcatccctaaaaaaaagaatcctaagcatgtccgtgattttcgtccgattagcctttgcaacactttctacaaatgtctttctaaaattcttgcgaatcggcttaagcttgtgcttcactccattatcagcatcaatcaaagtgcttttctcaaaggtcgtcaaatcactgataatattcttcttgcaaatgaagtcattcatgccatccattctagaagatctgggaaggttggttgggccgctattaaactggatatggaaaaggcgttcgacagagtggaatgggattttctaactcatttactcaatcatgttggtttcccaattcagttttcttccctgatcatgcgttgtctttcaactgttcaatttcgcctttccattaatggctctctcactgatccctttccttcaacgcgtggtatcaggcaaggggatcccctctctccatatctttttcttcttattgctgagggtctctctgctgcaattcggttacatgaaactcaggaccaattttcaggtattcggatttgcagaggagcaccccctttgtcccatctcctgtttgctgatgacagcatgggttttttctcctgtccaccctcaagccagtaattccctcaatagtattctcgatctgtaccataaagctactggccaattggtgaaccgtgagaaatcctccattctcttctcccccaataccacttctctggcccaagatcttttccgtcaagacctccagctcatgggagaaggcttcattagcaagtatcttggtgctccccattgtgttggcagggtttcaacctcaatgtttcactacctgcttcaaaaggtttcctcaaaacttaattcctggaatgaaaaattcttctctaaagctggtaaagagattcttattaaagcggtagtcc

SEQ ID NO: 231579 - DNA, 547 bp, Cannabis indica
ataaatgaataaatcaagtctccgacaactacattttcaataactatcattcattcacattcataaatagttagtaatatcttttataattaatttaagaataaaaaagaggtgagaattacgtatttaagtaatcatcaaattaaaagatttgcaactcctatttttctatcattctacacacatttgtaaccccataatgtatgttataatttgataaaattaataatttgtcacactgaattatttgtaacttaattatttactctaaatattatattatataaaataatataacattcctccactagattaaataatatctcatttgtagcaaataattttttaacacaacatgttatttaatcaatcaaacattatattataaagtaatattatattctcccacttgatttaataactccactctaataaaaatcaattgtatttgtgcatagtgtaaaaatatctttcgacttgaattttacctttgtgtaattactacaaaattagttcgaaatttcggttgttgtagcattgaaccact

SEQ ID NO: 231580 - DNA, 1672 bp, Cannabis indica
tcgtcagacacacatagttattgcacaggcctctaacagttagtgatttttaaaaactaaataaacaaaactttagaaagaattaaaatagcaaataataaataagtgatttttacgtggttcgggcgttaataatctctagtccacgagtcaattgtattagccattcaggcaagtgtttggataatacaatgtctgtttatagtataaatcctagctttgcactcattttatttctcttcaagaagaagaagaaagcttgtaggagttttgcagaggttcagctaatatagtggtcgacccgagtcatagtagtcgacctaggaggagaccctagccctgcgcccaggttgactacgggatctttgggatggaagttcagacttgaataacatgaatctgacccactatcttttagtattctgtaccatgaagacatggagcaacttaatccaagccccgagagttgaaattacatgaacctacaatccgaaagccaacctaggcacctagagttttacctggcgttcaagttaaaattctcaactagagttttggtttctgggaccgtcttagtgcaaaatggtcaaaacttgcattgggacatcaactagacatggacatatttgaggcatcagagtcaaaatcagagtgagctaatttttgagcgcccgaggacccgagcacccagcgcttaggttgacaatctatcaatctaggtgacttccaagtgttcgatttgagatccaattttttcatcttcttcatcttcatcaaaactggggaaatagttctttttggaggaaaaataacaattcttgggtacaaataataaggcccaccgccaaggttgaaacatggggctggccctgcaccctgattgacatttcgtcaacttgggccatttgaaatagagtttttcaagaattatatcgagcatcttctccatttttagaaaatattgagattcaactattttcggggaccaaacagaaattttggaggggcaaaactaggacttaggtctaaggttgacatattgtcaacctgggctattttggatcaagtttagaaaaaagtggtctaggcatttttttgtgatcagaataccaaagattcaagaaaacttggggtgaaaaaccacaatcctgagtccctgcaaacagggcccagcgcccaagttgacctagggctgggctcagcacctaggttgacaattaacctggaatgctaccttatttaattccttaaatgccaaattctatgtgaccattgaattaagaatggtcaaaatggggtgggagaccttgtcctcaagttcagaagttggaagcttcaaaaacaaaatcgcaagagttcgagagtaagtacctagcacctaggttgataaaaggcctggtgtgctgggttcagcttatccaactctaatgtcgttttaatcgtctgtctagtttttcacaatgacaatgatatataaagtcagagaaatcaaattcataaattttcatttctcatttctagctcacctagaaatttcaagttttgagtctctcatttccacaaaatagcaacagctccaaagtagactaagtgatgtcaaaatattactgaggtattgtaaagtacaatccttggatgtttctacacttacccagcgtctagattgacacca

SEQ ID NO: 231581 - DNA, 1519 bp, Cannabis indica
gatattttggtggagctttatcagaatccagatacttttgcagtcgactccctttgatcgaggccaaaacctgatgacgccatggaaggtaattgtgctcatcgagcttaattgagagagaatgagtgaatgaaacaaggtaagatttcggtagcattgtttgctgattgttctctgtttgagcattgttcaatcttgatgctccaccattagaagtacgagggatctccattaacgaacgagagagagctctgataccatgtaatgatttaagaacagagagagagagagagaacaaagaatgtagtctgttattgatttgagaaaaggttacaaagaagctttatatacagatacaaagggagttgaaccataacagaattaactaaccaaataacagaaaacctaactaactaactgtcttaactaacctacatccttaacaaatgttaaccttaatacaaataaaagtagcaaatttggacaaggaaggtataatttgttcttttgaagttgaacatgaaactcagaaagcatttggaaaatctaatggtttcttttgcttatattgtgaacaaataacaatttgaggatacaaaagctgcaatgaaataataacaaaaagctcaaaactctattctctttggaaagatctttgatagaaaagtaaccatttgatcactttgtgcacttctaataagtgtactcttcaattttccagaatttgtgagggtatcataagcaatacctctaaaagcttagtatgaaaacacatttatttgaaatttgagttcacaataagagccacgttcttactataatactatatcttaaataaatacaaaatgttatggttgtagtataattagttacatgaatatatatagttagtgtcaatactcccatatagattacatactaaaatagtagcaaattaatgacttataaaactacttattactaaacttatcatatatttgaactgagaataactaaataatgtacttcaagaaatgagagttttgggggcgaataaataataactaaacaccccaaattcaccattaaagtagtactattatggtcaacctataccttttaaagacaatttgtcgccggcaatatatatcgcctctaacattttttattttttatttttaaaaataattaatttacattaaaatattaaattaaaactcatagaaaaaaaactaaaatatttaaattattatattataggcaactaaattaatgttgcataatgttcaaactacaattataataaactaactaaaatcaataaattattggtataatgtaaaatagtgtaacaaggaaatgtaacatgacagagcatatataatgtctctctttaaatggaaaaaaaaatatacattcatcttctacaacttgaaaatcctaatatttcttgtatgggagatgtaaattgcatattaaataaatagttaaaaattaaaaagaaaatcatataatatccttacagcacagaaaattaatc

SEQ ID NO: 231582 - DNA, 538 bp, Cannabis indica
acatattatttgacataatttatatattgtcaatgttttatcgtcgcaacaagattacaatttacaattaatattacagtctaaagacttaatattaatgatgtgtttggtatcttgagatgagattaatcattatttgaatttattgctttatttggattcttatatgagcatattttatgtaattctattgttcttttcagttattgctagtgtatcggctaaccttaatgtggtaccagtccttaatggtaataactttaagaactggaaagagaataatttcattattcttaattgcatggatcttgaccttgcattaaggatggatcgacatgctcttcttacggataccagtacctccgagcaaaggaggatttatcaaaagtgggatcgttcaaatcgcatgagtcttatgatcatcaagtgcggcatacttgaggcttttaggggtgctgtgtccgaggaagtcaccaatgccatgacttttcttgctgaaattgagaaacactttacaaaaagcgataaggcagaaaca

SEQ ID NO: 231583 - DNA, 1710 bp, Cannabis indica
tctaaaagggccaaagacaaaaataaatgaaaataagtccaacaaacaaacatcaaataagttaaagtaaaggaaagagaacacaaaacttaagccccataaagcttgatcaaggtggacaattgtttggacatttcttgctaaatctcctccatggcagctaagcaattgttcatcaagatgacatcctgcatatctacagaagcagaactagaacttgcaacaacagtagatagaattgccccaacagaagccttatgtggcttggggaaagctccaaagtactctgagggttgaaaaatggttctagtgagtggtggctcgagagcttcatttgaataggccacattcttctgagaggaaagaaccttatagattaggttaagaaaaataagcttgtggctacattttttacctctacggaaggaaataatttgctccatgatgagagaagccaagttaatatttgcccatgtagtgattcaaaaaagaagataagccaagtcttgagacaccattgtcttgttggagtttggaagccaattgctaagagcaaatcgcattagtgaggcatagtcataagtgagattagtgatgcaaacactttgactagcaacctattcaactagagcactagtgagttcaataaaaatgcagtcacaatccatagacacttcatcacttttcacaccttttggcagtttcaaggcttcgacaatttcatcttcagtgaatgaaaaccaatggttgcgaacatagactttaccgaaaactcatatttttttatcaagcaaatcatcagtcaaattagcataaaattcgttaactatgccatcaacataacaaagccagttaaagtatcctcccaatttcgatattgaatatattttacaatgtcataaactctatgagcatttaaatcaaaattcctttcatttttaaacttagggatagcatataaattccaatcacattgattgtcattataagaaaatacggaatttacaacttgagaagaagagaggttactagtgaaagagctcttcataggttgtttccctttcctgctggtgatgctttgatagaagcagatcgagaagttactgctgtagattttggcaatgatggttcaagatccaaatcaacaaaatattcctcaattttaattgggacttcctcactttcagaagagacaacatcattttttatagaaatttctttattaaatgaaaaagactcagttttggaatcagatttcccagattacacttccatgggatcttcttcttcatcattactcgaggagcttgagggagaattaagcttgagcttttagtagtaggaataggcatgtcatgacaccttttgattcatgcttccttttcaagagaagcttgttgggcacgagtctgagatgaaggaccttttggggttgatgctgcaaaagcatcaccagttgcagcaagtggtgactgagaactacgagaaggagagccctcagcaaaagcagaagaagactttgaaccatacctagaagtcttgggaaattgggtgtgcctcacagattttcgagcaagagttttgggtgctctctagttggaagaaggagttaaagatgaagctttcttgactggagctctctttgattcacaccgaggtggaaatgaattaactggaattgaggcagttgcagtagcaggaggagattgt

SEQ ID NO: 231584 - DNA, 815 bp, Cannabis indica
tgaaccaatcgtgagcattatcctccaaggttgccgcaaggatacggcattttgcaagctgaggtacatgatctacttccataatcgtgttaaacttttctaaatagtgtatgggattagaggtacctttgtatttcaacgactcggatagtctgaatcctttaggcaatcgagcttgttcacttccatggtaaaaggagaagtcccgtgaagcttgtaaatgggctttctttgctgctcaattatcttcagtacttgtagtaaaatgctctgatcaacacccccttgcaggacggtgttgttttgagtcgtcacaggtgcagttgcaaccgcagctatgtttgccgagataaccactccagtagtcgtagctggtgcgttaggcgggttggcaacgtatgtcgggttgttaccattgtttatgccttgatcacccaattggggatcacgaggctcttcgcaatttcggggcgtctgggatcgcgccctaaaaactgcgttaaggtgatcacagagatcaccccagtgaacttggtacctccttcctcgcggtgtttctacagaacctaaactggtataaacactaggagtgcgactttgtgaggactaagaaccagattcaacatcgtttacctcatttctcgactgagccctactacacaggttgcattaagctgggtcctcttcttgttgtaccttgcgattggagtttcgtgtgacttgatctctcggcgttggttgattcaagtcgagcacttcaggcctacgttccctgcgagtgcggttagttcatcgtctagtattaattacctgag

SEQ ID NO: 231585 - DNA, 913 bp, Cannabis indica
tgggatggcaaatttttatctcgagctggcaaggaaatccttcttaaaactgtgattcaatccttgcccacttacgctatgagtgtcttcttaattcctctaggcatttgtgaggatattgagaagcttatggccagcttttggtggaaaacaacttcaagcaagggtcgtggcattacatggatgtcttgggaaagaatggcaaagcccaagctggaaggtggtatgggtttccaacatcttcatgactttaatatcgcaatgcttgctaaacaagattggagacttttgtgtaaaccggactctctggtgggtcaaattttcaaagctaaatactttcctaccagtgattatctctctgctgatttgggaaataatcccagctttgtctggcgtagtgtttgggctgctcaaagtgtggttcgtcttggggtcgtgcgtattattggaaatggtgaaactaccagaattctctctaccccatggatgtctgacactgaaaacagacttgtaacctcaactcatccagctcttttgcataatactgtgagttctctcttctctttggagactcgtacctgggattctgatgttgttaaggatctgtttaacaaccaagatgctagcttgattcttggtcttccgttatctccaaattctgatactgacttctggtcttggttgggagatcgtactaggttcttttctgttaaaaccgcctactatttgctgcagaagaataaaccccagcactctagtgctgataattctggtttttggcgtaaaatgtggcatttgaagatcccacccaaggttaagaacttgctatggcgtgcaattactgattgtcttcccacctgccttcaactagtaactaaacatgtgagtatttctgcgctctgccctgtgtgca

SEQ ID NO: 231586 - DNA, 716 bp, Cannabis indica
gctctaatggcctggtgtacaaaatggtcccatggggacaagatgttgctttcccgctggatgctacaggtgctgaaggtaacttggcaccccgtacccttatctagtgtcagatggtccctaattgcaggctgtaggaggatggtctccgggttcatgcgcatggtccccaattgtaggttgcaggaggatggtctccgggtacatgcacatggtccccaactgcacgcgaggtggtcctcgggtataggatgttgaagagtggttgcaccgtacccttagttgggtcttcaggccttgcaggtcatttgtcgccactacttgtacctccttgtcctcggtcttcagaaagcgtggtggtacgctattctcttgcacgccttgtcctttcatttctttccaatatcattcttgtcgttatgcatatgttctttcccttatcctcgtggcccttcccaaaacatactcattccatgcacaccacgacgcgcatgagagccccgcatgggctcgcatgcgacccccatctcttccccttcacggctcccgtgcgagccccatgggcttgcatgcgtaccctcatccttcgcaccatgtcaaccccatactcccgcttcgtgccaactcttatcgccactactcaccctaacgcatctccacacaactcaaaaaacagctcgcatgcgaggccctccatgggctcacatgcgagcccc

SEQ ID NO: 231587 - DNA, 2014 bp, Cannabis indica
gaggcatccagaacctatcaaaatcaccatccatgtccgtaatgaccacaacctatcagtgaccactatcaatattggaatgtgttgatctaacaaccatactagggacaaaagaatgagggatatcccctttccactactcaatgaaagtaacaatactattagaaaataatcaactacacgaagataaaccccctttggaattctgtattttgagataaatacatagcttggggtctacactctttcctatctcaacaatcctaaatgaagaacacaattcaaggatggacacaaacattcaaaaatacatatccctattctttaacattttaccaaatgcccaatctaaaattcctagtccaagcccacaaaacacataaaattgtttgtattttatttttcctatcatgttttataaataaaagagctatttttctaaacacaaaaatattcatccaatatatatacccaccaatacacattatgaactcatttcaccactagttctcaaccattacaacaattataaactacttacttcctatacactattcaaattttttccattatttatttgggatcaagaagaaaaaattgaagaatagcaagaacaatgctccaccatttctcaaaaaatcctaaatatattttaagtatctttcagaccttctaatggaaactaacttagcttcacaaaatttgttacagaaactcaacatgacctaagaaaaatataactattcaattagtatcacaaataaatcttcaaagcttaaaccaagctatcatgaaaatgagaaaatatacctcaacgaacgaactagctcaagaatcattaatgtatatttttttagctaaaaatgggaagggtgcataccttttcttcaatattttgttgattgaaatcaatcaataatgatcttctcacactagtcttccctctcgtctgaattccatgacaaaagctgaagagtaagactctgagaaaatgaagccctcggcaaagttatctcaataaacactttcaaatttcaaaggcccagcccattctttcacatataaacatatatatatactaggtgattgttatgtgcaaggccacgtagtgttagttttatttaatattttagttttttattttacttaataattaaaatagtataattatttgaacgatttgttttataagttaaaaattatgcctcttgcaagaatgttattgagcattcattgaacaccatcaagttcctatccaattccatggagttttatggataaaaatcaattttttaatcaagaaattaattttaattaatgtcctatcgagatggacatcgagcttctatccaaattctacataaacaaaaatatataaattagtatttaaatgatagttttattctaaatcataaaataataaaaaaaattacctttttgtcaagaacatattatatgagtgccacgaaacataaattttcctttcataaagtgggtgtgatagaaatcgaatggttctaactttctagtttctatgaatactactcaaattcaccagtatttgctagaaatatatcctagaaattgaaaaaaaaaagcaaataaaaggccaggtgctgctacgctggatcacctaagtaaggttgagctgacggagacagcgatggagacggagacacagacggtggctcagcctcagaaagttccaacaaatgccagcagcagcaacagcaacaacatcgacctgggtatgctcgtatggaacttgctcatatttgctcgccagcttatcaaccagggaaagccttctcaggccctccaagcgataaaattctccatttctttctttctttaaactttgcatgccgatgaagccatgggcgtcttccccgactttggtgccctccttgctgctgccattgacttagattgagcaggagtcaattgcgatgtaagtcgagaggtatatccaatggctttgtgataatcattggttcgacagggccaacgttgc

SEQ ID NO: 231588 - DNA, 1891 bp, Cannabis indica
attaatatagatcagaaattaaacgcccagggatgaaagcactttgattttctgacacaatggaatcaatgaaaggcttcattctattaaccataactttcgtaatgatcttatacatgacgttacacagagcaataggcctaaggtccgacatagttttcgggtttttctttttaggaatgagcacaacattagcttcgccaataccatcttcaaggacaccatttgtaaagaaagaccgaaccacttccacaacatcatttcgcactatagaccaacaacgctgataaaaagccggagtcattccatcaggacccggactcttatctggatgcatctgaaacaacgccttcttaacttcctcttcttgaatgggctgacacaactcagagttgacaaaagctgaaacacaaggatgaacacaatctaccacttccatacagtttgtattagccgaagtaaataaattatggaaatagtcttgcataacttctcctagactcgactcccaggttacccagtttccttgagcatcttttaattgctcaatttgattgtttttctttcggctactagcagccttgtggaagtaattactattttggtcgccttcccgtaaccaaaattgtttcgctctctgcttccaataactctccctttgatcaagagctttaaaaagcttttttttcacctcctggtagccttgcaccaaaacaatttcccttttattctgcaaattcttcaactcttttttgtaccctttaattctatgattaagggaccccgtaatctctttgccccaaaccttaagcttctcggcacataagcttaatttgccactaaaactaaaagagtgcccaagttcccagcattcttttatgatctcagaacaaagaggctctttcaaccaggtgttttcaaatcgaaaacgattgtgaggagcaaaaacagtgggaagatacggttcaaggaaaatggccgcatgatccgaactagaaaagtctaaattagagagagtagcttgtggaaatacctgaagccaagccgatgttgctagagctctgtccaagcgtatctcgatccaattgttagaccctctccccttttcccaagtgaacgggtggccttgaagctcaatatcaactaaattgcattgctgtaaggtggcgttgaatcccgaaagtaagctttgaggatatggccgaccccctctcttctcctcttgtcgaacaatgttgttcatgtcaccaacaagacaccaaggcaggtccgaacgagtagacaaagttcgaatcaaactccaagtatcttggcgccgacttcggttgggttctccgtagagtccagttagcctccagttaccaaaatgagcagtatgaataacaatgtcaatatggttattagaataacccatcaaactcccatcttctttattcttccacaagagagcaagcccaccagttaacccaattgcatctacagtaaagaccccttcaaagcctaataatctagcaagcccatccacttttgatttttgacatttaatttcacacagaaagataaaattgggtttcttatgagaaaccatctctttaaggaattgaatactccgttggttcccaagcccccggcaattccagcttaacacattcataattcttggcgggcctggacaccagaacccgccccactcaagttttttgtaactccctcttgaaccaaaatgttctcacaaacaattacaacttcatcagctaaaccgtgcacttttgatccagctttagaaaggcccacgtccccatttacccctccagttggcccactaacttgaccctcaataactctccttcttttagaatcacaaaaaaaccagcccatcatttgaattgtc

SEQ ID NO: 231589 - DNA, 810 bp, Cannabis indica
aaaaataaaataaataaatatggtttgattcgaatgtctttttttatcagccctaataattgaatcccaatttaagtttaaatacattttaactacttcaacaaacttacacaatgaaataatactaataaataaacaatcatatttttctcaccaattaattttttaaaaaaataatatgtttttattctaaaagcatcttcaaatcaagagtgtatcaagaaagatgctcaagttggagtgtcttcgaataatggtcgagcccctcctagttcagggtcgagctcagctactcgcaccattgtagagttgactttgggggatgttgatctttttgttgatgcgggccttggttattaagattttaaaatggggatggtagcttcggatcctaatggggtattttttggtgcttttttgttgattggtacctttaagccacattttgcaaaggtgatggctttgtttcatggcctttctctttgtcttcgttttggcttcaagaatgttaccgccttctctgattgtcttcgcttggttcttgctgtcaatggtaatgatattcgttataatgagttttgtattatgcttagtgatatatattaagcgtaaaaatcttttcatagtttatctttttctcattgcaataggcttttgaataatattgttcactgtttaacaaagaggacgcttgttttagatgagtctcgtgtttgatgtccggagtttcttatggatctagttgtttaatcttttgagctactctttgaattttgagatcttttaggttttgtgtcttttaatgtaata

SEQ ID NO: 231590 - DNA, 1384 bp, Cannabis indica
aaaaatcccatgcattaaactcctaaaactctcttatatatattaaattgtttgctgaaaaccttagtcaacattttggtgctttcattgagaggcggaggaagcgtcttcaaacagacaacagccttataagctaaagcaacaatggtggaaactcgcaacacacatcagccccgtcctcctcaagacgctcaaaaccttgaagacgaagaagtggcttctagagtcaacgtggattctgaggagcgagaggaggccaacgatgacgaataagaggaaaaatttgacgtatacggcgcctacgacgaaggaagtcacacagagctactactcttaaggctaaaggttgtgatcatgaagctaagatcgcagcccaaaaagaacaaaacagaaagatgcaagaggtgatggtcaccatgcaaaaagctatggagacagcagggatccacatacaccttaaagccatccctacaggactcgaggaaacgctggaagagtcctcaccaagcactcagaagcataagtccagggaacctagtcccatacggtatccctcagaaggaaaccaacggaaaaaccctacttccatcccagggaaaaagaacaagatgcaggatccatgaaaggtccgctcagatttcccaaaagggaaaggtccgcagaggggcaaactcaaaaaagggagtcttggccctgaggatcgagaggactgaaagagcgtttctatgcaccaggaacccggggaaaaaggaagagggaaccgaagataccctctcgttgatctaagacatcagatcaacgaaaaacacggtgatttgcgggatcacttggacaaaaagaaacacgcactggcgatctccgcagggacgctgaacgaaggaattatggctgagttagccatactgcgcaaggacattgctcgagtctctcagagataaaagggggatgactcagactctgactgtgaggactggcagccgtgggccagacacattctagaggcagagctccccaaaaattttaagatgcctgaaatggcagcctacactgggtactcggaccccagcgatcatttgtcccggtttaaccgagtaatgacagtcatgagagtcagtgatgatgctaagtgcttgtgctttccactaacgttaagaggttccgtggaagagtggttcaaaaaagttggaaccaggatccttgaaatgctggaacaagttacaagttagcttccggagacagtttttcaccgcgagaaagattaatctcgaagtcagcgccctgactaacatcaagcaactacccatagagacattgaaaaaatttcataaagaggttcaaggagaagtcttaaagactaagaaagttgatgacggacacaacttgc

SEQ ID NO: 231591 - DNA, 1150 bp, Cannabis indica
ttaacttaagatcaaggaagaagattccttttcttatagctcttacaacgatagctctgaatatataattcttagataataatacagtcttagcttagctgcattttgactgatccctccctttgcccagtgaatatgtattactatttatagagctgggaaacttgaggaggaagagtttcctctctcgttacaatgcgtataaacagaaagatcgtgggatcactgctgaatgcaaggatcgtgggattgaggctgaatacactgatagtgggatcatgtgtatgccgtatccacgtaaattgatccctgagttatagggattgagctgatgactcatgatgccaaagctgaattcgctaagtgttgattgctctacacggatcgctggatattttaccctggacatgctagagaggcatcctgcttggcctatcttcccaagcagatgttccaagcggactccacgtgtcaccattctcgtgatgccacgtcagagtgtaaaatttgggataacaaattggaagacttgaaaaataattataatattaattagtttccttatattataaaattttaaaaatacacataacgaaaataaaaactaaaaatataactaagtatacatgcaatgtacgtaacaataacttagtagtattaataattgtttatagttattattgttatatttgataattttttatatttaatgtttcttttaatatatctttatttaattataatctcttaattagaatataattttttgctctcacaaatataatcataaataaatgttgtattgtaataagaagagaaaaagagaaactgaatgagaatttctcagttatgtattccaatgggtcaattcctacttatacaaaaatatgactaaaagaatgggaaactaaatcaatgtaataaaggaaaataaaatcaagcattaatggtgataattaatttggtgttttggatatccataaataatatttcataacactccccctttaatgttcataaaaactatctcattaaaaaccttgctgaaaaaacttggtcaaaagagaaagactgcagtgtgaattaactccactcatttaggcatccgtggagatcttctaaacgacaaattccaatcttgtatgtcgtc

SEQ ID NO: 231592 - DNA, 895 bp, Cannabis indica
agaatcaccctcatcaactcagtccttatttatacaggcctattggagtcaaataatgattcttccaaagaaggtattgagatctattgaagccatttgtagggcttatctttggaaaggtcaagctatgtttcaaggtgcagggtctgttgcttggaataatatttgtcaacctaaggcaagtggaggtctagggatcaagaacctagaagcatggaacaaggctgcaataagtaagtatgtatgggctatttctaacaagcaagagagcttatggctcagatgggtccatagtgtttacattaagaatcagacatggggggattactctccctccattcattccagttggtattggaagaagatggttgccttgaaagaacaaatccgagaactgatagactttgatgttttccagaagcagaaatatagtatttcagctggctataaaatgttttcccccccaatcaatcgattgttttggagcaaagaaacatggtcaaggcttaacactcccaaacatagtgttatagcttggttggcaatgcttaataggttgaagacacaagataggctgctgaattttggtatgcaagttcaagggacctgctgcttgtgtacgatacatcttgaaacctgccagcacttattctttgagtgcaatgttgctgagaaatgcctacaggatctgaaactttggctgactggcatgctcaaaccagtagcctacaacagctacttaaatggattgggaagtccaaattgtcccagtttagaaagggggttctctcggctgctgttgtagggctggtgtacaacatttggagagcccgaaatgaagtggtatggcaaaaagctagaattagctcgaaccgaattgttgaagaaacaaaat

SEQ ID NO: 231593 - DNA, 856 bp, Cannabis indica
aagagagactacaagggtaaaataatatcttgagttattgcctgcttcttgcttatcaaaggatatcaccgaatcctttctttcaacctcttggtcctgtcaaagagccattatcagctgatcacaagtctgatgctgatgactcgatcaagtctcacaagaccatggctcaaaataggacgttgaaagagttggtcgtgccaaatcttggccaacaaccacggtgcatccattatccacccttggatatcaactttgaactgaaatccaacctcatccacttgctaccagcttttcatggatttcttagtgaagaccctaacaatctgaaggagtttcatattgtctgctctagtatgaaacttacatcaataactgaagagcaaatcaagctacaagctttccctttctccttgaaagatgctgctaaggagtgattgtattatctaccacctggtactattgagacatggaatgacatgaagactattttcttggatcgatacttcccagcctctaaagttggaagcatcagagtagaaatttgtggaattcggcaagatactggagagtcactttatgaatattgagaaaagtttaagaggttttgtgatagttttcctcatcaccagatcagtgaacaactcctaatctaatacttttattaagggtgttcatataatctgcaatctgtggtttcaaaccccgaaccaatccggaccaaaccatttgagactgaaccaaatgaatctgatgtgaattattaatcaatccagactatttaaattttagttcggtcacgattttgaaaatcacgatagcagttcaaaccaaataaaatccgtataattattat

SEQ ID NO: 231594 - DNA, 1678 bp, Cannabis indica
aatctcaggtgtacatgtctagtgaagacgactcaagagagactatcaagggtaaaataatatcttgagttattgtctgcttcttgcttatcaaaggatatcaccgaatcctttctttcaacctcttggtcctgtcaaagagccattatcagctgatcacaagtctgatgctgatgactcgatcaagtctcacaagaccatggctcaaaataggacgttgaaagagttggtcgtgccaaatcttggccaacaaccacggtgcatccattatccacccttggatatcaactttgaactgaaatccaacctcatccacttgctaccagcttttcatggatttcttagtgaagaccccaacaatctgaaggagtttcatattgtctgctctagtatgaaacttacatcaataactgaagagcaaatcaagctacatgctttccctttcaccttgaaagatgctgctaaggagtgattgtattatctaccacctagtactattgagacatggaatgacatgaagactattttcttggatcgatacttcccagcctctaaagttggaagcatcagaatagaaatttgtggaattcggcaagatactggagagtcactttatgaatattgagaaaagtttaagaggttgtgtgatagttttcctcatcaccaaatcaaggaacgactcctaatccaatacttttattaagggtgttcatataatccgcaatctgtggtttcaaatcccaatcaatccggaccaaaccatttgagactgaaccaaatgaatctgatgtgaattatttaatcaatccagaccgttttaaaatttttagttcggtcacgattttagaaatcacggtagcggttcaaactaaataaatccgtataattattatacatatacttaatatatttttttggacaaaatattgatatttggaaacaactttaagtagaatgttgatattgagtttatattgttatgataataattttttattgttacttatgtattataaccttattgaaaaagtaaaaaaaaaatatcgaaaaatgaacaattattgtaaaaaaaaattagaacaactacgaaatacaaaccatagtttgaaccaaaccaatccgttttagagtgatttggtttggtttgatcattttattggtttggtttggttttgaatttttaaaaaactgtaatagtggtttggtttgaaaaaattgaaaatttgaaccaaatcaatccgtgaatacccctgacttttatgaaggtctcttaccttttgaaaggagtatgatagattcagccagtggaggagcattggtagataagacccctacagaagctagaaatctaatctcaaacatggttgtcaattcacatcagtttggcattcttcgagtgcctccctcaacatcacgacaggttaataaagttagcaaacccattaaaaaccaacttagttagcaaatagttcagttaacctccgttgtacaataacttgctttaggccagcaggtgaggccatgtcaaatttgtcaaactgtgggacatgctagtaatacctgtcctacactgtttgaagaggagactgaagatatgaacgatgtaggtaattttccttgttaattaagccaactttatgacccacactcataaacttatagacctaattggcagaat

SEQ ID NO: 231595 - DNA, 1360 bp, Cannabis indica
tgaaagagagggatgaaggaggaattgagaaaaaaaaattctgaaaaaaaaaaggaaaatggagtttgctcgtcgaaagggcatatatgaacacttttaccggtgcattgaattgcgccgataaaagtggtcatataaccctaaacccaaacgcacttttcgttaaacacttttaccagtgcatggtaaaagtaatcccacctaccaccactttccacgcgggatttttccccctaaaatttcatgtgggcggtcaagattcccaccaaaatttgctaacttttaccggtgcaatttttcaccggcaaaagccttacagaagtggacatgtgttcgcgccatttggcggtttattgctgatcttttaccggcgcatgtcattgcgccggtaaaactaggctttcttgtagtgtcccttggaaaaactttggtccttccttcaataagaaaccccttgtcatctctcgcaaccaagccaaggccgaatccgtttagatatgcaaaagatagcttcatctacgttgatcttgacactatttaacggtggtaacctccattgctctgccccatcatctttggatagaccagataatgtagtttctaaaccaaaaacttgagcaatcttccactgttcaagataacttatcgcagatgatacaaccttcgatgcaacaacatttatttgattccaaaccttgtcattgcgggccccctgaattgcccaacaattggcagcaagaagatcttgcctattatcattgagctgcttaaaacaagcctcaaaccagctggaaaaaccagcagccgtgggcaccccagtgccaattccaaccttattccagcaaatttgagcagctggacattcgaccaagcaatgcacaatcgattcttcactttcatggcaaataggacattccatcgtgaccgccacatgctttgtacaaagctggaccattgtaaggagacagtttgtacaagctcgccaaaccaggtccttaatcttgggcgacatatgcaatttttaaaatttcttccaaaaggcagaggaggtggcactattccatgttccattttcctggataagtttgtaggctgactttacagaatacaaccctgaaacctctttgagccaaactattgtatcaccacgattcgtaaagttaagaggaatgcttagaataagagcccgatctctctcattaaacatatcattgattagctccacatcccacgccaaagaagaaggaaccataaggttagccaccattgcctcttgcagcccgagagaggtagaagttaccaagggattagacatatttggtagtcaaggatcaccaagtacccttatcttttctcctga

SEQ ID NO: 231596 - DNA, 909 bp, Cannabis indica
tatagcataaggaagaaagagcacaacgtaccttagaattcccctatatataaatacatataagaaaaataccaatttgtcaaacctaatagtaaacgttaaaagcataaagaattgcaagaaagaaaacattgacgatagatcattatatgaataaaaaccactttctccactagatttttatttcagttttagtcaatcaaaaatctccactaaatttttttatttttagagcccatatataaatgtgtaatgataaacttatctatttttcttcttgaaaaaagtttaggattcaaattttatcattcacatattttatttcagattttaaagagacagaagttcaaatttttgacggttttgggtgataggaagatttcttttactatatttaagtaatgggcatataactatatttaactctttatgtattctgaagatgaaaattgatgtggaaaatgaaaacagtgtacatcgtgtcgtttagtcatctaaggattcgttgaagtttttcatcataacaagatcatagttgatagaagctagttgtgacaaattccgagaccaataataaaatgtagactctaactttaaggatgcaatctcacacataatccaaaaaaaaaaaaaaaaaaaaaaaaactaacatttctaatctagtgtgcggcgagggcaagagcactaaactctctcaaactactacatatataattggcctccagccagggctggccctaaaaatttatgggcccaagacgaattaaattttgggaccctcaaaaatatatcaaaaaaaagagtgttatgggatttgaaatcttgtacattatgtcctccacctcaaccaactaagatataaatatttgttgcttatattacacttaaattttacttaaataaaagcct

SEQ ID NO: 231597 - DNA, 795 bp, Cannabis indica
catttaattttgtaattaaaatgctgttgctaaataaaattatcacacatgatagattttatttaggcccaattagtatttgagcctatttaattactaatagtggtttaaattaggactttttacaatggacacaattttttttatttttatttcaaaaatggcgttgtccatctaatgtaatgtaatgacgtttctatgtaacgtttgttataaatataatgacacttttattttttatttataattgttttgggagtcattgaattgtatcctatacaataaaggtaaaaaaacatatatattgtacgtactgtgctttattatttctttaattcatttctttttattattttgttttaccttttctctttcactctttaaatgtgtccctctttctatcttgctctttctttcttttcattttttttctttttctttctaacttaaaaaaaaagagagaaaattaaataatataccattttatattgtcctcttttatttaaccatcttttttaaaatctattatttttacctcttttttaaacattgtaccaattttttcctatcacttcaaaatactctccatgtgactcctttatatttgattaaacttaaaaaaaaaaacatcctaatttattttttgatataattattttaaaatgtgagaaacatatatttattttatttttatatttttaaaataaaaaaatattgaattacttatcatactaattatatattgattagttactgttctataattatttttagttaacaacttaagtttatttt

SEQ ID NO: 231598 - DNA, 1438 bp, Cannabis indica
ggcttaccaatgagggttttgtttgtaaatatttgggattccacagtgtgttggtagggttgacaactctgtttctattacctggtccaaaatgtatcttcgaaaatgaatgtgtggaatgctaagtttttttcaagagctggtaaagaaacttttatcaaatcggtagtccaagccattccttcatatcccatgtcatattttaaactgtcaagctatacttgtaagaatcttcaaaggcttactggaaatttctagtggggatcctcaaataaaaaaaaaacaaattttattggaaaaattggcatagtctgtgtgtttcaaaaattttttgggggcttgggtttcgatatatagctaatcataaccaagctctgcttgctaagcaggcttggagagtttggtcaaacccaaccttgcttccttcttgtttgttaaaagctaggtatttcaaacataatgattttcttagcgctcctaagaggcactgttcttctatcacttagaggagtctacttagaggaaaggagcttcttttgaaggggcttgtttagagagtgggaagtggtaattccatctctttagctaaatctcacgattccaggtttgaattctcatacttttttgcacgatgcttcctctcttaataacacagtctctttatttattaatgttgatggaattggaatctcagtaagcttcaacactatcttccatcttaccaggttgacggtgtccttaaaattcctatagatccattcagggacgattgccaatttgggggcatcatccatcaagaaacttcatagtcaattcagcttatcatttggctaactcttgctctgttttagattctctatcttcctccttgcctgactcttttaaaccttcgtggaagttggtgtggactatcaagatttctcctaagatcaaacactttgtttggaaggcttttaataatatttttgtcgtgtgcttttaatctgtttaggagaggaattatagatagccctaactgttccttttgcaggagcaaagaggagattgttactcatgctcttatagtctattccagagctaaaactgtgtggaataatactttttttcatcaattcaataacaaaaataaatattgtgatataaaagaatttcttcttaagagttttgatacttttaagagtaatttgctgtataaatacctaaatttaactcccagttacaaataaatacctaagtttaatttttggcggtaataataccaaagttataattctggaacttttgtaggtacctgactgttaattgttaagtaaattgtcacgtggcaattcctaattggtcaaagtcatttaatttttatttttaaaaaaaaaaattaattaaaatataccaatatgaaaatgacacgtggatattaatataatattttaacggttat

SEQ ID NO: 231599 - DNA, 567 bp, Cannabis indica
ttgtgtcaggctgcaaatgctgcttggaatatgggggagtgggatcaaatggctgaatatgtgtctcggttagatgatggtgatgaaactaaactaaggggattggcgaatactgctgccagtggtgatggaagcagcaacggtacattcttcagagctgttttgttatttcgaagagggaaggtatcatttactctagacttttatccttacttttgggaacattgatcttattgttggagggggaactttagtgttttctatctgtgttaatgatgcaaatctaatttcttttatctgttgttgttattgttattacttattgttattgttgtggggacttatggaccccacacctactcaaccactaagcaatgaacaatgtaaatgatgcaatattttatgtagaaaagggctactttttagtagttcccttattaaagacataactatttgtcagttaattatacattttgttatctcttttaaatttaactttctccccagtatgatgaagcacgcgaatacgtcgagagagctagaaaatgcctggcgacggaacttgct

SEQ ID NO: 231600 - DNA, 1007 bp, Cannabis indica
taacatttatttaatctctttgttggtccttgtattgtattacaatagagttgtaatatcttgattttcttccattgtaataaaatctctaacagataaggtatttgcggtgcgagtggtgcagttttcgactattttttcaaattaacctgcacatgtggtttttttaattttccaaactgcacccgcactgcaaaactaagtgcaaaaaccgcactgaaaaaaatggtacggtgcggtacgttttctgcagttatcaagagttagttggtagttaggagagtttgttttagttagttatgctgtccttgttttcagctaactgttttctcttttctgcaactactttcagttgcatttcttgtatttgagcttgagctatataaagctcactcagttgtattttcggattcaatcaatacaaactaattcattgtttttccttttctctagttctttgttctactgctatgttttgtaatatggtatcagagccactgatctagtgtggccctttttcttcttccttctttcatttccgatttgttcatggctcgtggtggagctcatggtggaactcgcactcgaagcacaaataatcaagaagatggagctgataactccaacatattctctgtcctggagcctggaaatcagttgcctcgagacaatcctcggagtccatacttcatttctggtggagatcaatccgtggttaacatagttcccaagatcttaacaggatgcgaaaattatagctagttgctcttactgctagaaacaagatcaagttcgtggatggtagattacctgaacctaaagaagatgatgatgattacacagttggtttaggtgcaacaacttagtcatttcttggattcttcatgccatttctggagaaatcgcagacagtgtcacatatttggacaatgctgccaagatttggtctgagctgcaagaaaggtattatcaaaagaatgctccgagggtgttcgaggctaagcgat

SEQ ID NO: 231601 - DNA, 932 bp, Cannabis indica
acaaggtagggagacaagtaagaccccgccaaagaaaattcttcaccttaggtggcaatttcaagttccaaaacttcctccaaaaacctgaattgtcttgagaattccacctaccattgcttacctataaggcgtgataagcttttttgacagaataatccccataagtctccaacattcaaaacaaagcatcctcaaccgaagaaagagacagcggaatacgacacatcaaatcaatatccctttgaacaaataaatcttgaagtacttcctcatccccctcaagggaacccacctttaataagttattgaccttacaatcgtggagagccacatgaatagagattacatacggatttttcttgcatggaagccatttttgattaagaactagtatagaaaaactagctccaacacgccatctcgcacccatcttaaccacagattttgcctctagaacactttgccaaactagcttggattagcacctagttcagcatcaaggaacgaggaatggggtaataccgagctttaaagacctgggccactaaagaactattattcatcaaaagcctctaaccttgcttacctaacatagctaaattaaaatccctgagatttcaaaaacccaaccccccttttttgttatgcagacaaagcttatcccaactcttccattgaataccttggccttgtgaagacctcgtatgtcaccaatatctacccataagccgatccacatctttgaaaatttccaaagggatcaagatcacactcatagcataagtcggtaaagattgaataactgatttcataagcacttccttaccctctctagacaggcgcttactttcccaattgtgaattctcttcctcgccttctcttttaaaaagtcgaaggtgacattattatttcttcccaccatactagg

SEQ ID NO: 231602 - DNA, 2290 bp, Cannabis indica
aagggacaggccttagcagactttgtggttaagtacacaggcaaaataagggacaacccggagccagtgcaagaacccctaccagaaaacaacgaagaccacctacctagaaattgcacgtggatgggttagccacagaccaactttctggtgcaagaattgcccttgtcacacctggggagcaacacctgcatggagcagtaaaatttagattcaaggcctccaacaatgaagcagaatatgaagccctcattactggactaaaacttactcaggaggtgcatgccgaatacattgaggtctatagtgattaacagttggtagtgaatcatgtttcaggagagtacgaggcccggggagagaaaataatggcctatctaagcaagatagaagacatgcttgcacaattcaaaggttacacctcaggaaaattccaagagaagaaaacacaactgctgatgctttagcctggcttgcgagcaccacagtaacagataaggccaacctagtcccaatccagtaacagataaggccaacctagtcccaatccaattcttagaagaacccactatcaattatgcggaagaaatcaaaatgataaacacgacaccaaactggatgacacccatagcagcctacctcaacactggagaacttccaaatgacagtttgaagctcaaaagatggtgaggaaagctgcacggtacatcatagtagaaggtgtgatgtatagaagaggtttctccatgccattacttagatgtgtaacaaaagaagaagttgaacaactcctgtctgaagtgcatgatggattctgtggcaactatgtaccaggataaagcatatcaaagaaaatactaaggcaaggatatttctggccgacaataatagaagattcaaaggcctacgtaaagaaatgtgacaaatgccagagatttttgaagatcccccgcgcaccgcccaacgagctaattcagatgcaaagtccttggcctttggctatttggggaatagatctgatcggaaaattgcccaagagcaagggcagagtacagtatgcagtggtcgcagttgattattttacaaagtggacggaagccaagcctttagcaatgatcacatctaaaaaatattgaactttgtggtgaaaaacataatatgtcggtttgggctcccgcacaagatcgtttcggacaatggcaaatagtttgacagccagatttcatggaatcataaaaagtttctccgcagtagcacaccctcagtcaaatggtcaggtcaaagcagtcaacaagacactcaaagacaccatgaaaaaacgacttgaagaaactaaagggaactggccggagtaactaccataagtattgtggtcacaccaaacaatagagaaaacaacaaccgggcaagcaccatttgcttggcctatgtttatgaagccatgttgcccgtggaattagagtctctgtcccacagaagattgacctacgatcaagaagctaatcgtgcccttttggcaggatcacttgacgagattgaagaaaaacgagcttcagcaaacttaaagctagtagcacaacagctaaaggtagctcggtacttcaacaagcaagtgagggcaagaaaattttttgtgggagatatggtcctcagaagagtattcttgaacacaaaagagaccatggttggtgtgctcgggcctaattgggaaggaccatatcaggtggtcgaagtcacagactctggagcatataaggcagggcgatatgacaaaaatatcaagttcgttctagtacaaaggtattggaatggggaacatttgaggaaatactaccagtaagtgtacaaggtctgatgaccactttaagtacacaatgctagaagatttactcttaagtagatggccttctgggcggatcccgctaaaaggtttagataaaatgactagtactcaggtcagatgaccatctttaaagtacagtttttaaagtgcaattgttttatgtttaaattagctaaagatcagttagatcatataatagctttcataattcaataaatgtaagttactatggtaacaaaattgttctgaccaataaatgaataaagatattaattatcattctaattgtgtcaattaattttatagcaagttatgaatttaccatcaaaatgtgtacaaagggtctgctcgaactcacaagccgaacagacaaaaattaaactaataaaatacaagtgaccaagagtcataagtctgctcaatcacttgggggcaactatacccgta

SEQ ID NO: 231603 - DNA, 2067 bp, Cannabis indica
tgttttctgttttctagttttttaaaactcaatttttaaaaaacagtttttaaaattttttcccaaacaactcctaatagtttttaaaaattgttttcagttttaaaaaagagaaaacagtttttaaactataaagtcaaacagtctctcagtaattaatgtttgctctgcttgttttctcagttcacttttaatgttgttatgttatctatatttggaaaagatgaaatcttgtactgagaagatttgaaaatgtgttattacatacttgaaaagggttacaattcaatgcccataaatccatgaaagtaagaaaagagcttgctcagatcttggctcaaattctctcaaccagaagacagaataaggaagaagaacacaatgaccttttggggtctttcatggggaagaaagaagggcttatggatgaacagatcgctgataacattattggagttatatttgcagttagggatgttaacactattaactaactggtgttaattgtctgttagctttggttagttaagagtgtttagttagttaggtagttataaatctgttaattctgttattaactttcttgctctgttttcttttgtaatcagtgtataaatacttgtactcattttccattaataaagtgagctttcattttcaatttcttctcctttctctgctttccttctctacatggtattagaagtcttgactcaagactatgtcttcgtcagtctccgatcctccggcctctgccatggcacctgccactcaaactccaccggtctctaccactgctactggatcttggaatccgttctcaaactctttgtcctcttccctcacgatcaagcttgatcgtgtcaacttcctttcttggaagtcccaggtcgttcctactgttattggacatgatctcgatgagatcttgttcaccggcattcctcctccacagactcttcttaatggcacctcgaattcagagtaccttcaatggagacgcaaggatccttctcctttcttggttacgctcctccatgtcagactccattcttgcttccgttgcaaattacgctcctcctctctgtgtggcgtgcgttgaacaaaagttcacttctcagtccaaggctcgaaggctccatctcaaaaggcagttctcccatgtccataaaggcaacctatccatctctgaattcattgacaaagtgcgtgccattgttgattctctcgcgattgctggttccccagttgatgatcaagatgttgttctgtaaattcttaatgacctcggtcttgaattcgattctgtagtctcgggtattacttcaagaagtgataccttaaccttggaggaggttcaggcattacttttgtctcatgaaagccgtattgagcatcatttggccatgaattacatctcagtcaaaatgcaagcgaacatggctcttggtcatggcagatccacaggtgttcgatcttttgccccacccaaccagcagtctgcatcaaatggtcgtggccgaggtttctacaaattccctaaccaaagagtggtttgtcaagtttgcatgaagacaggacatactgctgctgtttgccactaccgatttgacaaaaattggtctactcccaaaccaggtaacaccaccaatcgtgcttttctcactgaaattgattgtgattatgatcctcaggcctattcaacaaccatgattcaagattttggtgaggacaattcatggtatgtcgactctggagccaccacacatgtcacatttactcccactaccctcgatgacataaagcccttctcgggcaatgacactcttgctattggtgatggtaagaagttatttatttcccatgttggatctgtttctattccatcttattcctcatcttgtcccctacatatgcagtctgtgttaactgtcccttcaatgactaaaaacctagtgagtgtgtcaaaactcactcaagataatgatatctttgttgaatttcacaaaaactggtgttttgtcaaggacaagacaacaggagctgtgctgctcaaagggaaagcta

SEQ ID NO: 231604 - DNA, 601 bp, Cannabis indica
gcttctccggacaacgcttctgccactgatgttcagactgaaactccagcttctgctactccgcattctcacccatcaccatggaatcccttctcaaattccctcactgcttctctcacccttaagcttgaccgcaccaactttcttgcctggaaatctcaggttgtgccaaccgtaatcggccatgaactggacgatatcctgtttgccggtgttccccctccccagaatcttgtttcgggtgccccaaatccagcgcatcagcaatggaaacgccgggatcaacttctcctctcttggcttcgtgcctccatgacagaaggggttcttggatccgttgctcaattcaccagttcttattccgtttggcgcgcattagaacagcgattctctagtcaatccagggcacgattgctgcaactcaaaggtcagttctctaacgttcgaaagggttctttatccatgtctgactattttgacaaagtgcagtccattactgattcccttggagttgctggttcatctcttgatgaacaagatattatcttgcaaattctcaatggcttgggacctgattacgattcggttgtatctggaatca

SEQ ID NO: 231605 - DNA, 1554 bp, Cannabis indica
gtaccttaatccatagatactgacgatcttaatccatcttgtagagatgatctttgttgtgatttagggtaatgatcttccgagaatacaagacttaagttctctagttttctctcttgatgggggaagatgagaatagagtggcttttgtttcttgaggatcactaccaatatatgacctcataggaaggttataattttaagtatttctaattaacccctcaataaattagaaatatctcttaaggtatctacacatttagcccatgacactttaatatacaatgacacacaaatactaaatgatcagtttattttaggtcaaacttcaactagcaatacactaatatacatatgagcccatattgaggattttaatccaacaatctttcacttgggctacatatatttttttgattgtacactgtgtaaccttataagcgcttaacttttgctatcataattatataggtatttcaaaacaatctcgtccagtgattatactgacataggatatcaaagcagctttcgcaacatttcgcgtggataaatccatcaatgatcacatatatcaatcgtggatgcgtagcatagaaactacatacaaatgtgatgatcttagcatgcttatctccaactggtcctcattaattgagataaattctttataatttctaactttatacttaaatctcaatagaaagaatacgttcagagtactcaaaacttaagttcatactttatttacagaattaaagcataaatatgtgtcagcttgatagaacattctaaatacaaactctcaataaatcaacacaatcttaaataataccacatccatatatgagcaacaagtttctgaaaagtcttaagtggtgtatatccttaatgatccagatctgaaaacccaatcacaataactagaaccagtttaaagcacagtaatccaatttagaattttgcatgaaaaaacctaatctcacaacttgaaattcaaagagaaaaaagaagaacaagcttaccttgagctttgatcctccaaattctcttaatttcctagccaaaaccccttgaaattgctaagaaaatcttgaatccccttagcccttagtgtagccgaacctaggagagaggggcttggaatttctattttttttttcactaagtgtgaattaaaggatatcaaatcctattattcaacataatactacatagcaaaaaaaggattaccacaaaaatccacaagcccataaaagacaaaattagggtagaattactaatttaccctccttcttcaccatgaagcaagcttaagatttaagggtaaaatgatctaaaatcataacctctgaataacttgacattctaaatatctagctatattactccgctatttttaaggtatcagaccatatctaagtgactatatagattgtacgtcacattctattgttactggacataaaatatgaaaatcataaaattacacatatatcatatttaatacatctagaatttaaatatatctccgtaattacaaaaaataataattaa

SEQ ID NO: 231606 - DNA, 1001 bp, Cannabis indica
aacttactctctctctctctctctctctctctctctctctctctctctctctgaccctccagtccttgtcgtcctctctcttttctcatagacgacgatccatgagctccaccactcgtctcttgtctctcgttatctctttcttgctttatctttcacgagctccaccatagatgaaagctcgttcaagctccaccatgatcgaccatgaccatgagctccaccaccgtcactcgtctctctctcttgtctgaagatagacgcgcaaccacgagccaccataggcaccgaccagtctctctctcttgtccactctttctcataacttctttattattatttttattttgagatttatgtaattttgagatttttgtttttaacaaatcgtcggagatctcagggttgtagttttggcagaactgtgacccgaatctcgactctttggggctcttaaggctaaacgaaactcccatcttggtctcgaggaggatgaagacgatgaattttttttgggtaaagccattacaatgattaacgacgatttaaaattgtcagctatagtacatgtcactgtttaaaactgtcagctataatatagtcgacggttttaagccatgacctatagtattgactatagctgatggttttcaactgctgggaattattttccctgacatttttctaccatcgcgtattccatccagtatttgcaacgctcgcataggtgacagttttatagaccgtcgagaagtttttacccgatcgtgtaaaaccatcaagaattttgagttttttagtagtgtataataaccctcaaaatataactttaacagtaatgtagtccttccatcacattttattcaattttattgtgaaataagtgaaattgtggatggtagttgataaattaatgcaaattaaatacgcttcaccctttttacgttagtgaataataagattaaatactttttttctataataatttatatttttagttt

SEQ ID NO: 231607 - DNA, 625 bp, Cannabis indica
tgatgataaggttggtgttgatacctctgctattggtgagaaacaaggtgatgttgttgtcgtgactgaaggtgataagtctaatgatgttgataatgtcaagggcaaagaaattgatttaaagggagatgatttttttttaaaaggcttaagctagcttgagattaatgaatataaagttattttggctggtttggaggctattggaaaaatcaaggtatgttgctttttttgtatttttaattttttgagattgtgttttagagtagttaattgatagttgtaatagagttttattctagtttttaaactgtcagtttgattacttattatttttcttttcagcaagttccaacttctattcctaattttgaagtggaaaaattagttcccaatatttccgcagaagaagaggatgattctcttgcttgtactccttttcttaacaagagaaagcgtgccccaacattaaaatccccctttgttgattttggttcgtctgatttgaacacctctccaatagaatttatgacttcaggttctcaatcaacagaagatgagcgagatttcaagattatcacatatgtcaagggcctttatgctcttgatgatgctttttctggtc

SEQ ID NO: 231608 - DNA, 734 bp, Cannabis indica
aaagaagaatcaatagaatatctgtttataaaagattatttatcaattaatataggagtagagatacacagtgttgtaaatacatatgtgtcgagtgacttgattcatatttttatgtaatttttaagatatggaccatgttgaccataaaagatatatgttgtgtcatattcggtcgggaaatttgcggcaaaagttctctaaaagttcacgttgatccagattagtccccaacttttataaatagcggtagtagtatctaagctggactttcgtgtttgtccgttcatatcctatccgttagtatgactaacgatacacgtgtacgcctatgatttaatctcgtttcattttgttttatttatttcttttcaaaaatgaaaataaaatatttttcaaattaacaatttaaaaacaataaaatttttaactaaaaaggtaaaatggtaaaatactgaaataagaaaaccccatcaccccaaatcccaaatccctaatcgaaacccaaatacttcgacaattgatctagaactaggtcacaatgatccaaccccagaaatagattgaactgtttatcaccttgttgaatcgtgacctaaattggagcttgaagtcgactgctggtgaggtacccagaaattgaaaggatgtctctgtaaatcgagagagatcttcaaagattcattcgtggaaggttaggatggacggggagggttcttacagtagctccagtc

SEQ ID NO: 231609 - DNA, 1075 bp, Cannabis indica
tatatataatcctgttgttaggtttgatgacatgacggtctctataagatttcttataatttttttgctcttcttataattttcttgctctttcattttttctaattttttttagactttggttaatttctttctatttaatatcaatcaatttatatgtattaatataaaaaaactgataagaataataacatatataaaaacatttcttttcttacattaatatcatttttaaacttataattgtaagttaatccatctatatttattaatataaaaaactgataagtgtaataacatatataatatatttcttctcattatttaaacatataagtgtaggttatagaaaccaactaccaataatctatatctatttattttatattattgttaaataacggatataagagtaataacatacatatataaatacatttttttcttacaattagtatcatttaaacctattattgtaggttattgaaaccaactaataaataaataaattattttgtaactgctggtagtttaggatgtatatgtgactcttcctaatatttatgtaacctttcctctcccctctctataaatttactatatgtacgtattaattgtgtgcaatttagaagttagacttaataattttataattataatatcaatcattctttctacatatatcttaataaaattgtacaaacacaatggaggctctctttcaaggtgaagatgttaatttccaaaactaaatgttgtaccatccttcttagttttggataaagtttgtgatcatattgcaaaggtacataattttttttttctatgctttgttctaatatttatgtaaatgagctaaaattgtttttgactcattattgagaatgtttatatatatagggggctaatataataggtattgtaatttttacctatcaatagggatagtaatttgtagcctttgatttaatcaaatggctcaaattaacccttgaaaactaaactatcattaatatattttttttattcataattaattttgaatattattcattacaagttcaactaacaaact

SEQ ID NO: 231610 - DNA, 4386 bp, Cannabis indica
agagaactggtccagatctgagagtaaaactctcgtggtgaggattatttgagcaaggagaagtacatgcacaagaagaacacaaagttagattcagattacaaagaacagaaagatagaaaacaataaacttgtaaaagcaacaaaatcgagtcttacctgatcgattttgtgacaggaagctccaaaatcattgtattgcatcattgtcgatagtggatatcaagctaatctctgagacgagcttgacagagacgtagccctaatttttgggtgaactctgaaacaaatctggtgttttctctccctcactcttgtttttcattttactaaatctaaatctatgtgtgtgtgggtttgattctgggtttctggcttggaatcgagcaagttctcaaagagaacttgctctgctagggtttcgagtttgggaggctgtgtgtgagttgtgtctgagtgtttagggttctagactcttctactgagtctttgaaccaaaggttcaatacgacatcaagtttggtgtcgtgggggtaaaacggtgccgtttagtctaagggattacttagactaggaaaggtcatttttgaccttgatactgatattgttatcttttgttggtgtagggtataagagtaaaatcctacagtatcaaagtataaacataaaggagttaaaccttttttatttgaatatttaatttttacaaataaaactatatttagaaatataattagtatgtgatgttttaatcaagagaaacaatgggaaggaaacagaacctaaatcaaagcatgcaacccattaaatttagggaaaaacaagtcacatggctcttcattcacaaatgaagagcaatactatgtaatatttactactccctagccctaatctaaaaggtccataaccaatgatcatgtcatctttaatcaataggaaggaaatagagcacaaatccaagcaagcaacccataaaaatttgacttttacatactcaggagattgctttaaattaaattatatacattaaaaagtagggtacttaattatgtgttttgtaaaaattatcaattgaattctctgttttgttaaacgataaaatagacatgtattttttaaaattgtacaaataggactcttatactgactttttgtcaaaatataacttaataataataatccgatatagagatattatgacaaaattagttacattttctgtatttgttcgtgtatagaaattgccttaaagctagttatattaaaaaataaattgttaaaaattgtgttcagtgtcctatttttaccattctagaaaatataaagtctattttatcatttaacaaagaatctaattaataacttttgcaaaatacaaaatccaaaataatatttactttaaaaagtacttgggttacattattagcaatagcttcatgtgctccatgctatattaattggagtgtttcaccttcatatgcaactatagcactatcattatttatttgtgtgtgtgtgtgtaaaagatagtcttaattagttttcattttactcacctcagactgagagaacagtgatcatgaattttctctcaaattctgcaatttcttggtcatacacactgtttatacttctgaagttgtccattgatattggagcaactcaaacacaatgcaaggaatcaagatgtggaaatggccccgcgattcgattcccgttcagactcaaagatgctcaaccgaatcactgcggctaccccggctttgagctatcatgcatgggaaaacatacagttctaaagctaccaaaatcagtaaacttgtttgtgaaaaacatagattacaaatctcagttgatagaattatatgaccccaatgattgcctttttctaaagcttttaaagatcaatggctcatcagtttctcccttaagtttcatcaaagatgaactttgtgactatacactgtttaactgttctgtttcagaagatttagattccattgtcattccttgcttcactagccctcatggttaccaagttattgctctttattcttcatcctccattgaatatgtgcccttggcattttgtaaaaaaatgtataatgtaatttctgttccttatattcttctcagctcttttagtgagcaaaagtatatttatatgaattgggttaagcccaattgtgctctttgtgaagttgtaaaaggatacggatgtcgattcaaggacaatggtagccaaaatgaaactgagtgttatcaatatccacaaccaagtaagtcccatgaccatgacttctttttcttatggttaaaatatggattaattgtggatcttataatttcttaatttcaaaaattttattaaacttcaatctattaaatatgacatatgtgaaaatttattatttttgtgatatttgttcggtaactatgcaaatgggacgatttggtcattagagtcacatgggtagaatgggatggtcacgagtgatatttggaatatcgggattaagtaggattatcgtatcaaacaattttactcctaagcattaaaattaatttttgagtgaagtaaggggcaaaatggtaatttttcttaaaggaattaaaattgttttttaatggattttgtagagttttctactatactatcctgtactttttacttggtggggtaattctatgtccaagtccaagcaatgtctcgttttgattaatttctttataacgacaatatctgaattatattgttgcaggccaaaccaagaaattcgtggcaattggtgagaattttttgttttgtttttatagaacattattgttatgttagactatatctagatcaaaaattgaacatgttaaatgtttttcattttgtgtgcaggtgcaacatttggtacaattgttcttactctgctacttgtatcggcttatcgcgcttacaactctaatgagcaagaaaaacataatcaacaaagattagagagatttttggaggactacctagctctaaagccaagcagatattcttatgctgatattaagcatattacaagtcaattcaatgaaaaattaggtgaaggtgcctatggagtagtctacaaaggaaaactctcggcaaaattctttgttgctgtgaaaatccttaacaatttgaaaggaaatggagaagagtttgtaaatgaagttggcaccattggtcgaattcaccatatcaatgtggttcgtttggttggttattgtgctgacgggtttagaagagctcttgtttatgaattcttaccaaatggttcacttcaacaatatatttcttcaccagattctgatcatttcttaggttgggagaaacttatggatattactttaggcatagccaaaggtattgaatatcttcatcaagggtgtgatcaaagaatccttcatttcgatatcaaacctcataatgttttgttagaccacaactttattcctaagatttctgattttggtttggctaagttgtgttcaagggatcaaagtatggtgtcaatgtctaccgctagagggactctagggtacattgctcccgaagttttttctagaaacttcgggaatgtgtcatacaagtcagatgtttatagcttcggaataatgttgcttgaaatggttggtgggaagaagattaccgacgtgaaagaggacaacactagtcaagtttattatccggaatggatctataataatctcgtagaagaaaaagaagatgatggtaagattgccaagagaatggcaattgtgggattatggtgcattcaatggcaccctaaagatcgtccttgtatgaaagttgtggttcaaatgcttgaaggagtagaaaagttaagtatgcctcctaatccttttggctctacaggccaagcaataacaattgctgatttgcctagaagaagaggaaacaatgttgagctagaaactatagctgagttagagtgagtataagctatataagttttacttgtaaggaacctttttagagttatttcataaattttagacagagtttgcaccttggtaaagttggttaaaaatttctttgttcagtcccttaaaaaaaaattaaataatttctttgttcatgcacatgtatcttatatctttttatataattgatcaaataaggttgattatgattcaaaacttataattttagaaaagttaattgaaatataaaatttgaaaatatgtatttattgtagagaaaaatgaaaaactgcaagcctagcaaaataatttttttttttacttggtttggtatagttataaaacacactaattaggaggcgtttggttgggaggaatgaaaatataggaataagaatgggaatgggaataggaatggaa

SEQ ID NO: 231611 - DNA, 1155 bp, Cannabis indica
tcctccaccaacaacccaaagtatgaagtcatgtgaactgaactgttaagagcttgaactacaatcaacgaatcagtctcgacgatcacatcctcccaccctttcctcttgatccaacttaaaacttccttcatacccataatttcagcaatttcaagaagcaccacaccaaacttagactccgcaaaagcttcaaagagttgacccgcatgattacgccccaaacaaccaaaaccaaacaattgttggggttcaaaaacagcttcgtcgacatttaccttgatcgtaccactcattggtttggtccaaacgttgctgccagaaagaacaccagtagcaaaagaggctgctgtgttcaaattctcaactcgccattgattaagaacctgtctagccgactgaactactctcgaagcattgctggtttttttctgccagaaaacttcgttgcgtgtcttccaaattctccaagaaatcatagccgcatccgccaccacctcagcacgattgctgtcccaaaaggccgaagaaccaactgctgaaatcttccacaccagcagcaatggttaccgccgaaaggttccagcaggcttgggcaaaccgacacccaagcaacacatgaaaaatcgtctcatagtagatattgcataaaggacaaacaagatcgacattcacatgtttagtactaagttgcaccttcgttggaagcgaaccagagcaagctcgccacaaaaaatggagaactttagaagggacatcaatcttccaaagctttatccagtagctttcatcatccaaatgtagccaattgcttgttgaagcttggagatgtttgtaagcacttttaacggtgtagaagccggaggtctccaacttccaatgccaagaatccgtgagtgacgagtcactcaaaggaatactcaaaatcagatgtacatcgcgctcttcaaacatgtcttcaacaacctcttcgtcccaccccctttctcccatcaacattagattcgataccaatttatcctcaagtccttggttcacagtaataacatacggattactgtcatggcgcagccaaggatcgtttaaaatactcactaaagatccatctccaattgatcttctagcacctagtcgaacaagggattgagcttccca

SEQ ID NO: 231612 - DNA, 739 bp, Cannabis indica
ttgtggtaccggtggaacgttttctctataaatgtgaatgtaagatgataactgtaaaattattcgtcataacattttatgtttttgaaaactaaaaaatgagagttttatataaaaatataagtgataaaatttctactttaaatgaaaagaaaagttatgattcatttgactaattatttctataatgaaatgtgtatttgtcttaatgttttgtggtaattaagatgataagtattgtataaagttggttgagcgctcatgtgataagtactgtataaagttggttgagcgttcgtgtgatcgttataatcattgaaaaataaaatttaatttatgattatttggttattttacaaattcatatattaagtagttgttaatatttttattaaataagtaaaatattataaattatgtgtttgttattttctttttatttctaaatcaaaatagaataattttttattattttataaatcatataataaatgtttcttatttttttttttcaaattcttatacataaaaatgaaaaactacgtatattgaatacaacaattacttggataccacactttagaattcaaatcaagaattattttaatgtaacttatttctgatacaagtattacatatgtaatttactataaaaatgtacattaaactaaaagtacaatagttatatttcataaatatgataatttatcgaattcaacactttgaaattcaacttcaa

SEQ ID NO: 231613 - DNA, 1057 bp, Cannabis indica
ctcagacaaagattctcaagccagtccaaagctatttattgcaaagcaaatctcaatttttgactatataaaagggtaatcttttaatatcaatttactatgacaaagtcaaattacttattgattcattatccactattggcatgggcggctcttatggagtgcaagctgggctattgcacaaggtcccaaaaaataaagagccaaaaagaaatggaccctttataaaatgataaaatggactttctgttattaattggactctatgttttgttaaatgataaaaatagaccctgtatttttcaaaatagtacaaatatgatcctgaactgattttttgtcaaaataaaatttaataataatccgatctaaaagtgttatgacaaaattgtttacattttttgtatctgttcgtgttataaattgtcttcaagttggttatattaaaaaaaaagttatcaaaaattaagttaagggtcctatttttactattttaaaaaatacatggtctattttatcatttaacaaaatagaaggtcaaatcgataacttttgcaaaacaaatactctaaaatagtatttactatttttagtagaatatttacccattcttaaaaagaataaataaaaaataaataaaatttgatataatttatcaccaaacaaaatacagctaattttcataaaaaataaataaacaaaataaactgtcttcataaattttagggttgcaaacaaaattaaaatgaatataattttgtattgtaaattttggtgtatatgaagtcgaccttccggcccagacttcaaacacgctctaatcagaaacataatggacctcaaatcttacggaatgagagcgaaaagaggcgggcaaaacagaaacacatcaaatgttttattgtgtaactgtttttcttatgtgtaataaaatttaggctaattagtaattttgcccccgaactttgacatgtgctaaatcgtgccccctgaacttttgtggccgttagaaattccccccgaactattgagattgttaaatttaaggacttttgtc

SEQ ID NO: 231614 - DNA, 1417 bp, Cannabis indica
gataacaataaaggtgcatacaattctgtcaagtacaacgagaacttagagttggaacttgtacccaaacactgaaatagggaacatctcgataagtactctcaccagccaacttgtcaattagttcctctaacatttcaccgttcaggaacccgtaaatgagctagtacccattgctttttagcatggcctcccctcactctccagtgatggccgttgcgcgctaagccgcgtaggggtagccactacgtgatttcaaaagtagacactaagttgtaagcttttgttacacgtaagaccaactatatctaaaccacttgctaaaaagattaacctcttaaagttattcttttagttccacatgcgtacaacaggccaaaccctaagaaaagtcccatgcaaggtctgtgaaattttgtgaatagcaagggaccaagagacctgagtctgtatggtcacttgggggcacccacactgtacaatgcatcgaactgctataaagaacttatgcagagaaatttcaatgcttagaatgagctacaaaacctgcctctaagtcgtatacacatactttggcttgacaaagtaaatccaaatccttacatgtcaagattataagaagatagccaggacaataatatgttcgttgtagaaggctttaaggctaaataatcgtagtgtttgaaaatagagggcctataggccaaagcaagaacatgaaagccttgaggccgaatataaaattaattcagatgcatgaggttaaggccctacatgaaccgtatagctagaaaagaaccagacagagctcctacaggggccacgtactgggctacagctaaggcagagttccttacaggttccaagccatgatgagtcttaatttgaacattcaactataatagactcaccagtaagtttcatatagactttccaagggaaccacgtatgagactaaggtagtatatgcctatagagccagttcttgccaaagtcaaaagaggatagaaaactggctatccacttggaactaaggcccatgccgtccaaggttctcaagctttgaaagggtcagccagggtcccatgactcagtcaagaactggctaggctcaccaaacccaagcatgaacaggctagctttatagggtaaaaccctagagctggccaactcccataattaagccctagggccggccaggtctcaagcaagacctcctacgccgaccaaggtaagttttgaatctcaatgtgtgttcttctttcaaaactcgaatatgtgcctcgtattctttatgacccaaagacaagaatcacaacaaaggacaaagttaaatcttttccatcaaaaagtcacacattatacatttcaaaaaagtcaggaggatcaatatactaaagagattacaaactaacat

SEQ ID NO: 231615 - DNA, 827 bp, Cannabis indica
atatatatatatacacatataatgtaacttctgtgcattcataatttaatatcaaaaaaggcaattagtcaaaaaataacaaattacaaattcgtttatattaaatttatattatatatatttacagaatatgattagttctaacctgtgaactttgttgttggtcacgactgggaaagaagagggttgatgttgttgctcgcatagggcttttattgttcgcaaaggactactgcatgcggctcacaaaaaaaatccttgtagcatcagctctaacctttgaggagaggagagaagaggagggaggaggatgctccaccaatgtgcgactcagagagagagcgagaatcgtgaacgattgggcagcgagttgagtttgaaaggaagagagggtatgggaggtcaacaatggagaataagagaagggagtagaggtcaagaatggagagggagagagaggagcagaggtcgacgaaggaggatcgacaatctcgccaatcgctagagatttttcttcttccaaatgttgaagacaaatgtgaacaatagtaggatagatattttgggaatttagggattaagaagtggttcgcgtcggtttgtaactttcacaattttcttttctgtcagttattaaagctcacatagcttttatttgactacaatgaacatacgggaatatgatttccatttttttttatttttgttgctttctttcgtcggttgtacttgtagcgtctttttagtaaacgacgcaaatcattatgctttaacgtcattttataattgacactcatattttttggatactattcacgtcggtcacg

SEQ ID NO: 231616 - DNA, 667 bp, Cannabis indica
cgcctaagatagttagggtgttacaggttttctgcaatggtattgaataccacatggcctgagtaaattcggctagaagacatcagagtagttcaagaatttttagatgtatttcttgatgatcttctgggtttatcgtcgtagtgaaaaatagattttgttatcgatttagcacctggagcagaactagtttctaaggtagcttatagaatgaatttggcacaacttaaagagttaaagattcagcttcagggttgcttgacctagggtttttacgacctagtgtgtcaccttggggagctcccgtgtcatttgttaagaagaaagatgaatccctatgcatgtgcattgactaccaagaattaaataaattgatatcaagaataagtatcctttaccaatgatcgatgacctgttcgatcacgtttaggggaaggcagtcttttctaagattgatctctaattgggctatcatcaattgagaatccaagacgaggacattttaaagactacttttcgcactaggtatgggcaatatgagtttttctttatgtcttttggacaaaccaacgctccatcaatttttatggatttgatgaatagggtattcaaggatttctttgatatatgtgttatagtatatatcgacgacatccttgtgtactct

SEQ ID NO: 231617 - DNA, 1860 bp, Cannabis indica
ctggacccaaacccaaactcggatacaagactggagtcgcgacccaaactcgaaccccgaccaaaacttgaacccaaactcgaactcaaaatcgctattggaacgagaatcggactaggactaagaccaggaccaggaccaagaccgagacccgaacccaaacccaaataataacccagaccgagacccaaacctgaaccacgactaggacccaaacccgaacctcgaccgggacccaaacccaaaccagatctggcctagaactagaccatatccaagccccgaaactaaagctcagacccagtcccgaacccggtcccggaccaagactgggagtgaggctcgaacccaaacccaaacctgaactcgggactcgatttttgatccaaaccaagcccttgagcgagactgggatttgcaactggacattgacacgaacctagacccaaaaatgaataccgacccaaacccaaaccaggatcaaaacacaagacctggactcggacctagacatagacccaaacctataatcagactcaaagctagacctgcacccagaccgaaactcgaaccaaaccggtatcgaaacacacgacttagacccagaacaaaacctggactcatatcgagatcagaacttgggactcggaccttgacctagacctagacccaggactgaaacccacactcggagcatgatccaaacatagactaaaatctagactagaacccaaactcaaggaaggacttgaatccccacccgaactcgaaacctaactcaaactcagaatcacaactggaactagaactgtaataggactaggaccaggacaaggacctaaacccgaacccgaaccaagattaaaacccagaccaagacccaaacttgaactgagactaggactcaaacttgaacctagagcgggacccaaacctagaccacaatcaagacttgcacctagaatcgagatagggacctaggcaacggaactatgatcaagacctagtacccgacgcaagaccaagacttgaacgtaggacctagctcgtgaccgagcacccaaaatggaaccagatcgggacccaagattgggatctggatcttgacccgaggcatggatcgatcccgtagttagtgtcaggatctaggacccagccccgaaccgaaacccagaccaggacccgaacccagacgtagacctgaacccagtcccagacccaaacctagacttgaacccgtaccctatgacccaaaattagaacaaaaactggaagtagaccgagacctgggaacgggaccaaaacaaggacttagacttggaactgtaaccgtacttggacgtagacctagaaccgtaaccagactaggacctagactccaaaccaaacctagactcgaaccaggacccagacccgaatcccaactaagacttggactgaggacccgaactcatacccaaatatggaacctgactcaaaacactgaactagggctgggacctagaactgtacccctgtctcggtcccgaatctaaactcagacctgggacccaggacctgaacatgaaccagactgggacccgtgataaagatctagatcttgacttgagatataggaaaccgagcttgtaacagacccgtagtcagtgtctagatttgggactcagactaggacccgaagtcggaccaggactcaaacccaaatccagacctagacccaggaactgaaactagaacttgaacaagaaccgctggactaggacattagaacaagataaggactgtgaccaggacccagaccgagacgtataattgaacgtgaacctagccctagactcaaattgagaccagaactcgggc

SEQ ID NO: 231618 - DNA, 1085 bp, Cannabis indica
aaaggagtgaaggaatgaatgaatgaataaggtagttggaataggtatgaatatgagttttattattgtagcggccgtgggaatcggtgtcgtgcccgacccgactttggtagtgtgacgtactaaactgcaacgtttttggaacttaaaaatgtcagctttgttgggatctgtattgggagagtttcatcatcacatatgtatgtaatgtatgtatgtatgtatacatgttcatgctaagaatgcccatgctactccaccactcgccttttctgccgtctggatctcaaaccttgatcttgtttccattccaagtcatatttatcgataagaattatatacagaggtgtcgtatagaaatagaaatggaatatactaacttaagtcaaataataaattttattcaacaaattagtattcttaatacaaaaaaatgtaagagttcaccagaaataaaaatatcagaaatactacgatcagattaataccgagaatatctagcaacataatgtgatactcggtttgctgatcgtctaataaaaaataaattaacatttgagaaggtagataacaaagattgacagtctttgattaaaaggctgaaagtggacttcattgcttggttgcttcgaataacttgtactgaaacaagactgtccgtttcgatctgaacatattgccaattattggtctttacccaactgagagcttctttaatccccatggcttcaatgacttcattaggaaattttttattattagtatatcgttttaggatgttgattattattaatttagctgttaaactctcttaattattgttttacttgtacttaattttttaagtttaaattttgatggtaaaatcttccaatctctattataaaatgtaaggtgttataatgttaattgccactatgaattgcttatgtgtatattcttgtacacgtgacaagtttctaatggtagacctaatattttttaataagccattttaaaattaaataaaattataaaaaaataaaaataatataaaatttttgtaatttttaaatgtgtaccaatataaacatgttacgtgtaca

SEQ ID NO: 231619 - DNA, 988 bp, Cannabis indica
tgctaacgggtaaaagaattgagcactatcgcgagttttccatatacttgctattttagtatacaaaaattaagtgcttgagcttgcctcttttaagagtatataagcacaatttgtcaaataattttgcaaaaatgagcacactcagggctcgccaatttgcaaatagaaatacactagcgaatttaataatgcaaaaatgagcactatattaggctcgcccatttgcaatatgtataaacacaataataaatttattaagtaattatgcgagaatgagcacacatcgggctcgccaatttcgcaattacaaaaaattttagtctcgatgtataatagccttatcaattattttcagatccacataaatatatgcataaaaaagaaataagataagtgcacctgggagtgatcaacatacgcgagaaggctttgagtcgtcgtactcatcacattccactgggcccacatacatatacttgaaaagacaataagcgaggctttttatactgtgttgatgcttatattacagggattgggccaatcatatttaatgacattggattattctaaggataaactcaaagtataattgggcctgaaattctcagtattaaggcccaacaaactttaatagggttaccgtaccttatcataactcttgtatacacagcagtgtcggcacagaacgaaaggtggtgttttggccttttggtacctctttctccatccgttgagctacctcctttatgaatttgatgtattgatttcatcaagccgttttagcatttggttacgatgcgtgatgaaatttattgagtcgtttctgatggagatgtcgcttgggttcaccgattagattctctaccagcaatgagaacgacaatgtaaagcccgcttagttaatttggaaattagcagttgttatgtttaattatgaaattatattcagaaatgcatgattatgtcatcagtagtttttatattt

SEQ ID NO: 231620 - DNA, 1138 bp, Cannabis indica
ggcagacttcttaatagaaggaagaactccagaagaaattctgcctattcatagagacacggacacttggaagttatacatggatggtgcatccaacaagcagggctcgggtgcaggggtaatactaatttcaccggaagtctttaagtttcattatgctttgagatttcaatttgacgcatcaaacaacgaggctgaatatgaagccttaattgctggcttaaagatagccgaggcgttgaaagtcaaaaatctcatctgccatagtgaccacagctcattgtaaaccaggttctcggggagtaccaggccaagggcctgaaaatggctaagtatttagagaaggttcggaagaacttggaaagatttgattactttaaaatcgagcaaattccaagagaacaaaactctaatttggatgaattattccagtagagatgttatgtgagccaagtatatgtgaaaaggaagacgtagagatgatagacaactgacctacatggatgactcctataatcaactatctactcgacgggcaacttccaactgagaaaaacgaggtgcgaaaactcttgtattcagtgcctcgatacacaataattgatggtaaactatactgaagaggttacttaatgcctctacttcggtatgttctttctacaaaaagcaaacgagatcattggagaaattcatgaaggcttttgtggggatcatgcaggttggcagtgttggaatatgttttaccaggatctagatttactaacaagtatgtttcattaacatcctaatatgaatttctaaaacaatgaaattaaacacatataaagtttcagaaaaccttacattgggtgcagcggaataatatgtctccttccactcagatctctaacccttgtatcctgtctgtcgcagagtatcaccaagatctgagcccgaatgtccttctcttcagtttggattcttcacaatcttccagactatgattgagataccacttgatgtgtgtgggcactcactctatcactcaaggtttcgaaaattgaagaagaaaagagggagagagaggttcggctatagaaggatagaagatggctcaatttttctgaaggcaaaattcatctctttctctctctctctc

SEQ ID NO: 231621 - DNA, 1413 bp, Cannabis indica
tccattttgttggggtgtgtatgatgctgtgagttgccatgtgattgcatgaatctcacaaaattttgaaaatttatgtgagttgtattctccaccacagctagtgcaaagaactttgatggggatgtcaacttctttctcaacgagcactttaaaacttttaaaggctccaatagcttcagatttttcctgcaaaaaataaacactatgtcttctgactaaaatcatcaatgaaggtagttatatatttttttttacctccattagaagatggattgattggcccacacaagtctgaataaatcaactccaatagtttgtttgccctccatgattgtccatgtggaaatagattatgttgttgtttgctaataacacattcttcccacacttcggcaagagcatgtgattgaaggaaaaccaatcaccattttcttctattgcaaagttttcagtccaccaaaattcaagggaccttagagaaaatgtcatggccatgatgcatctttcaatttttatgataggcacgaatgagtggtattgtggagataaagtgggaatatttaattcgtcatcatgttaacttgagcaattaggcctaaatttgcatcttcaatttgtctattcaaattagcacgacattcatatttataatgtctgtacttatgagatatgtagcattccaaattaaacttgtttgttgactttggtctattggattggtggcctccttgtcctcgcccttgttctcatccatgtgagtcatgggaataattatcttagttttggtattgttgctgagttccacgatcattttcaactctgcttctgccttgactctgcttccacctcatcctctgtctcctcttggctttgaattattgtatgttgaggcttttgagggttgctcttccttttccttctcccactggttgagtttgtgctcatgaactaacaaagaacctttcaattcatcaacgaaaagttcattaatattatgagcttcttctatacaacacacaacataattaaattttggcatcattgttcgtagtattttcttaacaacggttatgttctccgtcatgttaccgtggattcacatttgttcacagtcgccattgtccaagtgagatagtatgacattgattcttccatcttaaattagtcgaagtgttttgaactccatatgaagtgattgaaattgctgcatctttgcctttgtagaaccttgatatttcctctttatagaatctcaaatatgcttggaagtgtccttacaaagaatggtctctaagattgtgcgatctgtaaaaagttagttagttacctattgtacacgtgtcaaattagtaggctctagttcggtatgttaggtaagttagttgataactaactcctagtctattccta

SEQ ID NO: 231622 - DNA, 1054 bp, Cannabis indica
ataattttcataaataatcataattaactgataatttctaaattaactaagcgggctttacaggtaatggacacgagcaacgtaatcttggctttcttcattagctgtgactgggaccttctctcacgaagagtacttcgggactttgtaatcacaagtatactcgtccgagcaagaacattgaccgttctcagattggcctcattcaaaagaaagctgctaatcgcaatctgaatggaagacccagtaggattttgtgacgctcgaccatcttgggggtggggattggtcttctggagaccgctgtcaacacaataagtgtaataagtcagcgaactcaaagtcataaatataaaaagaactcaaaaccatgtttttgagacaaaaattacttatgtataatgcagaatgcagttgtgttgataggacaaagaccggttgtccagaagaaatcctccttgaactcggtcttatttcgtaacctcacgatgatcatgtggtcatttgtgtgggtaccgaggtaatagaagtcccttgaacatcgcatccttacaagaatggctttgatggagtagatataaactatctcgaggggagtgggacactcccagcctaaaatatggtacaaaacttataggcctgccagaattctgtaagaatttggaatcgattggaagggagaaattccaagataattacagaactctttgtagtactctctcaaggggataactgctccagccttgatgtgctcgaggctctaaaagcctatccctgacgagccgctagtaccagcaccatcatattcctcgctgataaccctttctggagggaagcaactgaattctcctagagccacagatctaatacggcatcctcgcctttgcttgatgccacgagactttaaaacaccaccaacatattctccaatagcccttactttagactcaatgagatcggcttcaaaagtaacattagggtcctgtggggtctttgatttacgagggtataatttcaaaatcaaggtcacgtgatgaaaaagcaacaatgactc

SEQ ID NO: 231623 - DNA, 872 bp, Cannabis indica
tccccaaatgccgaatcaggatagtacctcaccttgtttccaattctttcttcctttgctagaacatcattaaaatcgcccattatacaccattcctcttgaacactgatctcacaaatatgcttccaaagtattctcctatcatcccgattattggaagcatacaccaccgttaagtaactagaaaacaccccatctattgttgctatttttaaatgcataaattgacttgagcatctaagaatatcaacaataaatctcaaagggttccaagcaattactatcttacctcccgagtgccacgcaatattcgatgaaaagcaccaaccttcgaaaacattagagtacaagatcccaagctttggggccttgactcttgtctcgaggagcccaacaaaatcagctctttgaacattaataaattgtttgattaagtgttgtttctgctgattattagctcctcggacattccaacatatcaacttatccattgatgaaagagggttctcccccctcttccatattgtccatatgagttgattcaacttcctctaaactctgctctgtatccaaggcctgaaaagtgttgctgaccatagtttcagccctcttttcctttactttttcactctttttggaccccactaccttggtaaaaccctcctcatccacttgaatattcttcctattatcagccttgacaatccactctgttttcccaactgtacgctttctgcagtcatctgctatatgccccagccccgaacaatgagtgcaaatggaaggtttccattcgtacttcacgcctatagatgaattccacccatgttcatcttcaaattccagcatctcggggagcttttgattcatac

SEQ ID NO: 231624 - DNA, 938 bp, Cannabis indica
acactcacctattcctacttcctgaacaatacacttccacatttctaacatggtatcagagcaaaacaaacaaaaaaaactcgactatccgacccaaccaaaaaaaaaaaacgatcgaagtagagccaaaaaaagagccaccgaaaattcaaaaataaatgatccaagagccaaagtcaaaaaaaccacttgtgattcgggaatagtgagctaaaaaaggagccacctatccaaaaatatggatccaaaaaatcaaaaaatacagatccaaaaagtagagcaaaagagtcacttgtgattagggaaagtgagccaaaaaaaaactgcttatgatcgagttgtccaagatggtgagcagataaaataactaccatgttgagggggatgttagagagtctcacatttataatgtgtagaaagataatagaatatataagatgattgagttacttctcctattgcaattgattttgagatgaaacctcattcatcttaagttattttaagattttgtaaaattttaagaatttcgaaatagaataatttacagtataaatacttaaatttaactactacttgtaaataaattataaatacttaaatttattttttgttggttataatacttgaattatatttgtggaatttcgtacgcatgtggccattaaatgttcattatttacgtgttgttttcttattagtatatttaaattaatttttttaaaaaaaataaaaatttaataatctatattaaatgtgaaagtcactgcaaaagttctatttgcaacttaaaaaaaaaaagtttgactagaaaatcaatttttaaggggtagaatattatgtataacaaaagtttgttaattttgcctctcttttaattagcattattttttttttttttttttttgtacgtggtgaacagagtcacacatgattaa

SEQ ID NO: 231625 - DNA, 655 bp, Cannabis indica
tcttgtggaagaagaagacgatgcgtactcggattcgtccacaacaatggcatccaagggtttcattagcaacgagacgaatgaggctgtggtaattggtaccgtcgcagctgatgaggcattgaaagatcggtggaaccactgtgaagcttccgattccggtaccggagaattgaggaaaatatcgaagagcggtacccaagcctccatgatcgatagtttcagggtagtttagttttcccaatttggagggaaaagaaaaagagaataacgataaaccgcgggaaagtcaataaacgattttaaactttaaaccaaacagggtgttaaatttcgaggtttagtttatccatgtttccaaacagatgtctatccttcctttggttttcttccgattaaagttgattcttccaagaatcacgtcggtggagatagtggcaaatggtttcaaatttgatatttccaagcaccaataagagcggtgaaacgtgggaactttgtctttgtcacgtggcaacggcaagtatatctcgaaggctactactactactctggggaagctcgtaccgtacgcaccggccttattgcttaggtggctttacgaacaagttctattggtgcgtagtactactcgcgttgattgcgcttaagttta

SEQ ID NO: 231626 - DNA, 1935 bp, Cannabis indica
aagtagggagaaataccaaactataacctgagacaaatgtgagtaggcttaaggggggttgaaaaacgaatcggagacgaatcgctgccgaaacctctgtcacacgcgccttcacgcgtcgatgcgtggggtaggtggcagaagaaacgagcggcgcgtaagccacacgtgtgaggaatctgatgaccagactttggggtttggcagatcggccgctagcaatccttttgagtgggtggtaacaaaagatccctctaaatatggtttccgaaaaaaaaccctaattgaaaaacccaaattcggaataaatcctaattttgaattttgaattcccaatcctacagtcagctctgataccatgtaaaatatggtgattaaattgtgtattatattccatagaatagtatatatttatatataaagttagaagactaaagaagaaactattaaatacaatttattctaatttttacaaatatacaggtaatattctaacaagttttttattgaactgtttattttgtaatttgcattttcaattcataacaaatgaggtatatcatttttttttcatgtcaaggggtgcacaattcaaaaccttggtattcaaatcaggatatatgaaatgaatgaaaaaacatctttagatttttatgaaatgggagccccttatgtttatcgtgagttgctatttgtgagttcatttattaactttgcatggcatcagtttactagaaggggttataagaggcattttatgctcttgtgtatttgctatgattctttagtttgagaatgagaaaataaatgtttcaggtgaacaagattgtacggggtcagtttgatttattccagtcaatgtacaagccatttcttgaagaatacgaggctaaagagattcttagatcctcttatttttcggatcacaaatcaaacatatctcaggttggttttgatctttaaagtcatcacggtctactttattgttcagtaccatgtcgtaaatatctattttttttttttgaaagaaatgtcgtaaatatctacttgcagtggagaactttatttatatatatacatatataatagggtaatttttctgatatattattcttttatttttctcatcttgcattggaatggtttttcatttattttcaaaatggaatagtcattttaccaaaatgatagaaaagtcattctattggaatgacattccaatactataaaatgcaaccaaactaaagaatggaataaaaattatttcctttctattctattccatttcatttcattacctccaaccaaataccacttaagtgttcggtataagaattttacttggtgggttttagttgaggcatcgagattaaaaggatctcaaaactcaagtattttaagatttttagattatcccaaaattaatttaaatacgagacccttacaaacataaattctcaactaaactcataccaaacataggcttggttttcatttccattcccaagaacctaaacctgagaatagtagtctttaaagctatcttacaactttacaagaatcattctaagatagggagcttcctaaattagttttctaccaatagtccctaaagctttcttgaaatatcttccattgccagcttgccactcaaaaatcaaattgctttttgaacaattcttttgtgaagatttctactacttgttttccataggaacataaatcataccaaccagtccatcttttatcttctccttgataaaatgcttatccacttcttccacatgtttcttacagtcatgaagaagtcgtttgtgagcaatcgagatggtagccttgttatcacaatacaatttcataggcgatgatgtgatgccttcagttcttcatatattcttcttattcacaaaaattcacatataccacgagtcacga

SEQ ID NO: 231627 - DNA, 838 bp, Cannabis indica
aacgagagcaacctagttcgcgattcaaccctaaattttcaatcggtacccacttttgtgaaagaggttggggtcacacaaaatctcacataaacaccacaaatgcacactgttgaccgagattttcagcaaacaaaaatctaacgtaataatgtgagcttaggaataattaatgcaggtagtttttacgtggttcgggcattaatgagttgtagtccacgagtctctgttattaatgagtgggtgtttcttacagagaatatttttgtgtctttctttcgatccccctaccaattttagtgaggggtatatatagcgatttgtgggaaggagaaaaggggtaacttgtcttcaagtgccaactatgggcatgcacaagttcccaaaaagtacaaaataaggcatgcactatctacgtagtagactgcttaggttttaggtgagattagccttcatccctccttaattgatgtgattcttcataatagagtcgtcactagctcccttgattatcgtgtaatcgcccaaagctgggtttatgacgtctgacacgtcctcttatgggtatttccagacgtttttcccatgccgcattaaatgcgaagtgactgttcacctccagctttactggcccgggagagtttattcatccttcacctcccgaagaagaagtggagctatttgctcatgtctgggagcttgcccttgaatcataattattagttctgaggagatttaattaagtcttttgttcatctccgggtgataggcctctacctcccacgggtcccacattgcagctaccacatatattgggagaaatttgggtcaacacaca

SEQ ID NO: 231628 - DNA, 920 bp, Cannabis indica
aagaaaaacgaaaaaaatacgagctgtacggacagtatgctgtgcatactgcccgcgcgcgcaggtggggttgcactgccgagaaaactcggcgcaggggagaagttgcagcatttccgcgcgatcaagtcccattcattgggaaggaaggacttgaaatgacaccaacaagctgcaccaaactccccagcgtacttcgagctagtacacccagctttggtaggtagagtctcaagtgcttggctcgaagagtcagcaacctgatttgccgtgggaatgggctcttcagtatgtgtggggttcggaggatgggtctgagcctgagtctcagtcttagggacctcgagatcaacaacctaggaggctcgcttcttattggcaattgtcttcttgggccttttaagaggctccactttgacatctgatgaagtctctgaggcagttaaccttttctttcccatctttcctaaagattgaaagaggtcctcgagattcatttctgtgagacaaaacaatatgttaacatttgtttgaaaataagtaaaaggggaagttgggacataatttcttgcctaagggatttaccataatcataagaagacgaggtaaaaggactacaatattcactaaagtctctacatcctgtgatcctaaatattcataggggttaattggttctaaatcccagcttgcatctatatgacctgtcctatccaacatggtcccatactgctcggttatcccataatacgagtcaatacaactaatttggacatagaattttgggtaccaactatcaaacctatgtgcaatgcgatctatgaggagggaattctaggtgtataaattataacagctatctcgaaaagacagtaaagtagtatgctcggccctaagcactatgggtgaccaaccacatt

SEQ ID NO: 231629 - DNA, 1312 bp, Cannabis indica
gagttctttcgtgatgggctgaaaaacagatgcaccttgtttatataggtattaccaagcaatacatttaagccctcttaactatgtagtcccatacctgcacagttttagaatcatcacacatgaccttccccaagcgatgtgggattgtacagctcccgatcttttcccttcagatcacaggactctgaatgtcacaatcacccccctttggggatccgacatcctcgtcgaccacacttctgactgggttaagattctgataccatttgtaacgtccccgcttcaaccctctattaatattgggtccttacacccataaaatgatggctcttatacacgagtacgttactttggttgcttcatagaatgacgactgaccctacaaaccaacacgggtgtttccagcttgctttgtcctcaccactcgcacacttcttcaaaaaaacttcctaggaggtcactcatccttaaattactccaagtcaagcacgcttaaccgtggaattcttttgtaatgggctaccaaaacacaagatgcaccttgtttatataggtagtaccaatcaatccgtttaagtcatcttcaactatgtagtcccatacctacacaatctcagaatcatcacacatgaccttccccaggcgcatgcaatgtgggattgtacagctcccagtctttctccttcggatcacgggactctgactgtcacacaacttaagtccaagacccagatcaatagttggtaatagaatccaattgattctgttacaactaacttcagctcaacctactctcgttcttacccttttaaatagactctaaacttgatcaacttagagttgagacattgtattgtacaatgagatttatagagagaacttgaatcattgagagagaaatctgtaatgggagcttgagtaagatcgatcatttctaatctatgtgtaacctcgttcttgataatgaattcgactcaaggcattaccttggccttggagtagaaccagctacattgactcggatctaaaccaagtaaatttggttatgttcttatctattttaacttttcttgtatttatttattttgatcaccaagtatttgcactgtgttctgtttttagttttgtctattttagattggcttgctattgctttatgtgtattgcaggttgtgaatttgaacaaatttatatcagagttgggatacctgatgcatcaaagttgctttcattggtttcgagatcaagatctaagactcgaggaattatgaagttcattcataattaagaacttgtttactggccagga

SEQ ID NO: 231630 - DNA, 1383 bp, Cannabis indica
tcatcatgatcgacgttcccttagccttcaacgtcatgatagcccgaccgaccctcaatgacctaaaggcggtaacatccatgtaccacttatgcctcaaatttcaaaccatcgtgtgacatgtgtgatgggagaccaataaactgcccatcactattacaaatttgtcctgtccaaggccaagaaagagaaaatgtctgccaaatgcccaaaagactcgctcaaaaaagggcaataaagtccagcctgaagcagggacacaaacatagatcctcgcattggggatcccgcaagaagctttagacttgtagaagagttggaaaaagtggaggttgatcccacttttccaataagaagactgaagattaggaaaggtttaacgctagatactaaattattactgataagatttctgagggctaacctagacctttttcacggtgacatggagatatggtcagtattgacccctccatgatgatccatgcactgaacatcgatccaagcattcaacctgttcaataaaagaggcgattactggacaagaagcacgctcaagctctcaaagatgaggtcaagaggctatgagcccatgacttcactaacctgaaaaaaccaagtttaaaggatagcttttcactccccagaattgaccagcttgtagatgcaacagctcaccacaaaatcttgagtttcatggacgcgtattgagtatataatcaaataaagatgcatccaccagatgaagagcacactagcttcatgatagatctagacctgtactggtacaaagtcatgcccttcgggttaaaatatgtaggggccacatatgaaaggctggtgaatatgatgttcaaagatctcatcggccataacatggatatgtttgtggatgacatgcttgtgaagtccaaaaaggctaaggggaacgtggaggaactaaatgaatgcttcaataaattttgtagctataagattaagctcatccccctcaaatgctctttcagtgtaggctcgggaaaattcctttgcttgatagtcaatgccaagggaatagaagaaaacccaaacaagatccaagcccttttggacatgaaggccaccacatctgccaaggaagtacaaagcctaataggacgtattgctgcattaagaaaatttgtgtccaagtctacaaacaaatgtgtacccttcaacattctcagacgcaacaaaaaatttgagtggagagaggaatgtgaaaacgcattcaaagagctgaagaaataattggctcaacaatttctgttgtctaaacccctagacaatgaagagctaggtgtgtacctagcagtcacagagcatgctgtgagtgctatcctcaaaggagaagaagacggtgta

SEQ ID NO: 231631 - DNA, 2095 bp, Cannabis indica
cacatccaaggtgacgtgtcttcttctgaagcctatcaatatcgtcattttgctctaacaaacaactatattttccacaaatagttctagctaaatcaacaataagatcatgcatgacaaaaaacgtgcctctcaaggtctctgttttaatgaaaagtgacatagatacttaatcatcaaaatactcacatccaacttcttccattctcgaattgctctgggaatactgcacaagattttcggccatccatattaacaccaactccagtctttgaaattcatagcctttagggaatattgaacaataagcaaaacaccttttcaagtgtggaggaagataataatagatcacttctaaagcagcaggaagaaccttgctccttttatctgagagctcccaaatattattcttagctatttgttcccatctctcaatatccaacgtcgatctcaagaggccttcaagaactttggcagctaaaggcaagccgttacatttcttagatatttctctgccaatactttctaattttgggtttgtgataaacattctatgatttccacaagatgcatcctctgcaaatagtttccaacactcagtcttctcataattctctgagatggtgtgtgctaacggttcgaataatatctgcaactttttattttgctgccttcgacaccaccattgaaaggcttcctcacttctacccactgaacataatcatcttcccaaaaatcgtctaaaacaatcaaaaacttctttcttgttaacttctttgtcaaattaacctgaagcaaattcaaatccatgtcacttgaagcttcacctggagcaacttgttgaagaatgctttttgtcacagccatggcatcaaatttatcagacacatacacccatgccttaagttcaaacatctttgtcactccttcattgttgaaaagggtttgagcaagggtggtttttccgaccccgcccattcccaatattggaatgacacatatctttgaactacctacatcatcggacatcaacaacttcatcaaacatcttcatcattctttctaccataaagttcaggttcatctggcagagaagtcttcacacgtaacctttccgatggtttcacctcaccaacattcttttcaagattgaagtttccaatttgattggctaagtactccaacctcttaagaatctcttccatattggcatttcttacacgatcagctgaattagaaggtttggagaaacaagagagtaacttactaatagcctttcgtttttctttcttcgactcatcagctttgtcgggtttcatagcattgtattgaatatcgccaaagaagtcctcagcatcatcgacaacatccagaagatcgtccagccacttctcctcagcggggtttttgattctcttgttctccacttcaaagcaaaccgcagcaagagaattgaacgttgacttcctcttgaaaagcctctgagaaacaacagatgcactttcatttttggccttaaagaagaattcctcaacataaggagaagcaatcttttcaaggacaaagtcaaaagaagagaaaagcaccaatcacaagctcagccattggtaacaagctcagtacttagtagaggaagaagagagtgagagcaaaacagtaaggaaatgataatggtatcagattagcacatgctctcacttcttcttttgatttcaattaataaattaatcactaatggggtttaatttaacagatcagcacatgcatgctgttacttcttttgagaatatttgtacaacttttatttaattttataaatattaattaattatcttcttgatataagttatacaatctgtattcatttgtcactagtccccacccgaaaagaataaaagatcatcactcatggcagaggaaacccgtggttacaaaactagcggcaaaaagcgaagcactgacaacatcctaccgcatataagagacaaagaaaacaaagccgctacaaaagggatttccactcctgacataaatctaaaaaggacaaatcctcaaaatatttagttttaaacacccaagtagctgtccaaaactt

SEQ ID NO: 231632 - DNA, 745 bp, Cannabis indica
gaaatgacttaggtaggccttaatcgtctcgcccggttgttgctttatgttagtaagtgaagaagcttctggacgcttgtctcttgctgcctgaaatgtttcttgaagtattttgacagctattcccaagaggtgattgagtgacgggtgaatttgttgaactagttgctcgctgccccagttagcgaggtggggaataaaatacagcataagttattcgtaacattggaggctcgcatgatggtattaaagttatttaggtgagtgactggatccgtagtcccattgtatgacgagacgtgatggtttttaaatccctaggggaattcaacgctcataatgtctggatggaaaggctcaggttcttcgtctgtattgtaaccaggcagttttccatattccccatctttgtatcttctaaatttctcctctaactcaatgattcacaattgcataggatcctctttcttttgattgagttgttgacgtaagtcagtcttcttctcgttcaattgctcacaaagtttcggccgttgtgggtaatagttacttacagacctcgttcttgagtagctttcagttctagttgtgccagtactctctcgatcattacttcgatgatttcaatcccctcctcgcatagaccgactatgatctcgagatcttgtatctttcgagctagaacttgcctcatcacgtacaggccttctccatttagaacaggttgatacatgtcccttgctgg

SEQ ID NO: 231633 - DNA, 1084 bp, Cannabis indica
taactttaaataagttcaagcattgcttgaacttgatcaatctcagaagctagtatactaagattccgggaacaccaaccaataatggatgcattctttcttcttcatcgtcattcttttaatttgaagtaattaggtgaagtttgtggtataattcctccaaatgaaaatgcctccaatatcattcctgaaaagtcatccctagaaagttaggtgtctctcggaccttgctcctagacatctaatttgtccatccccaaaggagtcttgtagaatgatagttgagtccagatgggagttttcagatgactatcatgtccactccgggtccagttttcaagatagcgccctcgcctagaaagaagttccagctggctagttacccatcttggaatggtagatccagatagtcaactccagtgggccatatcttatccggaagcgtcttctgcgagtgtccttagtccgcgagttcgggaactcatatatgttcccagaggctctattacttaagctgatgaggagactccactcaaagaggagttggttaagttagttatttctaactaacttaacaacctcatttcttgcagccaactttaagaacttgatcctaagcctataaataccacttaactttgtcatttgaaaaatggaagggattcagaactcagagagatgagaggtagatagagaggtgtagagaaaagagagagattgaagttgggttttataagaagaatcttttatagatgaagaagattcttgggtgttagtgtgagaattgaaatactttgtgagaactcaacagaaaatctcatctcgattgtattgtacctattcttactcaatcaataaagaaagattacggtggtgtttaagaactggagtaaagccatatatcacatcgatctatcaaacttgaaccggtatatatcttggtgttgatctatttattttctgcatttattgttttctaatttagtactctattagcccatattttactatcgactgttgttcttggtttgataattttgtaattactaattgtttgatcatttaaagtttaattgttttgatt

SEQ ID NO: 231634 - DNA, 2451 bp, Cannabis indica
cgtgtgagtattttgtaaaaattaccccaaattctaatatatttgtaagtttccctttatattacacttatagatcttatatagaggcgaccctcaatacaactagcccaagaaaacttataataaaattggaaaaaggagaaaattaaaaaatctaagtttttatatttttgtgcaaaagataattttttttagaagagttacttcatgagaataattaaagaaaaagttaaaaattatgagaaaaaataagtaagggtaactagagaaattgtaagagtgtagagacactcgactggtgcagagcaccaagaaccaaagaaaacagagtgaaattgaattgagagtaaaaatgcagtagttacttgcatcctctcatgaacaaagcctttatttacaggtgctagaaagttgttacagtataactgaaataacagaaaaaaacagctaaccaacataacagaaatactactgtacactaactacaatgactgttaacatcccccctcaaacaaaaggggtagaagccatttgaagtttggatttaagataggtaaacctatcagtagacaaagactttgttaaagcatcagcaacttgatcatgtgctggaacataatgaactcgaagctgcttgtcaagaatctgatcacgcacgaaatgaaggtcaagttctatgtgtttcgatcttgcatgaaacaccgggtttgcagcaagtgcagtagcactttgattgtcgacccagatgacaggagagtgagattgagagaactgtaattcacttaacagatttccaatccactttaattctgcagcagcattagctaaggccctaaattcactttcggtgcttgatctagccaccacttgctgtttcttaacagaccaagagaccaaattcccacttaagaacacaacatatccccccgtacttctcctatcatcaatgcaactcgcccaatcggcatctgaatagcattgaatggaaaatcagagacaggtttgagtagaagtccctcacttatggtgccctttaagtaacgaagcagtttcttacatgcctcccaatgcaaactggttggagctttaagaaactggcttagtttgttcacaatgaatgcaatatcgggccttgtgaaactgagatattgtagtgcacctatagtgcttcgatacactgatggatcagctaatggttctccttctttgatgctaagtttaacagtagagctgctaggattacaacacggtttggctccttccatttggagtttaaccaataaatctgtaatatatttggactgtgacaaatacattccagattggtttctcacaatttcaaccccaagaaaataatgaacttcaccgagatctttgagagagaacaccatgttcaaatctttgataagtttggaaatcagatgttgatttgggcctgtcaccaatatgtcatcgacatagacaagtaacataatttgagtatccccagatccataaacaaacaatgaactatcagcccttgaagcttgaaaaccccactgaagcaagctttgtttcagtttgtcattccaggctcgaggtgcctgttttaaaccataaatcgccttgtgcaataaacacacatgatctggaaattctgcatcttcaaaaccttgtggttgttccatatataccacctcattcaatgtgccattcaaaaaggcattgctaacatcaagttgtgttacattccatttgttggttactgccaaggacaacacaacacgaactgtcactggtttcacaacaggtgaaaacgtttcctcatagtcaatccctggaagctgtagatatcccctcgcaactagtctagatttgcaccgatctaaagatccatctgcatttagtttaactcgaaaaatccatttattggtaatagcttgcatgtcatcagttcttggaactaagatccaagttttggcctttttgagagctttattttcagtgtccatagaagcataccaccttggatctttaagagctgcttttactgactttggttcagaaggcagtaaagattcaggtaaagggtgttttgtggctagataagctttcggttttcttattccattttgagatcgggtaaccatttggtgagatctaggttgagtgtttagtgtgggacaattttggacagtgtttgtaggttcggtagcagtggtgggaactgaattgggtggtaaagttgctggtatagacctgagttggggaagaactggttgttcaggttgaggcaaagatggagagtgaataacagcttgttggtcgtttggtggtgttggttcagcctcagcagtcacaggtgcaggagcagtggacacagaatgagaagcaatattgtgatcagtagtaaaaaaagttgcagatggaaattgtgaaactggaacagagtcacatacctgatctgatatg

SEQ ID NO: 231635 - DNA, 1227 bp, Cannabis indica
taaataaataaataaattaatttgagatttaaaaataattttgtgtttttgaagacgaatattgttattcgacactaatatctttatatataaaaagtgttatctaaagataattgttagtttaacgatttttttttttaacgattcctttttttatttagccttatacgattaacttaacagattgttaacgttaagcgttaacaaataaataaactcaataattaaacccaaaaattaaacaatcttttttttaaattaaaaaaaatcatcttacctacatatctctctaacaaataatttttttacatgcttcattcaaatttcaaaaaataaactcaataattaaacctaaaaaattaaacaatctttgcgattaattaaacccaaaaaattaaacaatctttttttaaattaaaaaaaatcatcttatccacatatctctctaacaaatcgtaaatccccaatttttgaatttttttacacgattaggcttcattcaaatttcaaaaaataaacccaataatttatttgaagaggaagaaactgataattgtgcaacgatttctaacccattcatcacccaaacaggcaaacacaacaaaagcctatctctctctcaatttcaccctcaaaacccttaaacccctatattatatgttcgggttagaaatctcgcttattctcttgaaagggttgcttcaactcattctaaatcacactgttttctgatttttggtaaacaatatagatgcaaaaagagacaaatattcgcattatttattactatttctcttatctattttcattctacttatataaagccatgagtaaaggtacaatcttcattatttttagcttatatttaatttcaagtgttgatataagtgtggccggacctgcctggtattgaactgaggaaggaaagtgaagtagcctgtggtgtttatggtgactggtgggcttgaattgtgggagggtcatcattgtgcaaatgggcttttggagaaacctcgttaagttctagaaagtttctttaatatgttatatgtgatcaaatttatggaatttattattttttccttacatcattttcttttccgaattttaagcttttatatgtcacagatatctactgtttccatgatatgatagaaatgctcataaaatttaggtataagaagaaaccatattattttttttatagggctatgatttcaaacaaag

SEQ ID NO: 231636 - DNA, 671 bp, Cannabis indica
ttcatcagatagcaaggaattttcagaggagacataacaaacgaccttaacttacattattcagaagcagaatgccatttctttaagctgtggagtggagaaagctggtaacaattgtcatcagcatcatccagagaaccacaatcaacattgatttacttgtttcctttctttcatttcatgtattcccaattcttttattgcaaccaatattttgaattgatatgaaaattactaacacacaaaaataggataatgttctgaatgaatacagcctttttttattattattatttaattaattaatttatgtatcaactgaagcagctaatgagtaatgatcagatgtcccattattttattttatttctttctaaatgaagtagcaaattgaccaaagttttaagttgttcctcagttttcttgctattgctcagtgtcaatatatctttcatttcaaggattttgctttgttttgataatattgtttgtaaaatttagttttattggtttgagcttttattgttatgtaatgttttgtggagtttttgagatttttccaatttcaaaaaaagataagaatgaatatcacagaagagaccaaacaaattaaagcaaacatcattcagagaagacacaacccaatatcattaagcagtgaagagagtcat

SEQ ID NO: 231637 - DNA, 1080 bp, Cannabis indica
ataacaattataaatggacagtaaataattacaaagttaaaacatattgtaatgaattgaataagatatgaagaagaaaataactactgcattaatccataaaagaggtttaacagaatgacataacatctctaaaagagatttagccaataacaagcatcttaaacatctgaagattaaattaaaaaaataaaagatgaagaggatgagaaagaacactaattggagtcctccaatgtccctcccctacccccaataccccaatgtccaaaaaaaaatcataaaaatctagtctccactcatttttaggtcgaatcaggagagttgccaaaaatagccaagagtcgtgacctttgatagagagtcgtgactcttgaatttttaaaaagacgaggtttttttaatttttctaaagctcaagacttccaagggaaggtcacagcttttgctcaattttaaaaaactgttgtaattctgaaatcctactgcgatgattgatagtgttttgatcataaatctctcgatatagttcggaattggacgattcaagatgttttaaaaagctaaaagagagatctagaacttttcattcagaatgtttttcctggaaaacgaatcatagtaaaaaattagcctgaagcttcagactttattttcgatcacaaacgaagctgttgagcatcaaaaacttgaatttttcactcattgtatcttacaattccaaacttcatggtaaatccataacattcatcttatttagaatgttttctcttatttcaacctatattatgtatcttatcattaaaacttgaaacaagaataaaataagcgtaaacttgaatataaaacataacatactaaaaatacatactaaaaatagaatctaaaaatgtataaaatttaaactaacaacatgtcagccactatagtttctagcctttggttcttccaacggaggtcatttatctcctcttcatagttgtgagtttagaagtttgagctcatcaaggtcttatggtacaaatggtggagggtgtcgcactggagatggccttcttagtggttgaatgcttccattga

SEQ ID NO: 231638 - DNA, 894 bp, Cannabis indica
tacaatgtatgttgtattatctaatacataacaaatggtatgtatttagcttgtaatataatatttacaaaggattcgtggtcaaccctaaatctctgacccggacctaaactcgaactcgaacccaaagtcgggactcggacccagacgccagactcggacccgagacacaaatcgggaccaagacccagacccaggacacgggacccaaacttggacttggaactcagatgcagacccagacccagacccgggacccaaacctggacctagacccggggcccgaacccagacccagacctaaacttggacccagacccaaacccgaacccagactaggacccagacccaaacttagactttggacccaaacccgaactcgggactcggactcggactcgagatcggacttggactcagagccagagatggacccgaaccctgcattcagagccggacctagacctaggatcgggagccagactgcggaccgaaacccggatacgagacctagacccaaagcggaccgggacccagacccagacccaggacccatgacttggacccgagacccacgattaagacccggtacctcaacctggacctagacctggagcgagactggtacccagacccggacccgaacccgaacctgacccgtagttgttgttggggtcgagtgtattgataatatattataatttatacaatctattaatataagtcaatatcaaatatagtagtgtattaaataatattaatacaatacaatccaatacaatacagtacaatacaataaaataaaataaaacgtcccaaaccatgaaatgtattggatttagatgactagattcgaagcaatttttttgagattaaaaaaattcattgtttgta

SEQ ID NO: 231639 - DNA, 811 bp, Cannabis indica
acatgggaagttcaacaataacagccctaaccgcaatagcaccctcaggagaaaactttgaagttcacatgctgcactattcttaccgagagtccagcagccattctcatggcaacacagtctcttgtcccatacagggaaccccctccaataaaaaaagaaattaataagagagatccatcagtgtagattgtgatgctactgttagtgccacctcaaaaggtggaccaagaacatctggctcaagaccaccatctaggccgccaacaaaagccggtgcaacacacatggttctgtgccactaggtgagccacgcgtggacttcaaagagtaacacatggaacatgatgagcaacctgctcaacctcaaggctgagcatctgaaggagtccgttgttaacttgcaactgaatttgtaagagtcactagacaagtagcaagaggagctttaacactggttcaaggagtaatggattagcattgatccttagcaagctatctagaggtagaggagagccaatctggctcaatcgatatgtgatgcatttcaggctaatagtaagatggtactagggagagtgccatccactaaaggaagggtgtcacatctgccaactggctatgtaggcaccaacacttcaggtggaaccctaaacgcatggaatgctacagctactagtcccggtagcactaccactggtcttggagtagatggtactaatgtccctaaaagggaagcgaacccttttgagagattgaaaggcctcaaactaaaagtgagcgacccatactagagagcattacatctaag

SEQ ID NO: 231640 - DNA, 1067 bp, Cannabis indica
gttcacccctctgccagagttgtctctcatattatgaatgcttgtaacatacctcatagtaataaaatgcctactgatttttgtgaagcatgctgcaaaggaaaaattcatcgatttccctttcccaaatctgaaaccgtgtacaccagacccttacaactgctccatacagacttatggggaccctctccatacctgtcatcgagtggttacaagtactacatccactttgtggatgatttctctagatacacctgggtcttcctcctaaaagctaagtcagaagctcttcctactttcataaatttcaaaactcagattgaataagaattgaattgtccaattcttgcccttcagtctgactatgggggtgaatttcaaagttttgaatcttatctagatgagcatggcattagccataaactctcttgccccaccacacaccagcaaaatggtgtggccgagagaaagcacatacatttagttgagtctgccctcactcttcttgcccaagcttcaatgcccctctcctattgggatgaagctgtgagggcatctgcctatgtcatcaataggcttcctactcccattctgcagaatcagactcctcttgaagtcttattctctagaaaacctgactactctttccttagagtctttgggtgtgcttgttatcccaacacaagaccatacaatagaaacaaacttgagtttaggtctgtcaagtgtacttttcttggttacagccttaaacacaagggatacaagtgtttagccagttcgggtaggatttacatctctagggatgtcatattcgatgaatattctttcccatttgctcaagcatcaatctcatcctctagttctaatatctcacccaatcccatgccctctgtacctattcccagacctcctcacaatgaccatacccctgatgtaccatcttctcagcaccacactcctttcccatcaccacaaataccaactcccattcctcttccaaccatgtccccaacccctgatcatatatccactgaccaccacactcaccaaccatcacctaaccc

SEQ ID NO: 231641 - DNA, 863 bp, Cannabis indica
ttcgcaaattcatttccagttttagaagagatacatctcgcaagtataactacatcagattggtcttttatcagtacaaatgatgaaaaggttgatattttcccttgtttgaagaaatttgatttatatcgttgtgggaagctcaaggtggcactacctgggtaattttccatctttggaagagatcgatattaggggttgtgatgaattggtgactgtatttccatccagtactgatattgatgttgcatatccctcccttagaagtttgaaaatacattattgttcaaggttggagtcagtttcagaaatgggattactgcccgtttccttggaaaggctacatattcaatcatgcaatacgctgatagaaagtcgtatgcaatggaatttgcagagactctcaaagttgactgaattaacacttgtcaattatagaggagtggtggtggatgattcatttcctgaggaagggctgctcccatctagtttgacatttcttgagatcaagaacttttataagcttacagctctaaacgccaatggttttcaccacctcacctcacttcaagagttgagtctttggcagttggaaaagttagagtgcttgccaataggacttccccagagtcttactactttgtcgatagcatattgtcctctgttaaagccaaggtgcaagagagaaacaggagaagattggcccaacattcaacacatacctaacatatacatagatgaggtaagttttcaaattgaaagtacaaattattttgcaagatgttggaatcttctttttcatattatgaatctcttttgattcaccagctaaattttctttgtcagccctacgaattgtactt

SEQ ID NO: 231642 - DNA, 1317 bp, Cannabis indica
tatcaaccatgaaagtccttagcgtgcaatgaaaatactaagtgtaaaagtcagatcggctcgagaacaagtaagcgagaataccatctcgctatgggaagacttcctataccttcatccaaataacgggagcgaggcttacaaccctagcaagtcagaagaattctttgtaaataatcgctatcgatacaagccatacattgtcgacctcggaaggaagaatggtcctagttcgctattgagacaactccagatagaacagttaaagacgtgtttaacacacgattattttgacccagtaaaagcgggaaaattacagctacgcaattttcaaatgataaactgcatttacactacgtgatatgtaatcaaatcccacgattttagggataattgatgtaatcatattccggtcaactttgtaattaactgtcgactatgtaattataaatagtgacaaacaagaccaaaaagggacgaaaaactcatacaagagacttcctgaaaaaacaataatcataaatttgaataagattgactcgtggactatgcagaattttaactgcaaaactacgtaaaagaccttgtgttcatatattatttttctatagcttttattttttctgtgtgagatcaatattgtgaggctcaattttagttaacgaaaatctgcgttagcagtttggtgctttcattgagagcctctgtgaaaaagctcagaaaaaaaaaaccctcctttcttttgaagagaaatcatcttcttcatggctgaaaatccagaaaatgttaacaccccacatgatgaaattcatcattgttctagaaaatagcccatgggctccagaagatctaccaacccgcagtcttgaaggaccacccattccaggagggctcaacctgagggtggcccccgtgcgcgaaccacgcgttcccagagaactcgacccaactttggtcccaatacacggacaacacgcttgaggagaactcagcgtgggaatggtcaaaacactgggacgagggatgaagagcacaatcgtggaggtgcccaatctgtgggagaaagaacctatgaaacgaaaacccgctacttgaggcgccgcctagaagaggcgcaacagcgatacgcagagttagaatgcgatgcggcctcgaccatagcggcacaggggacgaatgctcataatcaacctgaacgtagagtgagaagaccacgaggcaaacctcgtgggtcacaaaccaggagataagaaaaggcctcggaagaacaacccggggaaatgagacatcccctgaaaatcaggatgaacggccaaa

SEQ ID NO: 231643 - DNA, 1137 bp, Cannabis indica
gttcgactcttggtttagtaagtgtcagtttttagttgattaatagactatttgttaattgtttgaaatgcctgcttatttgagatgtgtaagctgttagagaaccatgattagttttgataaagattggtaaatatgtttatgcatgtttggtaatacttattagcattaattcttgtttgagaagttttatcgatagaaagatatggtcgcaagtgtactagaatatgtaccctaggcgattttatatgggtaattgcaagcttaccaggcatggagttggcgatgtgagtctgaatcttccaccaccacaagattgggaacaaatgtatgatgtgatgcaggagaccactcgagttgtaaagatagaaaaatttatacggttaactcaggtcagcatggtgacagagtgataccaaattggactgatcggtaaagtttgcctttgatgaattggccactaaggccgctaggaaagttagattgattcagaggttggaagagcatatcacgtgggatatggttataatttccaaacaacatgggcttgttcgaacctatgctcaggtgattaagttggccattgttgctgagggtgcaaaggaccaaattcgtaagagaaatactatgagaagagattcatggatacaaacatataatgttggtctcggtaagggtgctgaccctagtgatcgtaagaaaaatcctaatgaatcgtcaactacaagaccgaataagagattccaaggtaaccaaggtttctgacatggtggaaacaaaaatttgtgaacttatccagagtgtctgaggtgtaagagacaccatcatggtgaatgtcaagctagagcctacttctagtgtggggtagtgggttatctaagaagaaattgctcaactgcaacatctagatcaaaagaaggataaaactttagctcctactcagtcattttccttgacccaagtagaggccgatgctggcccttccattgtgacagaccagcttactattgctagcacattattgaccatattaattgattctggtgcgacacattcctatatttcaagtagagtgattagaaatttacatagacctagtgatgttttaccgagtggttttggtatcttgctgcctac

SEQ ID NO: 231644 - DNA, 888 bp, Cannabis indica
ccaaattgtgaaggagcatatgaaatcaaggatgagattggcctcgggacctacaagctaaaaacaatggatggaaccatggtgccaaggacctggaacgctgatcatctccggaagtattaccaatagttaagaaatgtaaacttacgctttgttaagagaatttgtaccgaaaagtgtatacaacctctaaatttatgaataaagctgagtgccttcaaaacaatgctttcatgccactcaggggggtactaaggcataccacacggacaaatgtaaaacaagccaaaagtaaaagcaaaatcaagcagaatatatacctaagcgaaatatatatatttaaatgtaaatataagagatgtcctgacccaaaagcaggtcctaaaaaaatattaagggcctggggacgggccataaaaaattgtctccccttagaagataataattaaattgtctaaaaacaaaggaaaagagactgtaaatataaagaaaaagaaaaatagttttaatggtgaactggttgaattggtcggcctaatcaatgcggggaggaagacgagggccacggagttcttcaaacaaagcgttaagccttttcttcttctcccggaagacaacgaggatttcctcgggcttgggataaaagtcaagcttgatgttctgaatgatggactgccaggccatgtaaacgccatcgtcaaaacgtttgacgtagtgcttgcagatgacgggagtcaggagctcatcccttttggccttattcaaggcttggtccttaaagtccctaagctccttcccttccacggtcaggttggccatcgacggcaagtccgcctggtgcagctcctccaaggattttaaccttgcggccatctcatccatagcctc

SEQ ID NO: 231645 - DNA, 1119 bp, Cannabis indica
gtgcagctgtcaacaatcatcaagccacacagaatagaggttctcaagaaccggtgtacttcaaccacaacatttcgattcgcgtcaatgactacaatttcttgctgtggaaacagcaagttcttgcagccattagaggaaatcgtctcttgaagttcatcaaagaaccaccaccaccggagttcgatatagatgaagatcgcaaccaaaaccgagtgagccaaaccttcattgactataagttcaggaccagctcctagtctcatggttgttgtcgtcgatgactgaaggacttctcacaagaatggtagggtgcaactcagctcatcagatcaggaaagcattggagaaatactatactttggaggtctcttcgaagattttggagtttcgcacaaagcttcaaaacctaaagaaaggaacactaagccttaacgattacttgctgaaagtaaaacagcacgtagaccttcttgcatctgtgggagaaaccttaagtgacagggatcatattgcagcaatcttcaaaggcctcccgagcgagtacgacacctttgtgatctccaccaatactcgtgtcaaacaatacacagtaggtgagatcgaggctctgctcttagcctctgaatcgaggatcgaaagatctgcgaaggacatagacctcagtgcgaatcttgtgactgatgatcaagattcattgatggaagctaatgttgcctggagaaggttcaaacaacagcacttcggtcgaggaaatccccaatctagtggcattggtcaatatggaaatttcttgtctaacagaaatttcaatcgtggaattgagtttggctcattctcgggccagagttctggtggtcgaggaggaaacttctataatcgaggaggaagatctggacctggaaacaatggcaataacaaagtgcaatgttagctgtgcttgcgttttgggcacacagcacatgactgcttttatcgatttgataagtcattttctggtgcaacatctggtgtcaattctatgttgaatactggcagtaataactctcatcagacacagataactcaagccaatattgccacaaatagcagcttggatgatggtaactggtatccaga

SEQ ID NO: 231646 - DNA, 1140 bp, Cannabis indica
aaaaattgaaatttccctttactaacactagtattttgtttcttagatctttctctcttcgatcgagtatctgcattgattgttttcgtgtgaaagatctcgttgaagttctaaagcttcgtaactcaaaatatcggatgagttcgacacatatctctaaagcatttaaatgtgaaatacattgtgtacagatgctagcgctgggggcatagcacctgtgtgctacttgcccaatcctttccaagatttcaaaaggtccaatgaacctcagtctaagttttcctcacttgccaaagcatttcactcctttcataggctaaatgcagagaaataccatatctccaacctgaaagtcaacattccatcacttcatatgattaaaactcttttgcattaactgagcagtaagcattcaagttctaatcttattaattgcctcactcattttccgaacagcttcgggacaaagaaactttgtctcacctaacttatcccagtgaataggtgatctacacttcctaccatagagcagttcaaaaggggccatcctaatagttgaccgatatctattatcataagaaaactcgatcaagagaaggtattttacccaatatccctcaaaatccaacacacattcctgtagcatgtcttctaagatttgaattgttctttcagattgtccatcaatctgaggatggaatgttgtgctaaatttttaactgtgtacccatagctcgttctagactctcctagaatcttgatgtgaacttaagatctttgtcagacactatagactttggagcactgtgaagacaaactatttttctaacatactactcagcatactgatcaatggagaaatttgtttgtataggtaaaaagtgagctgaatttgtatacctattgacgattaccaatacagaatcgtattaccccatagtcttatgtgatctaaccacaaagtccattgtgatgtctttccattccattcttgtaaattcaatggttgtaacaaatcaaacacttagaaacaaagtccgctatattattcttcattcttggccactaatacatggtcttaaggtcctagaacatcttggtcatactggatgaacaaagtggtatgggattcatctagaa

SEQ ID NO: 231647 - DNA, 619 bp, Cannabis indica
agggaaaaagaataaaagactagaaacatcaataattaaattattgtaggaagtatttgcataagatcccattcgtaaggcatttgctacaagtaaagcatcagtctccactattgcaattgacaattgcaattgtaacacccaattaagactataaaatatagccttagcctccatttcatgataagcaaaattgacgaatatgggtttagcaagtgtagcaagaacttggcttgtagagtcacgaacaacaaccccaattccaataatgttatgattggcatcaagagtggcatccacattcagcttcaaatcccttccagtaggcggtttccatgtaggattagcatctgctggttttggtgtatgagcactgttactggtagcttcatgatacttgttcttggctgctttgaaatttgttaaataattgatagcaaaagaagcaagtgtctgtgctggtttggttgtaaaaccaggaacaatgcgatttctttctgtccaaatggaccaaagtgtacaaatgatttattccatctcgtgatggttgtatatggttgagagatgtaccaagtagtcacccttgtacattgttgatgccttactccaatccaaattc

SEQ ID NO: 231648 - DNA, 1226 bp, Cannabis indica
ctaaaccataatgttcaaaactcgatgagagacacgctaaaacacttatcggggatttaaaattgaaactaaggataaccctatcaataaataggatgctaataccctaaacaacacaaaaatggagaaagctaaggttctagaaaatggcccaaccgacagaccagttcccaagcggaaccccggttcctgggtaccaaccagttgacgagttctataggtcccccaaaaccggtcgaccggttctatgttgggaacccaaaaaattccccccacaactcaaatcaaacccaaattcactcacaacctccagaatacctctaaatactacaataaacaaaacccaagcaaaaggactcaacaatttaatcaaaatccaaagacaccattaaagacctaggttgagttctcaaacatccaactttcacaaaacctaaccattcaaccaaattaacttaaaaacaacacaatcaacttcaatttagctccagaatatgaaatccaacaactccaattatcatagcaactaaaattacaaatatataatcacaactcactctaaattcaaagagaccacaaaaagagttctagaaaattataccttgggttagagattctaaatccttgctgaaattcttgaattaaaccaagaaaaatcccaaaccttgctggctcaaggaattcgaaagagaggaagagaaagatagagaaggttctaactttgttttctataacctttattcttctttttctttttattttacttgctgaaaataaaatcaacccttatcaataactaaggaaactagcccccaatgcccacaaaagacaaaccaatcatccatcaaattacctatcttcccttaactaataattcaaaaattaatggtaatcaagggtagtttggtcaatagtcaaataactcattttcaatattatcaaaacctaaaaataacaccccgatgataataaaattctatacccaacaaaatgcgactctctaaaggcccaacgtcactttccacagcttccgaacacagtcacagaaattaagcaatttacataaatagcataataaataaatatatactaacttaaataaatgtccacaatatgcatattataaataaatttaatctcatgaataaaccctagttattaattaacccaaagtgttaatgttaagcggtcttcacattaccgcttacaaattatttacaaaaatt

SEQ ID NO: 231649 - DNA, 1381 bp, Cannabis indica
gagttcgtataataaagaaatgtgattaatttatagaaaatttataattattttgatgagttgtagcaattaattatgttattgcctcatctctcaactcattacaatttttattttaatgatgaaattggtgaaatacaaaacaaaatagtacataaattcaattcattaaagcaaagcaaagcaagttagggaagaaaggtatgacaaatcaactcatgcactgtaaaagttttcaaatgtagtggttattattattagggcagtgtttcataggtggtcttaatctccatgttgaaaacattgaccccggtgtacatcccatcttccatctccgtgattttggaggttccgtcgtagaaactgttcttttcagcataagagaatggaacttcgcacgtaccctccgtcactacaagagtaactattgccctagtcttaggaggcactccaacaacgtagttagtcttagttgatgtttcgaaagttttggttgttccccattgccctacagcattaacctgatcacgcgacaattcgatcttgtccttattaactatcaacggaattgtattgatttcaacggttggtttaacatctgacacgagcgaaatactattgcgaaaagcaattgatcttgttttactgtactcgagaggcaatttcatagttctatgaacatcctcggggttgtctgccactgcttggctcttctcgatgacactgagattgtaaactctgccctcctcgttgcgaaaattgatgttgtagattttcttagacatgatgcactccacgatcatgaacttggttatattggtaatgtcagactctctacttgaatagagtgggtctttgtctaccaaagtattagtgtacatggacaagaatttgtagtatgccaaactacgcagcaccacaacattgtcggcaactttgatgggaaggaatatcgataacctgtcggtggggtcgacactgcggttggcttgaataggggtgctgtaccagaacatattggtggaaaggttctttatgcgaacataaccatcaccaacggtggagatctcatgtgctaccgatttgtcaaagatgttggcatccttttccaccctcatatagatcatgtcctgtctgttgctaagataccagcttacgccgttatgtggcctaaaggcgacagtagttttgggaaatatgacaagagattcccaatccaagattttgaaaacatcaaaatcatccacttgggtatcgcccgcatacagaccatcctcgtaagacttttcccacctagcaagacaagcataacggcccgtgatgttgtggacattgtcccacatagaataaatggtagagaattgagccatatataagaaca

SEQ ID NO: 231650 - DNA, 1409 bp, Cannabis indica
gagctaagccaatttgacatcaatacaaaccgcgatcgacaatcaaaggacaagccttctctgatttcattcttgagtttccaaacgacgaagtagcgattattatagaagagtgagtcgaccctaaaatgtcgtcgggagaagggtggactttgtatgttgatggggcatcaaacaacaaaagatcgggtggtggaataatactaataagccctaacaaattcaaagtgcacgctgccttaagatttgaattccctacctcaaataatgaagtcgaatatgaggcactaattgtaggattaaagcttgctcttgaaatgaaggttgaataacctcgaggaattcaacgattcgcaaatggtttgtcaagtgaatggagaatatttggccagaggaggacacttagccaaatacctttcctatacttgtgagttattaaataaatttaaagaagttattattagtataatacctcgtgcttataattctcatacagatgttttggcccgtttggcctcaacaagagaagcacaattactcgatgtaatttctgttgatttgttagtccatccgactattcatcgcgaggagatgatccaagtcgatgtaactaagcaaatcacttagatgactccaatcattacttatttaacaacgagtaaactccctgaaagcaaagtcgaggctaaaaaattatgatatcgagctactcgatatgtcatttatgacaacaagctgtatcgcatgagttttagtcaacctttgcttaaatgtatcgatggagatgagtgtgattatatactacgagaggtacatggtagaatttgtggcaatcacactggaggcaattcgcttgctttgaaaattatgcaacaaggatattactggctgaccttatgagcagacgcaactagtttcgctaagaagtgtgacaaatgtcaaagaattgtgacctatgtcaacaaaccaccaacccagttaaactctatcactagtccctggccatttatagtctggggcatagacttaattggcaagctaccaaaaggaaagtgaggggtaaagtatgtagtggtcgcagtagactatttcacaaaatggactgaagttgaggctctagcgaccataacagctgtaaagttatgcctgtttgtcaatcgagctattatttgtaggtttggcattccttacaaattaatctctaacaacgaaaagcaatttgattgtaaagaaatgcgtaaactgtgagatgatctagggattcaaaaacctttatccttacggggattcaaggtttcgacctcaattcttttatgagcacgatcttcgaccatcacttccaccgaagggtcatcatcgggctccgccaagtcctcaaacttgttttggaggcactccatcatttgttt

SEQ ID NO: 231651 - DNA, 830 bp, Cannabis indica
gttgtcgggtctgttgttacctttcctgaataaaaagtgatgcgtttgttgaagcactttgtcttgactgtatgatctctttgcattagagaaataactgctttggttatctttatgataggttggtgaagtaagaaaaaggagggcccacatgtactacataagtgagttttggagagaaaacccttctttcacttttcatttttcacttttactttctctcactagaattttgctcttggaaaagctcctccttctctctaggtggccaaacctataggctccaatctccttgggatttttgcgctatttcaacaatccaagcttctcatcttcatcttcatcaaaatcttgttgtgggtaagctttttatttccgctctttcacttaatttgattaatttttccctgaatgcatgaacattatttcttgttttgaacatgctttgattcttacgttagattgtagtccatttggtattttgatcctcatgatagccttaggatagacaataaataatttctagatgaacaagaactgaatctaaccttcattgtgattcttggctctttaagttacgaaaaacatgtttgagttcttgaaacatcacgtattttgatccatggacatgctggccggccaaggaggctttgtttgaagtctagccagccatgggtggctttcattgggtctggccggccatggggactgtgtccctaggctggccggcctttgcctagaactaagattcctggccggccactaggtagggtgtaagggtcttgctgacctttaggacatggaattctggccagccaaagctaaggctc

SEQ ID NO: 231652 - DNA, 630 bp, Cannabis indica
aacacccaagcaggtacgggtttgcctctagcttctgcgcttctttctttgtctgagggcaatctttcttgagttgccccaccatgccgcactgaaagcatgtcttccggttgcactcaccttgatgatgtttcttacaatgtgggcactcagggtaagagtaaccctggcgtccacctctgccttggctcccacaggaccgcttgctctatccagaaccactagatgccgggataacctttcttttttgtttagtggtgaaatcactaccatccctaccataaataggaataggaagagtgggggtcctaccaacactcagagtcactcggggctcttcaagaaacttaactgcaccttcagctcgcagagccttttcaaccatatccgcataagttgtcgcctcatttttagtaattactaggtcatgtctaattttcaaattcagacctgctaggtatttttccttcttgctgaagtccataggcacaatacccgaagctagcttggccagacgatcaaactttttctgtattcagttaccgatataccctcactctccaccaattatgtaaattctttccgcttagcactgcagactgcctcattataatatttggcattgaataa

SEQ ID NO: 231653 - DNA, 1577 bp, Cannabis indica
cattaatcacgacatttaaggcaaaaagtttagtatgggatggatgtaccaacctttcagttggtgtggcaaatattacaaagggaacatcggtgggactgagacacaatcttgtggtccaagggtttctagatggatttttagaagagccaccaaggttattgataaagcgggaaattgactctgaattgaattgatactggggtaaaacctgcatctaaagttttgaattagatgataaccgtaaaattgaaaagggttaaggtttcgttgtagaaaatgttaggcttgaaattgctagtttgagtattttatgttggagtacgctagttttactagtgaagaagaaggatgaaactttatgagtgtgtaatgaccgctgggagattaaatcaattaacggtgaagaataagtatcctttgtcaaggatggatgttatgttgaacaattttagggaaggatcatcttctctaggatcggtcttcgatctggtaattaccagttgaagactcgaaaggaggatattcccaaaacagtttttgtacctatgactttgtaattgttttcactaagggtatgtgatttcttcggatccaagggagccatatgagagacacccttggatgattttgtaatgtctctagaagcataagttttatgctaaatgtaagaaatgcgagttttgctgatcccaaatttgcaatgaaggttagagattttctggaattaacaggatactacagaatatttgttgggggttgtcaacgcccttagtggaatcaaatcgaaagaactgaaacagaggttaactattgtaccaatgtcaacattgctagtcagtgaggagaaattatgatttgatgtgacacttccaaacaagggttagattgcattttgatacagtccaggagagttattgcatgtgcttctaagcgattaaggaagtgtgagtaatagtattccagctataatattgaattgatagcggtggcttctaccttgggagtttggtgcttttacctgtttggcaaaagtacgaagtttatatgaatcataggagcgtcaatattttatcatttggaaaggatttaattaggaggtagcgacgatggttagagctgattggagattataacagtataattccctacttttctgggaagaaaaattagtagtggatacttttaaccaaagagttctaggacaagtttgtaaacgaaaagatctcatcaaaggttgctataaatgtaaccagaataaggattgagttcatgattagagaacttattaatattacattgtagtttaatctgttggaaaaaaatatgagtggcctagcagagtgactctgaactgtagaagtacaaggaaaggcttggaaccagattgacaaaggactttttgattccgtttgaaggaattttataatataaagacaaggttggtgtatcagtctgataaggatattgaatagaaggttctaaatgagtttcatactacaatatactctttatactcaggagtaactaagatatataagatcagtacaatttctttatcatagtggaatatgttt

SEQ ID NO: 231654 - DNA, 1311 bp, Cannabis indica
cattattttatcactttcttacattattttttctctcttcattctctcacattattttctctcttatcattttctctctcctcattttcagtctagaccgggctgggctgaggccagggttcgggtctagggccgaggcaagggtccgggtctaagccggggtccgggtctggggcgaggtcaggctgggtcagggtctggggttggggccgttgcttggtctgggttcgggttcgggctgaggttattaagattttatgccctaaataaaactcaattttattgtaatcttcttttctttaaataaagatcagaaatcatatcttgaccttgtcatatgccttgttcacatattttatacatgattataggtttaatatataaattctattaaatcacgaacgtatatttatttataattacagtgatgtcatcacagtaaaaagtaattatcattatatgcttcaaattatttagtctcatgatttatcagtgcactggatttacactgacgcaataatcaacaataaagtttacttacacactagtatgtagaatgtcctttttaggacattagcaaagtacactggtatcggatgtatcgactatatacattggacttgaccaatattgacagtggaaaagatatcataaacttactgttatatcttttctaagtcaatgtcacttagttgttcttagatcaattgatctcaatcctgagatggttcagttctagcttaattgtattatacatgttctttgacttattcgttaaagttgaccaatagatcggcccaatacttacatcttgggaactcagtagttcaattgagtgggagcatatagcttctgtaactaatagaagtgaaacaatggtttccttagagcttggctaaacgcgtttaaatgattgatgcctcatttcagtaattatattagttttctgaaatatcatttacaagtagctaagtgttttaaggataaaatacattgaagggtaaaacggtaatttagtctatatccaatgtagaccatctatagaggatcattaatcatttagattgtaacaatagataattcaaagcatgcctatatttggtatatagagctttttatgtaatcaggagtgtaattctaaatctattgtagagttatgagtaattaataagatagagaatttactccgtaaattttagaaatacttattgggagctttgttacataggtccatggtccccacacttactaggataatattgttttaagtctcaattaattaatttacttaatcaattaggattctaaatt

SEQ ID NO: 231655 - DNA, 1422 bp, Cannabis indica
ttctgtgtgaggatatctgcctggttttgggagaggatgtttcctctgtttattattttggtgctgactttccttcttccttctagttgtgtccccaacagatctttataataagagacaaaagcatttgtcacttgttgtggttcatgtgctcttgttccatcttgttgttctatcgagaatatttgattctgcctgattcgttgctttatacttgcatggaaaagggctgtatttgagtctccattctgaatccacgcaacttttgctttttgctgcaagaaagaagtataatctctctgtacctgcataaaatgagctctagcattctgttcagcattcaataaaccagtatttagtgggtctttatgaagctcctcatggatattttccaattccagtttagctttcaaagttgcagcatgcggatcattataccccttcctgttaatgtctttaaaaaccggtttgagagctctaagcttgcttaccagttgaaacatttttgaaccctgaaatctttgtgaccatgtttccctaagcttcacctcatactccgggtgattcttccacattctgaagtacctgaatggtttcttccctccctgccactgaggatataaggtcagaatagctggggtgtgatcaaagagtccttcattcataaagccagcttcagccgagggatacttatctaaccaagtttgattggccataatccgatcaatcttggagtagatacgatcatctccctgttgtttgtttgtccatgtgaaaaagtttcctgttgccttaacatcctccagttggcagtgcgagatgcagtcaatgaaatcagtagatgcatggaatttaaccttgtgcccaattctctcatcctttgcaatgatatcattaaagtcccccattagtaaccagctcacattggttgccaaacccctaagatcttgccataattccattcttccaacatgatcattatatgcatataccacagtaacaaagctactgaagtgtgaatcagtagtagaaatatgtaggtgcataagttggctggtgcacttaattatgtctacattgtatcttagaggattccaagcaatgactattcttccccctctatgccaagcaatgttggtggagaaacaccaacctgaaaacacatttaggtacaaagctcctaatttagaagcttttacccttgtctcgaggagaccaacaaaaccgaccccttgtgaactaataaattgctttattagcctttgcttttgttggttgttggctcctcggacattccaggataggaacttatccatttacacttccattccctgcagagaatacaattctgcattaatagtggtattatcagctagcacactaaaagagttcttggtttcagcaattgttttctgttgctct

SEQ ID NO: 231656 - DNA, 966 bp, Cannabis indica
ttttctcttaattttgaattcacaaaatagaagtaaggattttattttaaggtatttaactacaatccttgtgggattaacctcactcctagtgagtttattacttgttacgatacgtacacttgcgtgtgcaaattaccacaacattcttgtgtgaggctttgtcgagctaggtggtgttgtttgggataccaaggactatatgggttgcttgggcggttggagttgtgggtgattttgcagttcctgtggctaagctactttctgtccggcttaggttggagttggccattcgatttgggtttcaactgttgcgggttgattgtgatttaacagtggttgtcaactggattaataaccgtagtggtagtgttgtctatcaatcacttattttttagattggtaatttattagctgctggtggtggtagttcttgtaatgttattttggagtatgcaaatggcgttactcatacactagctacttctgttacgagtggtgttagggacaatatttggacaaaagcttgtccttgtttttttgtattcatctataacagttgatttggttctttgaataaaggttgttgattttcttaaaagaaaaaaattttaaccttgcttataacttacaactatactttcattttaatataattatgtattaacttatattctattaagtttagtgtatttcgctttagcctcatttaaattgactaaatcataaggatatttgtggtataaatacttaatattttttgtttcattcacttatatacaatattttttttcaacgaataaaatacctgaagttacatgttcgtatcactactagtccgttaaatcctatccaaacagaagttatttgtgacataaatccaattcaatctaaggcgacgtttggtaatactgttatttttaatttttttatatcacaaaagtgaaagtgaaattttgttttttg

SEQ ID NO: 231657 - DNA, 1393 bp, Cannabis indica
attaaacaatttgcaaattgcaagaaaaataatgcacaaattcaataaaagacaaaacatcatcagctagataggtccagaccttgatcccaagctgatgttcactggttaggtccatcaaacatccttccaccaaacctgtttcttccatcaagtatggctgaatttcaagagctgactcattctcagagtcatcatcatcactaagagataaacaagaaaatacgaagtattaataggaactagtgaaatctccaacaaacaatgtgatatggcataacagttaaataaagcttttagatgacaggatatggatgcaagactgaagacttcgattgatacaaacatggaaaagtataaaaagaaaatcaatcaaggccagttaaaaatgtatacctaacataaaggtcgttaaaattaaaccgattagcagaaagagagctttgatcttgggcttcctcatatgcactgtcaaagtcatccacctcatcatcgaggacacgcattacaaatggcctagaacttctctctacactcttcccatttgaaagttgactatacatacacaatttatagctgaaaaggttagtaaaaaaaacacatttgcaccaagcaattatctaaatcacaaacagacatacttactgtgattgcactttcgtgaatggcattggaattttggaagagctactaagttttgtttccaatgcattaagttctgttaaaagagcatcaaagctccaatctggttcagggtcggctgcaattccctcaacatttttggggcaacgaagttccaacttaacagctcccctaaacaaaaccaaattgatcccacaaatcagaaataacccatcatattaacaccccatttgcttatacgatttaaaaatcgtaaactttcagtcaattaaaaatgccaaaattcataactttgttcatagatgataatcaaaatccaaactcacttaaaagaagatgaaaaaaaaacagcactttctcactatacgaaactaatatgcaaaagaaaatttaagcagaatgtgaaataacaaaaaagaatcaagcttgaaacttacattgtgtaaaacttcaattagaaaaccttcggttccccaaaataatagggtttccacaatccactatctactccctctcttccgtttgtggctcaaaacgcaatcacgaacatcaactgagttagggtttttggttcttgaccgttggaattggaaaccccacactgaatgaaagaggttgttcaataatctacaagcaaacacaccacggtttaattcagcaaaaaaacacaccacggtttaagtttctcccccttttttttttaaattactctattattttttattttttttctaattttttaaattttaag

SEQ ID NO: 231658 - DNA, 1003 bp, Cannabis indica
tcgacattgttgatagtggatattaaggtagatctctgagatgagcttgacggagacatagccctaatttttaggatgaacttaaaatattttctggtgctttctctaccttactctttttttcatttgctaaaactaaatctatgtgtgtgggtgggattctgggtttcgtgcttagaatcgagcaagttcttgagaagaacttgctctgctagggttttgagttttcagatctgagaggctgagtgtgtgttagggtttctagactcttctttgagagtctttaagccaagggggtccaacgacacaaggtttggtgtcgtagggggttaaacactgccattttgtctaaaacacacttagacaaagtaaaggtcaaaattgaccttgatactgataatattttattttgttggtgtaggttaaaatggtaaaaatcctatagtggtatcagagcctggtttggctaaagaagatcaacaaaaactaaagaaggaattatcaggaaggaatctggcaaggaatcttgaaagaaagattaccaatgaagaacacactcaaacctggaagaggattaaagttctgaatcaaaaattgatcctgagaaagaagaaaatagttcttaatcgaattcagatccagaaacagaagcagaaacatcataaaataataaacatactgagatttctaaaactctatctgatttcaattttattaatatgagtaacataaaagttgatattgataaatttattggtacaggtgactacagaatctggagaaagaaaattaggtctctcctagctcaacaaaaattgctaagggtgatagatgaacctattgaatggctagaaggaacctcaaagattcagcaggaagaatacctggaaactactacaggaatcttgatattcaatctgtaagatgcaataatcagaattgtagacaaggaagaaactccatcaaagatttggagaaagctagaagagcagtttcaacagaa

SEQ ID NO: 231659 - DNA, 1357 bp, Cannabis indica
aacatgaagctcaaccccctaaaatagtcttttggcaaaggctcgggaaaattccttggcttcatagtcaatgccctaaggataaaagcaaatcgacaagatcaagcctttttggacatgaagtcgccagcaactgtcaaggaagtataaagcctaactggatgcattactacactaagcatatttgtgtccaagtctatagacaaatacgtacccttcctcaacattctcaaaggaaacgaaaaattcaaggggacagagtaattggcccaactaccggtgctgtctaaacccctagacaatgaagagataggcatgtaccaagtagtcacagagcatgttgtgagtgctgtcctcaaaagagaagaagacaatgtacaacaccatgtatactacatcaacaaaaggctaatcgacgtagaaagtcgatactcgctcatgggaaagctggcctacatcttgcgcttggcttccagaaagctgaggccctacttctaggcacaccccatcaaggtgtataccgatcaaccactgcggtaggttttgtggaaacctaaagcatcaggctgactactcaaatgggccattgagcttggccagttcgagatcacataccaaccaagaacagccataaagggtcaagcccttatcgattttgtggttgagtgcaccaacttaaatcttgagatccctaaaaaatcgggagaaaagcaagagccagagaagaagcgagagcaagagcaacaacaaaatcccaaagaactaacatggaaactccatgttgacagaagctgcactgaccaattatctggtgcaggcattgctcttaaaacaccttggggcagcaactatacagagcaatcaagtttggcttcaatgcctcaaacaataaggttgagtataaatccttgatagtcgaccttaagttagcatatgggctaaccacctaggcatattcagaaattcccaactagttgtgaatcaaattctgggtgaatacacagcttgaggtaaaagaatggtggcctacttgagcaaaattaaagacttgctaagttagctcaaaggccacacgattaagtagatccctagagaacataatgccacagcagatacacttgcctgtttgacaagtagcatcattgttgataaagtaaacttggtgcccatacagttcctagaggaaccaagcattattggcccaaaagaagttgacatgttggatgacactccaaaatggatgacacttattgcaacttaactccaaactggagccttaatagaagacaaaaatgaagcatgcaaactgagaagaaaagctgctaggtgcctgatcgtagacgggaaaatatacaca

SEQ ID NO: 231660 - DNA, 2890 bp, Cannabis indica
tgaagctctctgattctcactctactgttacggaagcagatactcaatctctggagaaagttttcactctcaaacaaggcgaattaattcactccaactcccagaacgacatcgttccataccacgaaaccacccatttcgtgtcctcaaactgtctaactactgattccagctccgggtcatctgattctgaacaaaccattcaagaatctgctgtgattcacgacctgggtcttgtctctgatcttggttgccttaaagaaagctcgttctctgattcctttaaagacttcgaatacggaaacgacaacaagttcttgggaaagaaaccgacattggaggaaattgaagcctcgattctcatggcaggcgattctatattgagtgatgaaatgagaattggtttccaagatgaggttaaagttgtcgacaacaagttcttgggaaacgacaatgaattgggcagtcgtttgaaaatgatcaatggagatccgagatgttctttggagattcaagtggttgatgaaaccgccttgattggaccaatgtcagtccccaaacttggaaggaagacggaatcggttgctccatccaaatcctcaaagggtcttgtgaacaagaatagaaagatagactttcttgagaaaaaggtggcaagaggctctccaagcaggactaaaggaaggaaaaatgtcgttgtgaagaaaggagaaagaagcaagagcatgtattcaagggcagaaatggaagccctaaggtttgtgaacattgttgaacagaggaagatgtggaaagatgtgcataccgggcttggtcctattgtacggaaagagtatgattacttggtcagctctaagaatcagaagaattttcaattcaactttggaaacaatgatgaacccacttcagttctaggtaagttcatcaatatgattcgttatcggatttgtttgtaaaaagattttgaatgatgcattatgctattattgactgagttgacacattgtttactcttatcatcatcaaattacattgtttcatgtttcgttaagactatgatccatctgtcatttgagaaaatattgagattttaaagaacaatattttatcatatggttgattggaaggaccttttatcataaatgatctatttgcatttagatctaattatgcagattttgatgggtttaatgtctactatttacaggtgcagttggtggaaggggaagaagtaaccacatgaatgtgtttgtacattgataattcacatagttgacatatatagatgctttctagtacttgggatgtcactattctcttattcatttttgctgtatagacatttcttcttgtaaacaaggtgatgtgtaacgttttctcttggtcggaaactagtggtgccatgaacctttgtttttttcattaagaaaagtaaatgacatgttacattttttttttcttaattgaaaaatcttaaatgttgggttgggaagtgtgtaccaatacttgaatgatttacactagaatccacaatgtcagaatggagattattattccaatggggcaaaaaacacagaatgtttttggtagtaatttttttatgtcaatgttcataatatacatatgacaggaatcttgttttgttgtttcatctttgaacaagttcatttatttatcggagtgaatattcatcttgcttgaactttttaaaccgtaactaagtgaccttttgactatatttggtagggagaaactaaagaaaagaaaaatatagtctttcatttttttggcatatttgtataatatgttttagtaagttgatacttaaattttatttttcgacaaattgatccaaaattcataagttttggtaagttgatctttaaattttattttttagcaaattgattcacaaacttttctgtttttaaaaatataaagttctcactcttaaatgatagtattttattcatttatttatttatgttaaatagttttatattaatatattagcaaatatatttttttatttatacatattttttcaaatatgtcaaaataataagaagaaaagaataattgaaaagacttaaataataataattttattaaattgttaccatcattgatacaaaatttaaataatcaataaatatatttatacaattaaaaattattaaaattataataatacatattcataaatcaataataaaatatactataaatgttaaaatataaaaatgtgaggggctaaaattttctctagccattatatgagtccgctagtgtttatactctgttttcttattaataatatataaaatatattttaaatattttaaaaaaatatattattataattatacagtatatattataaagtactttaaaaataaaaataaaatatttatataattattgtttattaaagtattcaaataaaaaagaatttaacataaaaaaataaattaaagtatgtcacataaataaaaattaataaatgtcaatatctggagacttaatgttactaaagaaataagagtttgggggatcactttgttaaaaaataaagtttagagactaagttgccaaaatttatatagtttggagaccaatttcccaaaaaaacaaaatttagggactaacttactaaaaattatatagtttaaggatctatggtacaagccttttttttttttactctttagtgagaaagaaactaagaaaggaaagaagatacataaaatgtataatattgtagaatagaaatttttacatcaaaaatataaattgatattttatttacaaaaatacctctataaggtgtgggtaacaattttatttgtaatgagttttatgtaccaaataccacttacacatatccatt

SEQ ID NO: 231661 - DNA, 1213 bp, Cannabis indica
gaaacatgtatagagagatttttatggatgatttctcagtttttggttcttcctctgatcattgtttggagaacttggagaaagtcctaatcagaagtgaggagtgaaacatagttcttaattgggaaaagtgccacttcatgataaaagaagggatagttctggggcataagatctcaaaggcaggcattgaggtggataaagccaaggtgtcaacaatagagaatttaccccctcctatttctgtaaaaggagttaggagttttctgggccatgctggattctaccaaatattcattaaagacttctcgaagatctcaaaaccaccgtccaatttccttgttaacggagttccttttgagtttggggaagcatgtttaaaatctttccaagttcttaaagagaaattgatatcagcgcctatagtcacttcaccaaattgggagtaccattcgagttgatgtgtgatgcaagtgactacacattggagcagtcttgggccaacgagttgacagggtgtttcacaccatctactatgctagtaaagccttaaatgatgctcaactgaacaatgccaccatgcagaaagagatgttggccattgtgtttgcttgtgataaatttcggccatatctgattgggaataaggtgatagtttatacggatcactcagcaatcaagtaccttatgaccaagaaggatgcaaaataaaggttgattcggtgggtgcttctgcttcaagaatttgacattgaaataaaggataagaaggggaccaagaatctagttgtttatcatctttcaagactcgagatagaagacagccaaaatgcaaaagaagtgaaaataaatgatgagtttcctaatgaacaactctttagtttaagggaaagcttgatggtaccctggtttgctgattatgtcaatttcttggctgcaaatgtaacttcttcgtagatgtctcgtcaacaattgaaaaagttcttttcagaggaaaaacattactactgggaagagccaattctttacaagcactgcgccgatcagataataaggacatgtgtgcctgaagaagagatgtattctatcttgaatcaatgtcatgccttacaatgtgggcggcattcagtggcacaagaactgctgcgaaggttcttcaaagtggattcttttggccgactcttttcaaagatgctaatgactttgtgaaggc

SEQ ID NO: 231662 - DNA, 864 bp, Cannabis indica
tgagccattgcactggttgtctcagatttgtggggaccatcccatacaacatccttcaatggatataagtattatattcattttgtggatgtctattcaagatttacttggttgtatctcttgaagaacaaatccgatgccttgaaaaccttttaacacttcaaagctgaagccgagttacaactcaagtctattaaaaccttgcaaacaggttggggggtgaatatagatcatttacaaccttccttgttgatagtgggattcatcatagacatccttgtcccactactcatcaacaaaatggtttagctgaacaaaaacacagacacatagttaaaaaatggtttagctcttcttgctcaagcctcattacctcttaagttctgggatgaggcatttagggctgctgtctacattcataataggcttcccactctcttattacacaacaaatctccattagagaccttgtttcacactaagcctgattacacaactttcagaacctttgggtgcaaatgctatcctaatatcagaccatataacaagcacaagcttgaatttagatcagctccttgtacttttatgggttatagtctcaaccataaaggtcacaagtgtcttgatactaagggtaggttatacatttcgagagatgttgtttttgatgagttttccttcccttttgagctagatgtcagccaacatactgcttgcaaaaccactgaaatcccttcctgtgtgtcctcactctaaacagatttatacctatgttgatcttgtttcaccaggtttgaacccaaatgatgttgtccataatgcttcagctcacattgaccatgatgctttatgtgatttgcctgt

SEQ ID NO: 231663 - DNA, 1482 bp, Cannabis indica
ttattgtaagagctctaagaaaagggatcattatattctttgttattaagtcaatacaaactaaggggagtaggctattaccaaattgctcggggccgaacctctataaaactcttgtgtctttatttatttcattatattacatatatactatactacttgtcgcttacaatcaagactcactgtcgttggctaaaagcgaggtcaactttttggtgctttcattgagagcagaatcacaggatcgctctttatctcaaatctaataataaacacgatggtggtacagacccgtagaggcgtggttgatccagcaaatccataggtagtggatcctgcactgcataatccaggagatgcaaaggttccactagccacgaatcgtgaacaattgacaactgtaggtcaagatgtgacaattcctttgagtggaattgtgcctggtgtgcaagagactagaaatactagttcagcagctaatcagggcattcccaacactgtcgttccacctgttacaaatgttcgataaccatttgatatgacatcgagatctagaacctctgtgctgctcttagaatcatgcaaggtcataccaacaccctgcatcatgatcagaaggaacttcgtgctgtagtgaatctcgcattcgaagagcaaaggcgcatgttcgctgaatggatggataaagagatggaaacgttgagggctcagcaagcaaccattgacgaccgaaccagataggccaccgtggtaatacgaaaagcctatcaggctaccagtcaacagcctgcaaccgtcattcccctgggcaagacagacgaagatccagccgtgaacacttctcaaacccctgtatggtcagccgtccaatccccagtcacaggttccgcctatgggccaagcagtaggcagacagaccttgtctagtaattcgtcaggagaagtcatacccaacaactccgcccaagttaataattccggccagctaattagtcagacaaaacagtcactaagacagccgggtgttttcatattcaatcgattgggaatggttcatgatctcagagatgacctgaatagaaggagagggttagaggagcagcatgacgcgccaatcgctcagcctagagctcgtgctcaaaatcccgctcaaagagatgctgacgtgactctggtcagccaggaggctgaacaagttaatcctgacgtgcaggcatagttggatgaaccgaaaaatatgttccaaggccaggccgatcagaagaacaatgaactcaagtaggaccgagcacgtggatcccctttttccctagagattaatgtcctagagttgcctcacaagttcaagatgccaacttggaagatgtatacttggaaggaagatcccttatcccatctcaagtattttgaaatgcaaatggacctgcaaggagcacgaggagatgtatgttgcagagtttttcctgccaccctctcagaggc

SEQ ID NO: 231664 - DNA, 898 bp, Cannabis indica
aaagtaccaaccaatagaaaccaacaaattaccagttgtcgactaaccgaattttcaaaattctcatagtccctccaaatttgtttaatgtgatgcacaggagtgacaatggctttttgatacatcaatcattcgtaatgactcttcctatggatgtgatgcctgcaatcgtctcattcgaacaacaaaactgattaatagaagcaagatatgtatcatgttcaatcttgtgaggtctataattaaagtcagaaatcagagagataagaacgaaccagcaatgactttaagaaagtgatgtattccatccacacagacttccgtaatgtcagatctcctaaaagaaagataatgttaattcgatataccaattgccagtccaagaaaaagataacaactcttaaaaaagtatattacctgttaattgcttgcagaaatcggaaaacgtttatgctctgcctctcttccagaagctgaaccaacaaagatataatgggaattagacaagaattattccttcaaaaaccatccactggaatgataattgtgtggtatgcatataaaaaaaaagtgaataaaattccaagaacgcatatgaaaagtgcttgatctttatattttatttattaagaaaaatctcaaatactaaattttctgcatgcttgaactatatctgactcagggactttggtactaccacgaacttcctgttaaaatataaatgaaagattagtcaggctcagcaatagtaaagtttatacgtgcaaataaaacacaaattcataagaaacttaaatcaattaatgttatacatcaaaactttttccaaaataaaataagaaattggaatccacattaagaaaatctaacctttgcccacatagatagtgacctaaac

SEQ ID NO: 231665 - DNA, 903 bp, Cannabis indica
attaaagtcagaatcagagagataagaacgaaccgacaatgactttaagaaagtgatgtactccatccacacagacttcagcctcaacagagctaagaaagatcaggaaaaagctaccctttagcataataatactcaaaatgctatctcaagtttcataagtccgtgatagacttatactgatagatgattacaccatataattaagaacatagtgaaagtaataaggaagaaagtttggacttacgtatcaagaaattgaataaagccataaccaaatggccctgacttttgttgcaaaatctcagaaatctcaaatggcaggtgaaagtcaacaagttggtccctttgtttccaagttgtaaaccatctaagctctctataattcacatcttttgcaagccacatctttgggcgtatcatcaatatttttcggttcatacaaataatttgaaaattataatgctcttaccctttaattacaggcattccaaagctacacaatatcccatcagtccaatcaccaagcagaatttctttcaagcattcccatctacagtatagtgatctgtaaacataacatgtaacatgtttaagactcaattatagaacatatttttgccatgcatgtttgacccggagatagtggcttgcttatcccatttcaagcctttaaaaatatatatatatacattaactatatcgatatatcattcatcatggtcaaaattaatgaataaatttatcactaattaactctaagaagaataatttaaacactttatttatcttcggggctacatgtaattgtatatattaaatgtgttggattatatttacacaagttaaagaataaatgaaagggaaaaacaaaattacaagaaatataaatatataaaatat

SEQ ID NO: 231666 - DNA, 974 bp, Cannabis indica
taattagtttaacaattaagaggttgagaggtcaaatgccaatagcctcactttttcaatgggtcccaatttttatttttacctaagacccaaattaacataaggtcgacctgcccttaggtccatatttacagtgtttaggaagaaccaaactttaaaattcaaatctgactcacccaaggctcttaccaaacgtgtagaaaagattttaagatcagaagaacgttgaaataaaaagtggaaatttccctcatcgatgctttcgatttcatcacgtttcttgcaaaaagagctccaagcaacatatcgcctagagcaaaatacgcaaaccctcgtattacgttaaaacacatcacaaaattccacaattactgtttgggcaatatatcatctggtttgtattttcagctcaagtttttaggctctaatctcttcttcgagatgttctccaatttaatattctcatgtaaaataaattattatcctgatcgtttctttttgctagaaacttttttcacattctttcataacttttaaatgtaattaatcttttaaatacatattattaaagtttaattcatatgttacaatcttaattcatattaatatataacacatggcattttaatctaatattatattataggttgaaaataacaaataatataacatgacatagttaaaagttcactaggtactatttagtatttagtacatgtttaagttcatgagtatgatttagttcatattaaaacttagtagacacgatttagtacaagaacaatcaatatgtcaataaaattaaatagaattggacagaaaaaaattactaaaaagtatcactgatacctaatattctcttcggtatcatactactagctattagtataattaaatatcaggtctcatataaattaaaaaataacttttacaaaataaaaatattaaacactaatactcaataataattcaaa

SEQ ID NO: 231667 - DNA, 1132 bp, Cannabis indica
ccatgattacatatggatcacttatcccctaatcactacaaaaattaattatatttagtaacaactttttagtcacaacataaaatttttatgattaaatatgacttttggtcacaacaaaaaaaattacttatgactaaactataatatttagatataagttgtcattaatttagttttagtcccaacaagtattgtaactaaaaacacatttagtcacaataaattataatttctgtgactaatgcttttagccacagacgttttagtcatagcataagaataataattcataattagtcacaactttaaaatttgtgactaaaagtaatatttttcatagtggatacaaacacaaaaagtaggttatcaattacaaaaaaaaaaaaagaaaataaattacttaacattatatgataaaatggcataattaaaagaaatacaaaccaggaatccatgggaggaagatcaacaccctttttcaatttcacaaataattgtccatcgtatatatttcttgtacaaatatttgaactgaaatcaagcaagaaaataaagagtaatatctttcctaaaccaatgtataacacaaaagagcttaaattgaagaaattgcatactccgatagatacactgtcttacaatatgtcgcgtcaatttcttcaaagagacgtaaactgagttctcttcagagattcaacaatggagatcccaaattacgaagattcatttcttcaccttcaagtttcgattaaagatagacgacggcaaagaatagagagaacaacagaacgagcagtagtactgcaactacgacgaagctgacctccttctccttcttctgtctccaccattgcaagatagaattctcctccattgaagacacaccgatgaattgcactggtaaaagtaatttttgccagcacattagtgaattacgccgataaaaataatatttcttatgctgagactatataatttactttctaaacaaaaactaaaaatgtatctttcatattaactagctgttaataatttgttattaaagttaaacttgacattcaatacttacgtgacaaatcacttttataaagtacgacctaaataaagatgaatgtttgaaattattttt

SEQ ID NO: 231668 - DNA, 1348 bp, Cannabis indica
atatatatggataaattttagttttaggtaagtcatggtatttttctattttaaattataatgtgggttttttctttccattttttaacttttttttttatatatatttttccagaaaaccaatttctctcttacctctttgtcttctcctccaccattgttcctcttcacctctttgtcttcttctccatcttcacccctttcattcttaggcgaaggttcttctaaaactcattttttcttctctgaatatcattaattttacacctgtataacattgatgtgggtcattgatagcaagtaatgcaccaccttggttattggtagcaagtaacgaatgacccatgtccaaataaacccgccccacttagagagagagagagagagagagagaagaggagacattgatttacgccgccgaagtgaaaagaggagcctttaaaacatcgtgaggtccccatcgtccttgtacgccctttgaccccttttcttctgacagccacctctgccctctcctctggttagttttcttgcttctagtttccatggaactcttcaactattactcggtgctctgcaagtgttttataaaatgttttaaaagatcccaagaaaactaagtcatgggtctctcacttatggcattcagtttaatctcaacgattcttaatcacaagataattgtctattatctgaattttctttaccagttgtaactaatatcagctaagtaactctacacaacaaaagttgtttatcagattttcatgttgtttccttgacaggggatagtattgattctcgtattattatattgcattttctctgatgtaaaggtaatgattatagtgcattttaaactacttcttccaattgaatgattccaactacttgatatgtcaaatatagtagtaggttgatgcaatttcagtcaagcaaaacttacttaattagttaaggcttctacttctcataaatacacatacactatcacaaacactaattctcgtcttttatccttgactgcaccttcattttgttttttatttaataagtgtgataatttttaattgtttctgagacaacggtgatttgtgtttgactttgcaactctgcttcgtacgacaatccctattatctgtttcttggttactttgtttactgtaatgaaattgtaagtcatactttttaattttatttttttaggtcattaatcatactagagaatgttttcatctgattttgaatctcctatgaagaaaacatctaaaaatacgcaatccccttcttatactcgtggtattaaaagaaagtgcattggtgaaacttctaaatggaacaaggtttt

SEQ ID NO: 231669 - DNA, 2149 bp, Cannabis indica
agctattgtattgtctatttctagccactttgaaccagttaatttcagccaagctagagaaattcctgagtgggataatgcaatggataatgaaagtgatgcattggagaagaatcacacttggatagtggttactctatctgcaggtcagcatttcattggttgtaattgggtttacaagataaaatacagtgctgatggctctattgaaaggtttaaagcaagacttgtggctaaaggatacaaccaacttgaaggtattgactaccatgacacttttgctcctgtcaccaagttggtttctgtgaaactcattcttgctttagctactatccatggctggtttttacatcagcttgatgttaataatacatttcttcatggagatcttcatgaagatgtgtatatgactctacctcctgggtatagtcctaagggggagaacaaattacctccaaatgcagtgtgcaagcttcaaaagcccttgtatggtataaagcaagcatcaaggcaatggtttgacaagttctctacagcccttatagaagaaggtttctctcattcagcaactgaccattctatgtttataaggcattcttctactagtttcatcatcttacttgtctatgtagatgatgttattcttactagcaataacttgagtgagttagaagccttaaaactaaggctgaatgatagatttaaactcaaggatttgggggatttgaagtactttctagggctcgaaattgcaagatcaagtaagggcatatttgtgtctcaaaggccatatgctcttcgacttttagaagaacttgggtatttgggaagcaaaccaataagcacaccaatggagcctaatctaaagttgtcttaagatgagaaagacaagttggcagaccctacattttatagaaagatcattagcaagttgcaaataccttgttattacaagacctgatatagcttatttgatcaataagcttagtcagttcttgaccacaccaagagtaaagcaccttgttgttgcccaaagaatccttcagtatataaaatcaagcccgggacaaggtatacttcttgctgcaaattcagaaattcagctgagagcattaacggatggtgattgggttacttgcattgacactaggagatctacaacaggtttttgcatctttcttggagactccatcatctcttggaaaagcaaaaagcaacatattgtgtcaagatcttcagatgaagctgaatatcgagcaatggcaaatacaactagtgacctgatttggttattatctttactcaaggagctaaaaatagaacacaaagggcctgccttaatgtactgtgacaacaaagctgcacaacacattgcagccaatcccgcgtttcatgaaagaacaaaacacattgagattgactgtcaccttgtgagagaaaaggttcaagaaggactaatcaagactatacatgtttctaccaaagaacaactagctgacattatgaccaaagccttatttcctaatcagtttaaggttcttaaagacaagattggattggtagacatataccatccatcttgagggggagtatcaaagttagttagtttgttagagttagtgtgattagtcggttaagtctgttggtttagatagttggaatgttaactgtctgattgtatttctcgagctatataagctcagctattgtacacatttacaatcaatgagaatactctatttttctcattcatctctcgtggtttttccctctctttctctacacacttccgcaactaatacttctcaaagggtaagagtttggcttctctttctaaaacagaggctttgtaggggctgtgatttacactaataatttatgttgattttgagaattttatgttgtaatttcaagttgagggggttgtgaattctttgaatgggtggacatggaaagttgtgtgaggtgtagagaagttattccttgtcttttaagatgaaggaatgagcttgagcatcaatcagtggcttatgaaggactgaaatgtgagagctctaaaaccattaagaagagctcaaaaactagtaaagagactcctaaaaaaccaattgctcaaaagtccatttaaaagaattaagatttaactact

SEQ ID NO: 231670 - DNA, 1083 bp, Cannabis indica
ttttagaaagttcatattttggatgttaataaacatacttgtgagtagatctaagatcctggtaaaataatttccaacattttgaacatagtctgtagatctctctagttacagacgaatcttggagataatcttttccacttgtcttttgtggactttgtcagaattagtgaaaagcagaggcactttgcatcatcactggccatagccacttgcatcatttggttgtatttggatagatggtccttgaggtccgttcttcctccagtaattgtgcattaataattcttttcactcatggcttcatttactcttcttttgaattagatacaattccattttgcttctgggagatcttttttgtgagcttcattaactcttcgactatgtgctataaacactgagtttattgtctgaagattctcatctacgaactcgatcattgatatggttcctaatttcatctccacaaggtctgcctttctctgttcttgccttttcttcgttggcatttagtcttctttaagatcatgtgtggagaggcttccactgttattatctgacaaaggatgcacctcttcaacaccatcattttgactaacagaatcatcgtatgttatttgtatgttaccgggcagtaggctttttgctttggtattagatttgtatttttgcgcagctttgccactagaatctatttggtcatcctgtagtgaaacttggtttcatttcttattctgttgaggatggctaaaagatttagacttcttttgttgttcagcatgaggagccttcttttaagtttcgtatacttttcctttcccttagtccttatgaggttcttaagctccagtcaaatttaaacttttcattaaactttgaacttttataaacattaaaaggtgcttaaaagtcgggatcttgtctttaaaagttacaatcatattcaaaatacattgtataaccatgttgctttgggattacaaaataaaggccccagtcatcgtgagactgaactctccaggtttaacaatcctaatatgtacaaccgtcctcgagctctggactcattggtactcaacc

SEQ ID NO: 231671 - DNA, 2169 bp, Cannabis indica
ttgaaatgttaactggcagtgttcctgatagttggttggtatttacagaaagaatgatgaggcttttgaggttccacagagaaatgggaattggacccatgagattgttaaaagaaagatcaattgttttaagttgtaatagatttttgattcgaccaatagaagaaggaatcctcccactaaagaagtttttatacagttcaagaacctcaagatcatgtaggagagcaattccacttggaatattacctttgaagaaattaagttgtaaatgaaggtgtttgagcttagaaagtttcgaaatattagatgacaaatgccccacaaatttgttatttgtgagattgaaagattcgagtttgacaagattggaaaatacagattgtggaattgacccgttccaactgttttcagacaagtcaaggaaagtcaagttcctacactttgatatgaaacctgggaatgttgaattaaagtagttccaagagagatcaaggtaggttaaggagctcatgcttgaaaatttagaccaatctgaactctggaaatagtttattccaagtgataagtaccataccttttgtagattggtgagctggtaaggtattggcccctcaagagaattgttgcagagactcaaatattgaagctcagacaattggctcatctccaatggaatttctcctttaatattattgtcactcaagtccaacaaagtgagcttggtgagattaccaatggctgttggtatcaaaccagagagcttacaattgttgaggttgaagactgtgatgaaggaatggagtgaagttgaagttgtccaattttccattgagttccaagttggagagatctatttgtgagatttcttcattggaaacatcacatacaacattagtccagttgcagagattaatgatgttgttgctgtcccatgtatctaaagaaggtgattgcattgctaagctttccttccatgttatgagagcctctgcttgtgctcttggtgatgaagcaatcttcaatggaagcaaggaaaggacaagaacaagaagaagatcagagaaacaagttgttggaactcttttcatggtgtgttgacttgaatgtttaaattactaaatttgatgatcctaataatcacctgttttctctttatgatatatagtaataacatgttatatataacttaacttttaaactagtatcatgttcttgattctcgaaagtcaaccaagaaattatcacttccaaacacgtccctagtgaacaataataatttacaagttcttggaactcatctcatggtgtatgtataataacttgaggctgttgcacccttatgaattgatgcctttatttgatttttaatctaattttctttttcatatttaagtacgttataattattcaaaatattttaatttttttttgagaaatttagaataatttactatataaatattatagtgtttaaacaatttatttcacacacactgtttgaactctattttcggtatgttaaatttttttcaatttttttaaaattttacaagatatcttaataaatataacgtaacataactatatgagaaaagaattaactgaaaaattatttcggataccaaaggtcaggatccaaactaactctcttatttgacatttttataataaattcaaatactacacatattagttaaaatagtaattgccatcaaagcaaagcaaagcaaagcttaatgtattaaaatagtgtaaagccgcctctaataaagaatattttacaatcacaaacaaacaaatcataaatattttacaagccgcctctaatagtctacactagtttgtcagttacaagctgttagttttctgttttgtttctccctcttatcaactaactttcagttagctgttacattctcctgtatataaagccttgtatttccttttctgaaatcaatgagaaaacaaagcattctttcaatttgttcttttgtttacaaactttaagtattaccaaataggtcacttgtgtggtgctattaagttgtaaagaagttttgtttggattaatatcatctcacttgctgatttaacaataaaaaacttcagaagaaacttctgaaattattgattgcactaatatatacatatacacatgcacacaag

SEQ ID NO: 231672 - DNA, 1292 bp, Cannabis indica
ttttttctctttctgtaaggtgctattttttaaatttgtttacactatcttaacatctataccaatattaaacagaaatgataaggagtattttaaaatgttaagtattataatagatgatataatttaatattgaagtttcacacattttagtttaataaatactataaaaaaatcgcaaatcagtcacaaggatgctcaataccaataagcaatgcccaatattaaaaaattggatgctattaaaagataggataagttgccctttcaccaactttcttgcccacttttatctttgtactatttagtatttactttttccattttcataagagtgaataattttatcaatagatatgattcataagtaattgcactatttttcgttttggacttttgtgattttttattattattattattattagatttttatataacatttattcaattattaaaattttatcataacataaaggtttagtctctatgagtgtaatattaaattacatataagcaatgtgggacaaaacacacacatacacacacgcacacacatgcacaaatacacgtacacgcacacacacatgtacatgcacatgcacatacgcacatacgcacacgcacatgcacatgcacatgcacatgcacacgcacacacacacgtgcatattggacaaaaaaatgatgcattttacatttatcaactcacaaaggcacgaatcttatattgtagtaaagagattgtgaagaatgaggtcgaactcatgagaatcgcatgaaattaaagaaaatgcttatcttacttaaattatttaaattctaacctaattctaaaaacgatgaggattttggtaacaaaataaaatatttaacatgctaaaatgataagtaataagcatttttaatggtatttaaaaaaattattaagattttagaattcacttaagtgtaaataaaaatatttataattatattgatgctcataattaattagaattcaatctaattattttctaataaaataaattttccttccttttaaaattataacttctaagtattaaatgtaaaataatttaatttaaatacatataatcgaagaatattatttttaataaaataaagaatcaattaataataatttttaactaacaaaaatatttgatatcaaagatgaaagaaattatttaaagaagtgaaaatcgtatgcatacattatatattgagaatcaacataaaaattgtttacccaaaaactgactatggtgacgttgttgggttttatgccc

SEQ ID NO: 231673 - DNA, 998 bp, Cannabis indica
ttacaaacaagatcaggagagtcgggatcctcaaatccaggaggttgaaccatataaacttcctcttgaagttcaccatttagaaaggcgttattgacatcaagttggcggatttcccaatctttagaaagagcaagagtgagaacaactcttattgtaacgggtttgacaaccgggctaaaagtttctgtaaaatcaaaacccggttgttgatgaaaccctttggcaactaagcgagctttgagtttatccacacttccatcaggattttctttaattcgatacacccatttgcaaccaattgcagttcgaccaggtggtagcttgacaagagtgtaagtcttattccgtttaagtgcaagcacttcatcagccatagcattgttccattggatttgcagcaatgcctgtttgagagatgtaggaagttgagtgacaagtagagctttaggctttttgattccatttttggctcgagttgtcatagtgtgactgtttcttggcactgtggagacaggtgggatactgtttcgtggcactgtgttgctgatggaaggatcaggtggtgttgttgcagcactggtgtgatcattaaaaccagtagcagtgggtggtgcactaggaacatgagatgagcaatcggtagattgaagaacttgatcttcagggacaaaaggcagctgatgaggggctgaaacacagttagttggaaggatttgagagctggattcctgcaacatattacttggagcctcatcagagagatgagaacaagtagtgggaaaaacagatgcatcagtcgacaaaatagcattatcatcaggaaaaagagagccaacagtgtagagtttagatgcaagaggtattgtagcagaagtggcagacaaagtatgagtagatgaattaggttcagtgctaatggaatgatgaggaaatgtattttcatcaaaaataacatcacgagaaatgtatagtctgccatttttgtcaatgcattt

SEQ ID NO: 231674 - DNA, 1083 bp, Cannabis indica
cctaaagagtggaggtggggaagggtggtgatggtgaggatccagagcaggctaagcttagggctgggcttaattcggcgatcataagggagaaacctaatgtgaagtggaacgatgtggcgggtttggagagtgctaagcaagcattgcaggaggctgttatattgcctgtcaagtttcctcagttctttactggtttgtgcttcttttcttttatttggtctaaattcttatgatttgattctttgggtaattcgtattgtttagtattttgtcaaatttgatttaaaaaaaaaagcttaaatttttagcatcattccaattagactgggatatagttgtttatatgtgtctatatatagagagactgggataaagttgtgtgtgtatatatatatgggtaaatagtgtcagttttgaatttgtaagcggtacaagtatccaattttgtaaaactataatttttctccagtttcttcatgatatactttaatattgttgaacctagattgtatattatagggtctggacagaaacatataatgtcagttaattctaaatcttcttttaataaattcaaaacagtgtattgacgggagaaaaattatagttttacaaatattaggtacttatgccgtgccgctaaaaaaatttattgggcttatgccactttatgctgcaatttactctataaatatatataggatttaggctttactaatttgtgcttttttctccttatttttcttggtctaaatcattatgctttgattgtttgagtataatatagtttagggtgtgtttggggagtgacttaattacttagtagtgtaattatattacactgtgtgtttagatatgaggggtagttatatatgaattgttgatattttttttttgtcaaaatagttaggaaaataatattttttagtagtgaatgtttaaagtggaaattttatagtaattacacaatgtaattatactcatgattctcattagggccatgataattggagaatgtccaatataccaaattgtgtaattatctccaatccaaatcgttatgctttgattcttttgagt

SEQ ID NO: 231675 - DNA, 2054 bp, Cannabis indica
agcagccaaggctacatagagaacaaatcctcaaaaccatcctgatcctattgtaaggagacctcgaggctcaaagactagcagacaagaagtaaaccaagggaatccaccaaatactcaagaggaacaacttgggaatacaaggaatcaagaacatcgacgagatgttccacaaacttcccatggatttgctaaccaagggaatgaaccaactagcatgccagactcatcttgtatgaatgaagaggtaaggtagcctcgaccagggaaccagggatttcctcgtgataatgaaaaaaaaccatagaaactaaccaaggtaaagtggtcttctactgagacatcctcagcgtccttctcacgcagatagagaaaatgtgcacacatatttaagcagagggcatgtgtccaatctcttccaaagaagaagaccaacacgagatgaagtaagctcaagcacaggacaatcgcaatcccgcgaacatagtaggtcaagtagacaaacccgagatgggagtaggtctcagcgttactatgctgaccaggaaagcataagtaactcacatagttatcagttcgagagctactcagaaactgaatctgtaaataactatgaacaaaggcatcgtgaacttattatgcgagagatcaaatcgaaggcaacatgaccttgccgagcacctaaatcgaaatgcgcctgattgtataatacttaaccaaaatgtaaatcagcagctagtggatcccatccaattactagtaattcaattagaggataaattcaaaaaatatcaagatgaagaataaggcaagtgccaaattacgacttagacaagaaattgagccatttcaccaaatatcttcaattcaaaatttcctttagggatttaagaacctgcatgtctcgtaatacgatgggaccatagattcggtccctcatttaaacaattttaatactactattcgagcaagtgatgtctcaaataacttgcgttgcattttattaccaacctccttcacaggggtcgcgagcaattggtttgataaattcgcaaatctttccataaaatcctaggaacagttgtcgagggactttaaaaagcagtttgaggctgcaagagaccgccgacccgaggcatcatctttgaacaacataaaacaacaacatggggaatctctaaaagcgtacttgagtcgcttcagtacggcttctgcaaaagtcagaaacctaaatgatagtattcaaataattacacttcaggcaggaaatacaactgacttatctacaataggaggtgaattatgggatgatctctagggtcaccctttgaggaatattaacgagtttaatgaaagagtacaagtctttgtgcataaagaggaagtgagtactgaaatgaagctattgaagactggcatgggaagtaaacccagcacaggtacggtaacaacaagaacagtcatgacaaacgtagataatcctggtagatcaaatgcaaaaacaaaggatgagtcaaaagaatcatccaagaacaaaaagaaatagaaaaaacatgagaagtatgtatccatttactctgtatacactaagttgaattaaactcatgagaatattttccttgctaatgaaaataggattgcattttgaaaacccgagccaatgaggcacgcgaggcacaagcgagattcaactaaatactgtcgattccacaaggatatagggcataccactgaggaatgtcgacaatagaaagatgagatagaaagtttgatctcgcaaggatactttagccagtatgtgagaaatcaaggaaatgagcctaaccagcctaacaacctgaattacctgagattacaatcaccccttgttgagggcaaggatatcttggtaatttttggagggccacatcttatgggaaatagtaacagtgcccaaaagaggtatataaatgaagtgaaaaatgcacaatcagcatttgctcctgaaccattagaaaaagtgaagtcgaatgaaccaccaatcatattctctgaagaagatacaaaacatgtgc

SEQ ID NO: 231676 - DNA, 1684 bp, Cannabis indica
caggcatgcatatgaggtatcctgttcagactatatcttgcgggtagatactcggagttgattcaatgtgtgaccatcatgcgatgccacgtcagagtacaaaaattgagataacaaaaactatttataataaagacaataaactaatttattgaaaataacaaaagtatgagatctcattattttaaaacaaaaacacttgattcatttataaatttttaaacactaacttttacaaaagtatttgaatcataattttaaatgaaacaattaaaacaaaaacatcatgataacccctaacatgaaatccatgcctcgagctcgcatcctaaatgtttggttttcctctttacttgcacacagagagcttgtgagataaagcctagtaagaagagctatgtagtacataaccccaccaactagataacaaagccatacgtataacaatatcacaatatcaaatcaattcataccatacttgcatccctatatcaacatatcatatcacatattattctcacatacgatataacatcatatcacattgtaatattaatgcattctatactcacacacataacacagagtatcttatcgcacattgtcctcacataagataatatactcccactcatgttgatcacacattatgtgtaacctgccctgccttgcgttgttctcacagttggcatccaataggacaatcccttatcacaggttgttcttacccatgataggataacctacaagtaaacccatacaagcaaccaaaaatatgtcctgccagtgctatgctcacacaaccagccgaaaatctatcctataagtgctattctaacacaaacagtcaaaagcctttatcactatcacatactgacaatactaacacaaacaacaattcataatacaaaatctcataagcccatgagtatcaaacccacaataaagtcgtatgctccaacatacaccctgtgcacatatgtccactcttcttacctcagttgttaagaataccttcttgctacttcaagcacttcaataaatttccttgtcgagaacaagatcatggacgttcaatgatacaataatacactcgaaatatgaatttgtagactcatacataaacttacgtaaaatactcaacacataagacagttttggttgcataaaatacaaaacataatcatgtatcactttgattcacaccaacacatatgatgtactgaaacaaacatttttaacgtaaaacataaatacatacaaacactttttatgtgaaactttactaaaatactatttattaacaaaatatacaattatgtgattatttactaaaatcagaagccagcatatttcttaaccattcatacagatcataaaacatactcaaaatatgtagaaaatactacccataattatgtattaatttatacgttaaattataaaaaatacaaaataattaatcaaaaatagcaaaacatcttagcatagtctcttattaattccagacaatataattatattctagcatcatattgatagctcccaaatagcgaacagtatttttactatttattctaattaaaacaaaattaattaattaattaattaattacaaataattataataaatatcaacagtgatcaataaattataaactctattctatatcatagcatacac

SEQ ID NO: 231677 - DNA, 1836 bp, Cannabis indica
acatgagactcccaacacaacttccatatggaaccttgctcacttggttcttttggcatctgttttgggtgattaagatgcagacaacttgaagtgttaagcaagtggtgttgtaactggtttgcacgagaccatgccaaacttattcaatactttctgtaggtagccaacttgagaaagtattatcatgctaggctttaatctctttatgtctatcccaagaattctctttgttttgccaagatctttcatctcaaactcatcattgagtttcctcactacaacaaaatgttctattactggcagaattattaggggcggactaaatccgccggtaatagtatcattttttaaaataaaagtaataatattgaaggaattactttgtgcaggaattttcccgatattaaatttcaaatttattagcagcggactattaccggcggaagtccgccgctaataacattaaataatatttaaatttattagcagcggactattaccagcggaagtccaccgctaataatatttaaaatattacttttaattattacaagcggatctccgcccttaatagttttatatatatatcagtatccttatttatctctccctcttcgtctccctcttcatccccaaatttttgaccagaaacattcatctctcctacttcatcctcaatatcaaaacccttattcacctccccttgttcatcgttgactagcccaccgtttcgactacgcaacgacattcccaccgcctccactgttgtcgacattcccaccccttctgtcggactcatcttcatcatcgttcaggtatatatgtatagttaagattagttaatttttctctttcttttcttttatctcacaatttttcttaattatttgcagctcataagattgaaaattaccccaatattaaatctgtagaaggtatatgaatatttttttgtatatttatatatatatgtgtgttatcttaatatgcatgtgtgtttctatatgtgtattttttttatatttgcttttaaattttatcaaaaaacaaagagagggaaaccaactgtttgataaaaaattatttccattatgttcattcaattatatatagatcaatttatttcattgtatactttgtaatttgtataaagattatagtgtattcttaatttttttttctggccatttattggtttgttaagaaaaaatttgagttaactttatttagagaagtgtaaattattattggggttttcttgtatagtgttaaatttttattattggtttctaatcaatgttgtctttaaaatcataatgaaatttcatgatgatgaaatttaatattcatattaaatgtaatttgactctaattttactttctctacaggtgatttattacatgttagtcaagaaggcatgcactggacttgaagaaaaaaaattgcatatttatagacttttgtgtatctcttgtaatcttatatttgtatatagcaatagagaatttaagagataactttcttatagaaaaccaaattttcgttatttatttattttgttatggaaaaatttgaatgtatatattttttatattgtgtataattttctaaatgttggtatgtataaatgtgcaatgataaatattttatataatattagctcttgagtatttttgataagtaaaatggtaaaaaagttaactatatttaatatcaattttacatttagggtaaattgtggcataaatacttaatatttttgattttatacacttaaatacctaatgtttattttttgtggcaaaaatacctaatgttacaattctcttaca

SEQ ID NO: 231678 - DNA, 1202 bp, Cannabis indica
ggcaagggcatctaaaagatcttccattggtttctctgtgtaaagtaaaaaagaaatcagaatgacacccaaaaagcacatatgcaagtatagtacaataagacttagtccctaccctggtgatctaattctgccctagcaaatttacaaattaaaaggttggtgtcgtcatcccctaaaaagctatccgaggaaggaaccaactcgaaatcatataggaggaatgatccaaaagaattagtacaacaggaccagagcccatccgggaccgacccaagtaatgacttaaattagaaaaataaaaacttttggcattatcaccccaccgagaatggggcatccgaaaactatataatcttttatcaaattccactggccttaagtcagcatagtcttggatagaaggaacgaaaagaatgttcgaatgagacttacaggcttaggaggtacttgcaccgagggctctagagttaggaactgggaatggaaatttgggctggactggagttttcttttttcttgcctcctgtcaggatacccttctggaggtagcttgcacccgagtgaatgtgagctcttgctctcttttgtatctgtacctgttgtatctatcctttgcggacaagataatatcttccctgagtgccttctcactcccagggttccagacgttggggcagaggaccttggacaagttgaagtcatcaagagattgattctccaagatcaactcggccctcctacagttaactgtcatgaccaggtctcccacgttcaagtcttccttcctgtaaccagcaaacacttgcgcgtggttcaggaaaagttgggtgggggcgatacgttgcatggggggaatcctgacccagttcgtcagcaggtctgggcgctcaaaaactttgaacccggaggagaagaaaaatttgttacgatactcctttacattcttttagaagttaaagggtaccagggttccattagctagatgggcttgaagtttatataaaccatctttaaatttgtcctccttttaggggactgaaagaagttcataaaagtataagatttctacaggctgggcagagccagttcttggctacataaaaaataaacaagattgataacaggcgataggcttgcagaaccaattggtaaggtgaaagtctgacaaagatgaaaaagtcgatgaaatagtcctggag

SEQ ID NO: 231679 - DNA, 1113 bp, Cannabis indica
acccttctggaggtagcttgcacttgagtgaatgcgagctcctgctctcttttgtatctgtacctgttgtatctatcctccgcggataagataatatcttccctgagtgccttctcactccaagggttccagacgttggggcagaggaccttggacaagttgaagtcatcaacagattgattctccaagatcaactttgccctcctataggtctcccacgttcaagtcttccttcctgtaaccagcaaacacttgcgcgtggttcaggaaaagttgggtgggggcgatacggtgcatgggggaatcctaacccagttcgtcagcaggtctaggcgctcaaaaactttgaacccggaagagaagaaaaatttgttacgatactcctttacattcttttcgaagttaaagggtatcagggtttcattagccagatgggcttgaagtttataaaaccatctttaaatttgtcccgcttttaggggactgaaagaagttcgtaaaagtataagatttctacaggctgggcagagccagttcttggctacataaaaaataaacaagactgataacatgcgataggcttgcagaaccaattggtaaggtgaaagtctgactccatgccccgaagccattatagttgtggtttggcgtctcctcatccctgggaagacgatggtaaacctctcaaaccggagggtttaatccccgcaatagtgacaatcttctccagttcatgagcacatgtcaatgttgagtgcagttcgttggcctaccaaccgttggaacgacacgtaaacatcttgtaaatgatagggcgatgttgggttttgtgccctaaataaaacccatttcactataatcagatttactaattaataaagatcataaactgcattttatgttgcatggtccacatgatttatttcatgattatatttaatgtataaaatctattaagtccagaacatatgtaaatatgtatatatttgttcatgactatagtgtcgtcaacacagtggaatataatcatgattatatgttcaaaagtttgattcccatgatttgtcagttcactggatttaaactgcatgataatcagcgataaggtatact

SEQ ID NO: 231680 - DNA, 940 bp, Cannabis indica
gttcaggaatactttgctgatatcttctcagcttctcaaattgatgattccgctcttcatgccactctctcttgcattcccactttggttagtacagagttgaatgaatcacttactaaacctttcactaaggatgaagttttttcggctttgaactctatggggcctgataaaagtccggggattgatggcatgtctgccatgttttatcaaaagaattgggctgttgttggtgaacttgctacaaaagtggtactcagcattcttaatgatcatgccgatcctacagatttaaacaagacaattatcactctgattcccaaagttaaaaagcctcagcgcatgcaagaatttcgtctgattagcctttgcaatgtcatctctaaattggtaacaaaggtgctagtctcacggttcaagcttgctcttcctctggtaatttctgaatcccaaagtgcttttttgcctaatcgcttgatcacggataatgtcttggttgcttttgagttggttcatgctattaaacatagaacggctggtcgtaatggtattgcctctttcaaacttgatatgagcaaggcgtttgatagggtggagtggaggttcattgaagaagttatgagaaaaatggggtttgctgaaagatggatctcgctaattatgagctgccttaccactaatagcttctcttttcttattaatggagaagttatgggtaatctaacaccatcccgaggtcttccccaaggttgtcctctatccccatacttgtttttgatttgttccgaaggcttctctagattactacaacatcagcaggaaattggtaacttaatgggcttcaagctgacacgccatgctccaccaatcactcatttgttctttgccgatgacagcctacttttctgtcaagcaactgagagatcttgtcttgctatta

SEQ ID NO: 231681 - DNA, 1005 bp, Cannabis indica
atcagattgtaatgggttttatttagggcataaaatctaacagtctggatataaggtgactgggagcctaaccttttccatatggacgagggtggtctcgttaaacctcgtgagctgtgaaccgttgagggagagaaatctgtcagtgagtctgatggttatgaaagcatctttgaataataagttcactgagcttttgttgtccgccattattctttccacaaccttgtttacgattggagtctcgatgaccaaggggtcttgatgcggaaagcgtactggctttgcatcttcctcagtgaaggtgatgggttgatccataagtctcgacctttgagccgaaagttgagtgactttccatatctcactggcatgttctagagccctggcgtaacgcttcatctcatttctagtggttccccctatgtgaggacctcctaaaatcatggcgacccttccattcgtccagggaggttgtctgggtgcctgctgatgcaacattcctccgagaggcacctgcccctttagagttgttgtgggtcctccttaaggtactgggactccagtttgacctgggttcagatgtggcaatttgtttttgatccactagtacaggtggcccaatcgaattaaactttcaatttcatcttccaaatttttgcactcgttagtggtgtgacctatatcaatgtgatagtctcctttgcctcttgtcctcaggtcgcgtactacctcctgccatgctcgtggctggtgcaaactgagctgggagctgcgcgttcatcccggagggattgtttgctggtggccctaaatgctactgagtcggagcaagggcgagattttgagtgtatcctggagtggcagaaaattgtattccgcttgtttgtgggatgatgggagggcagctccaggaagttgcgtccccatcgtgtatcctaaaactctagttgagtaatatctgccgtaagccactatttgtgcctcttccaagttaatgtactt

SEQ ID NO: 231682 - DNA, 749 bp, Cannabis indica
attcctctcagcagaaaaagtgagttgttattattaagtttgtcttatgttgtataagagttgtttaactgctttgtttttctttctagataatagtgattgcggagcatttgtggctgcatttgtcgagttcttcatccgtggaaaagatgttccttgtgatttttacattggagtttatcgcactcgacttgctgccctcttcttctcatatggtcaaaggaaaaatgatgaaagtattgatagcgaggatgagaagcaaagcaagtcttccaaggcttctaaattgaaaaagtagggtcatttttatgtaaactttgttgttattggttaattttcatttgagataatttttaatttttttatgtttgtaggtagtctatgcggtttatattctggaactggttataaacatttaggatatcattataatatgttcatttttttttatattttaacagcaacggtgttatgattttacatttaattatgtttgtttttctaagtcgtacaactatagataaactattatgcaactgtctccaaactatttttagtattcaacgtacttgtcatttaatttctgacatcttatctcaatatatttcttactgttatgcaactttatccttctccttattatgcaacttataaaaaattaattctgacttttaaaaaatatttctattgaaattctttatgtaataaattcttaataagtgtcaaaaaactatcttgaaactattatg

SEQ ID NO: 231683 - DNA, 1782 bp, Cannabis indica
atgtattttttgattcctaagtgatattttgacatcacttggccagttttcgtgttctagtgaaggtggtccctagttctcagcgatgttgctattttgcagaaacaggagactcgaaactctccaatttcaaagtaagtcactttgctggaaaagtgaaaatatgaagttgtgaatttgaatcttcttacaatatggcaactaattattatgaaaaactagacggacggtcaagacaaaatcagaactggataactagaacccaacgcatcacgccatatgtcaacctaggcgctgagtgctctttttagagcgtttaggatgtcgttttgacacttccaagtttcttaaacttgatgacaaggtctcctacccaattttcgaccattttagaaagaacgctcagagtaaaatttgcatttaagtgatcgaaattagcgcaccacgttgattgtcaacctgggcgctgggccgagcaccatgtcaacctgggtgctgtgctcagaacatttttttggaaacaggattggaaatagcccaggttgataatatgtgaacctgggcgctgagtccagtttaagacttcttggaagttccgtttgctccccaaaaatagttgaatcttaatctttgatgaaaacggaaaatattctccaaagactctttgtaaaaaaaaatcctcgaaagacatacaaaatgtcaaccttggcactgggccagcaccaagtgccaacttgagcgctggtcccttgtttaggcccacatgttaacttgtttcttcccaaaaagtacttattttcccatttttgatgaagacgaagaagatgcaagagtcaaattttcggtttgatggttggaagtggcctatgttggaaaactttcaacctgggcacagagcaccgagtgctcctgggtgcttaaagatgaaagttctccaactctcattctaatgcttcatatatgttcgtcatatctctagttcatgtcccaatgtaaagtttgacctatttgcaccaagatggccccaaagactaaaaccctagttggtatgtcaacttaagcgctgagaagtcaacctgggcactaggtgcctgagcagtgggcgctccgagtgctccaaaatgaaagttctctgaatcttattctgatgcctcaaatatgttaatagtatgtctagtttatgtcccagtgcaaagtttgatccatttacaccaagatggtctcgaagactgaaaccctagctgggttttcaaccggggcgttgggtgaaaccctaggcacctgggttgatttttgaggtgttgttcgtgtattttcagctcttgggcctagacttggatgcttcatgtcatcatagtacgtaatactataacatagtaagttagaaacaacgtggcgggatccaaacacccctcccagagttcccagagtcaacctgggcacaaggctaaggaccccttccaggtcgactgctatgacttgagactacttaactctaagatgttatccttcttgcaacatgtcaaacattgatgtccacgtcactaagaaaagtttctaagttaacaaaagattttatttttttaagaacatgagaacagaatagaatggagtattctaatttataatgtaatccaataaaattattaaatcattgaaaatatacaggtaaaaatatacgtgtatatacgacagtgtatatgaatatatatgtatatatatgaaaagaatcatttaatgcataaaaaataattataattaatgaataaaggcaatccttat

SEQ ID NO: 231684 - DNA, 623 bp, Cannabis indica
tggtgtttaaatagttagaaaatagctcacaaaaccgagcctctaatcacttggacaaagacaactaacataacaacttttaactaactccttaactaactttccaagagtagtaagtttaaaccaagattggttttctatgaattacaaccacaatctccaccttaattcataggaaactagtgaaacaaaagatttagggaagtgaacctgaaaactacacaggtctaagtttgagcaagtccatgaaatacctgaacttgctcactggcagcaccttagttcctgcatcagtaggattctcatctgaggaaactttctccaattcaatctctctaggttctatctcgtccctgatccaaaacattctaatgtcaatatgtttggatctcgtaaataggatttttgctcaagtgaattgctgattgactatctgaaaacactaagacttttcctttcaacatgttgatttcttgcaaaatgccattgatccatgttgcttccttgaaggcctctgtgattgccatgaactcagcttcagtagtggacaaagcaactacatgttgcagctgtgatttccagtttatgcaacatgaatttaactggaaacagtagctagtaat

SEQ ID NO: 231685 - DNA, 1173 bp, Cannabis indica
ttggagttgggagagctcgggccttttcttagtaaaatcagtttataagttcttacaattaagcaaagagttgggtgctcaggatgataattctgtcttttggaatactctttggaagctaagtgttcctccaaaagtgaaagacttgttatggcatgctgccactaactgtctgcctacgaaatccagacttcgttctagacatgtgcctattgataccatctgccctgtgcatcacctgtgcagaggaaattgaaatgatacacacaactctgaactggatgatacccatagcagcctacctcaatactggagaacttccaaatgatagaaatgaagctgggaagatgacaaagaaggctatatggtacatcatcgtagaaggggtaatgtatagaaggggattctccatgccaatacttagatgtgttacaaaagaagaagctgcacgaattctgtccgaaatacatgatggattctgtggcaaccacgcagcctagaaaagcctatcgaagaaaatactaaggcaaggataattctggccgaccataatggaagattcaaaggtctatgtaaagaattgtgataaatgctagagattttcgaacataccccatgcaccggccaatgaactaactcagatgcaaagtcgttggccttttgctatttagggaattaacctaatcggacaattgcctaaaggtaagggcggagtacaatatgtagtggtcgcagttgattatttcacgaagtggaaagaagccgagccgtcggcaacaattacatctaaaaagtattggactttgtggtgaagaatataatatattggtttgaaatcccgcacaaaattgtctcagacaatggcaaacagtttgacagccaattattcacagatttttgcacaaaccatggaagcataaaaagtttctctacagtggcgcatcctcaataaaatggtcaggtcgaagcagtcaataggacactcaaagacactttgaaaaaatgatttgaagaagctaaagggaactggttggaggaactaccaaaagtattatggtcatactccacaactgaagaaaatgcaactagacaaactccattcgctatggcctatggttatgaagctatgttgcccgtagaactagaacctccgtcccacagaagattgaccta

SEQ ID NO: 231686 - DNA, 689 bp, Cannabis indica
aggacctcgaggcattagatttttccctccaatagatgcatggttatccatataaaatttgacaccgtaagatctcgaaagataagtactttgtagatttatatttctagtagactcatccctaaagatgactaagtttactaatataaaacaatagtagaagctcataaaataagaacaaccttgaatcttgcttactaggacaatgttaataggtaaatatatccctttaaaataggaaaaataacatctcttttatcttatatttggatataaaattaattttataattattttatttctacgttagtaattttaataaatatattaaaatacatagtcaaaataaatagttgaataaaaatactactttctttaaataatgatctttattttataagacattcaatctctatggttggtcttacatagttttgtcatcaataggacctcgaggcattagatttttccctctaatagatgcatggttatccatataaaatttgacaccgtaagatctcgaaagataagtactttgtagatttatatttctagtagactcatccctaaagatgactaagtttactaatataaaacaatagtagaagctcataaaataagaacaaccttgaatcttgcttactaggacaatgttaataggtaaatatatccctttaaaataggaaaaa

SEQ ID NO: 231687 - DNA, 1199 bp, Cannabis indica
atagtatatatattaacttacattttcatgaagggtctcagccatagttacggacccttgtgttgaagggaatatcattttctgccgattgagagcatttttctttgaacgagccataagctcctcagatgtgaagaactttagccgccattgttcttcattgagttcaggttgggggggggggggggggtttcttgaatgcaatttcaaagtcttctgaatttttgtaaaattctttgaaatgcacaaatctaatgttctttctcgtcttatatttttcgccatttcagctaacaaaatagctagtacttttggatgtctaccaatttggtaatagtactgcatttgacaaaaaaaaaatattgtgataacatactaatagttttcatttattaatttagatatatatttcaaaaactttacccgaattttggttaaaatgagttgttcgtactctccaaccctacaattctattggagacattgtgaaattctaatggcaacgacatccaagctttttttcttctatcttccaagttagccaaaacattcctcccgcggccttttctagattcaccagacgtcttgcaagaggcatgaatactgttaggatctaacaaatcatccccatcgccatctccaccatgataactagcaacatctgctgacattttatgctaaaaagaataacgaaatcatctaagcccttactttaagagaatcaaaacaactaatcaacttagattaaacaataatagtacaattagtcatttctcaaaacaaaataacattagaaaaactagtcatcaatacaaaaaatatcaaatagattaattataatcaacaacaataaccaaaacaatgaaaaagaaacgggaacacatcttcaatttcatcttcaagacgatcaacaagcaagtcatcatctaaatcttttactatttcatcatcttcatcatctctaatatcatcaacgtttggaactatctcggaactttgagggacattgataatccttggcggttgattaggttgttgcacaatcaattcccctaatccacaaataatataaaatttgatgagttatcgtcatgcacaacatcaatatcatcggtctcatcagaaccttctgtcaaaatattttcccaaatttggcgataatgtacgttatgaacaactctccaattttgacctctaac

SEQ ID NO: 231688 - DNA, 877 bp, Cannabis indica
tttctatttaagggatttgatttcaacttctaatttatcagtctccttctgttgctgtgctacaatattagaaacttccattttcttcctgccaaatagtttagatgctctggtaaggaacttgcaaatcaatagaaaaaattagctatgttttttttttggtataactaaggaaacaacatttctcaagtactagcatacctagcagtcctgacatgtccaggatgctatagtgtactgagtgcatgcgttaggatatcgttttggccataaacctgaatttgtccctgagtaagttgctcctctaattgagcctaatgcaaatattcaagcaattattatataaatcatatatactaactcattactagtactcaattaaggactaatatatacttactatttttttggcaatttccttgtcgtaagtagtgacaagtttcgttctcttggtccaagatttgatccacacacgatggtatgggggaacttgaaccttgaggtcctttttctacattattttataacaattaaatgagtatagttatattttgaagcacattattaaaaatcattgattacttaccacatcttcccttacgttcaccattccactcccaactgggatgtttggattggatttttactgaatgttcctttgcaccttactcaattcgtacaattccaaaaaaatacattagatactagtacttagtacttgtatttaagagtttatcttagtacaaatataattagcacttgcaattcaagagttagtcgattttcagcaaatttcaacaaatcagtaaggttaatttctagatgcttctcggggacttctgccagtcgttgctcatatttttcttctaatgcgggc

SEQ ID NO: 231689 - DNA, 1872 bp, Cannabis indica
gcgatttcatatctaagagcgcttgaatctttctatggatttggcttcaatttcctcaggcattgacaataaagcccagaacttagctgaatccaaaggagcacttttatgggattgagtttcatgttgtatttcttgaggactttgaagcattcgtctaggtcatctatgtgtcccccagccttcttggatttgacgagcatgtcatccacatatacttccatgtttcgtccgatctggtctttaaacatcttgtttaccaatctttggtatgtcgccccagcgtttttgagaccaaatggcatgactttatagcaatatagacccatatctgtttggaaacttgtatgttcttggtctggtggatgcattttgatttgactgtaccctaaataagcgtccatgaagcttaatatttcttgcccgactgttccatccacaagctgatcgattctaaggaatggaaaataatctttgggcatgccttattgaggttggtgaagtcaataaaaactcgccattccttgttcggcttgggtacaagtacgagatttgcaacccaagccgtgtagaaagcttcaattatgaagttgttgtttcgtagcttcactacctcttccttcagggctacaacttgctccttgtccaacagccttcgcttttgttgaactggtaggaagttgggataaatatttaggacatgcaaaagtaaagaaggatcaactacgaccatatcctcatgtgaccaggcaaaaatgtccaggtttgctctcagaaattatatcaatgctaattttacttcgagcaacaaaccttttccaattttaagctttctagccgaaatatctgggtcgatcttaatctcttctgttcttctagttcttccacaggtccaacattggtacttgggtccccaagtcaaggatccacatcttcatccccgccttgggaagttccctatttagaaatgtcttttcccctgtccgagctctggctagaggatacttccttcatagccttggctatggcaaggttataatattcccgagcaacttgctagtttcctcttaggcaccctaccccattctttgtcaggaacttaacgcatgaatggaatattgacataagagcctttaagtcatacaaagctgatcggcctaacatgacgttaaaggctgatggaacttccaataccaaaaattgggccattatagttatgcttgttggagcttgtccaacagtgaggggtaggcaaattggccctaaaggtgcgactccttggccagaaaaaccatacacgggctgaagacatgggttaaatctttgagttggagccccatcttttcatacgtggtcttgaataagatgttggaagaggctctattatctatcatggttctggtcaccatcttgttggctatctggacttccacgaccaacgggtcgttgtgcggaaatctgatcttggtagcatcttcatcattaaatgttatggtgggttctcctgcccgtgggatcttcggcttcctttcttttacggccaagactacttcttcttgctcgtgctgtactgttcggggatacctctccccggctttgcctgaatctccagctatgtgcggacctccaataatgacttgtagatgtccatctactggtggtggtagcaagtcttggtttttattgcccctctgattctgatcgaccttgacatactttttcacgtgtggattatttttccttatcagttgtttgatttcctgctttagattgttgcattcattggcgtcatggccatcatccccatgaaaacgacaaaacttggtcatatttctcttactggtcttctttttcatgggtgcgggcttcttg

SEQ ID NO: 231690 - DNA, 2082 bp, Cannabis indica
ataatttgaatcatacatttgcttttaagaattgctattagaataaaaaaaaaacaaattggttaattggcagtctgatttccatatcagacaaaataattaattaaaataaaatgagataaaaaagattataatattacaaaacacttatattcatttaattgttgtaaaaagttcattcaatctcgtagcttgaatactcaactattataaggtatgtaagtgcaccaaaaataatccctgcaatcgtagataacttgttattctcaactgctaacagtaatatgatggtgagccaccaaagaagaaaaaggcaaaataaaattatacagagacaagactatgacattcaaaactatctcacaaagacaaaactaattgaagtagcaaaaacacaataacctaatcgcaatagcaaaatcacaaatcccaaccaaacaacacctaaactcaaggagggtggatgggtctaaccaaagaaaaagataacctctaatagttaaggatttaggaacatctcttttcttattaaaacaactaaacaagtacaaaggcgatattgggattgatagggatactggttggtaggcagggccggccctaggcataggcgcgctaggcccgtgcctagggcccacactttccggggcccaaaataaaaaaataaaaaaattattaggcttttatttaagtaaattttaagtgtattataagcaacaaatattcatagcttagttagttaaggtaaaagacataatgtccaaggtcatgggttcaaatctcataatatttttcttttgatatttttttttatatatttttgagaaccccaaaatttaattcgggcccatatatttttagggccggccctgttgataggccttcaaatcccaaatgattagtgcaacatctgttttggaagctaaacactaaactgagggcaattttcatggctcatacttgggcagaaaaaaaaagaatagaggagcatccatataagataaaagtccaagctttgtctgagaacacactctctaaattggaaggtttttaatttcttttttttagtagttaatttaattaagaaattttttgtttgtaagtttttttatattaatcgtagttttaacttttttgtggatggtgtagctaaatgtattagagttgttaatcaaccaactattttgtgttaagagaagggataactcctgtaattttcatttatttttcttaatcaataaactcgaggttgttttaaaagaaaatacaaagcaatatcaatcgagctttctttttctttaaataatattggatcaatctcttcaattagcacttttagagtaattgtgctttccaatatattttccaaacccaactatcaaattctctcttaattaataatactcgaattttcctagttacaagtacaactaataaacttttctcaattctgatttgatgaattgtctttcttatcttgttattgctttactatatatatatatataaaatcatgatcattgctactcatccaagaccaagtatatatgtcccacgttcacacaaacactttgtatatatatatatatatatgatcaccacagtacataatacaacacttatataagaacttctacattaaatttaagagaataatgttaagttataccttaaggtgctaagtaaggatgatattcggttattagtgcaatttaatatcatgttttacatatttttatttattaaataatattaaaaattactaactactcacaacgtaacaaataattagtataatgttgggcatcttaaaatgctcaataagaatactctaattaaatttaatcgcacatgtaatgtattacactatgcataaagagaaatactaaaatgcaccattagagtctaacaacctcctcgatatcatattattatttgtgtaattaagttttgaatctcatataatttaaaacaataatttttagaaaatattacaaatgccacttataaataatactaggcgccactaatactcaatagatgcataaaacatgtttttaaatatagaaagttttaacaaaa

SEQ ID NO: 231691 - DNA, 635 bp, Cannabis indica
agagctcctctagttcattttactttcagaaaagtacccataaggtcaaagcctctctctctctagtttctctctttagaaattagagtttgcagacttggttatttttcttgtaattaatctcgtgagaataaaaacttgaagtgaatgtagatccattactgtcgcgacataaggagtgaactactataaattcttgtgtgttctctttttttttatatagttacatctcactttcatctcgtctataagcgagttgtctaaatttctgggtatatatcatttcaaaataacttgttttaagtatgcaaaaattagacttcaaaataatatattttcgtattcacaatactcaataatttaaaatttctaaaagttaatgtatgatatgttataattaaatgtataatatttatggaatatatgttttaatgaataagataattttattatggttcccatttatatggtgcctttatagaatttataaaaaaatagagtaattctatttacaccctataaatacaatatataaggctattgtattcttactcccgagctattataattattaattttttttctctaaattttctcacttgttaaaaatttctcatgaattattcacaatgaag

SEQ ID NO: 231692 - DNA, 683 bp, Cannabis indica
aacacgggatttgaagctagagaaccagcaccgagattgtcacaccataaaataggacatgttgaaagaggtatgccgagttcagataacaaggattgaatccaaatcacttctgaagtggcaagagcaagagccctgtattcggattcagtgctggaccttgcaacaacttgttgcttttttgaacaccagctcaagagattgttgcctaagaagatgctgtagccagatgttgattttcgatcatcaagacagcctgcccaatccgagtccgtgtatccttggatttgtagagtctgaactggtgtgaaagtgagccccaggtgagttgtaccaactaaatatctgagaacacgtttgatggccccccagtgttctgttgtaggactttgcatgtattggcttaaccggtttactgcaaaggttatatctgggcgtgtatggcacaggtattgtaaagcccctataatgcttctgtattcggtaggatggggcaggggagtgcctgaattctgagacagcttggaagttggacacattggtgtggattggggcttggcatcaatcatgttggtgcgaattagaaggtccctggtgtacttgtgttgactgagatgtatggtagtgttgtctctgataacctcaaaaccaaggaaaaaactaacgggtccaagctgttttaa

SEQ ID NO: 231693 - DNA, 792 bp, Cannabis indica
gagaaattgagaatcattttctgtttcatcggatttgggaaacaatatctaaagaaaaggcctctgtttttgtgagatgtgtgtatgtggctaccttattgatatggaaaagaacagaagcataaaaatgattggaaccaaaattttaggcaattcttatttgaataaatcccataatttctttgaaaggcaatgcatagccaaagcctaaaccagacaaaacaaagaaactgtgacaacagacacaagccagtgcagctgtgaacgaacaaaaacaggaagttcgaaagaaaaacaaagctcacagtgaactatagctgaatcattttgaagatccctctttgccaacagaaacagatgcccttaaatatatagttgacaattctgcagcagtcaccagccataccatagggccaagattagaggttgaagcactctttcaggcgatggattcccaatctagagcacaacataacacactggcttatagcttccaataattatgcaaaaaccggctctgacatacagtcttgataggaatggaagcagtgcaactaagattccaaataatccataagtgaacttttaatgggtacttagatattatttagaaaatttgagtttctatcttaattttgttagggaaatttgattttctatacttagaaaatcaaaaaatttgatttctaaaccaataatttaaaccctaaaaaaactatacttttttttcaaaaccccaaaataccccaaactaaaactaatccactctttctctctctatctagccggtcc

SEQ ID NO: 231694 - DNA, 1178 bp, Cannabis indica
aacattatagggttgaaaacaactaacgctaaagtgtatcctatgacgtcagttatatacaaatataattgacgccatatgcactaataaccaacgttaaaagcttaaaaaccgacgccaaattcataataattgatattttcagtttaaaacctactattaattcaaaaatatcatttatttaattattattttttaatttattataaatattattaaatattaaatatttaatttttaaaaagctaaatcaaatattatttgaaataattttatgattagccagtatacttaaattaattttatcgatgcaattaaaaaaattacaattatattacaaaaaaaaataaaaaatagtccatgtgttaacaagttaataaatctaattacaacttaacctaaaaaaataagctaggaaaaaaagatcttatacatttcagcatcaatcgcccaagccttcgtgaatcaccgccagcaatcgttccagccattgtctctgtaatggtagcaattcaatttttggattgtatgtctacttttccccaaattataaaaagaagtaaaatttatattactttatatatattattctttgttaatataataaatacgataatgaataattaaaacttacagctttttgatcgtgtttataacagttagggtttgcctgtgcgacaatgacagtcatatgtatttcaaagcataaaaaccacattcttagtttttaggttgtcttggacaatttgatagtaagattttgggccacaacccaagatatgcatttgatgcccctataatctcgtatgctcttttttaaaagttatattaatatttcaattcatcaacatcaatatatataacttagttaattaaaagatttgttacattaagtgttgatagtgagaactcgacaactaagttagtagtcggaaaatgcaaggttacccaaaaatgtgttaaagataagataaagatgacagtacaaaaatttctgaatattcttctctatattgaatttaatatctgagttacacaaaatgatttttcaacccccctcacatctgagatgggggtatttatatgctataatggctgcgtgtacaaagaagtcccatgggacaagatgtcgctttcccgttgcattttgtagtgctagaggtagcttagcaccacgt

SEQ ID NO: 231695 - DNA, 847 bp, Cannabis indica
gtagagtgagagagaacttccgaattccaaagaagtacatgaaccgttgtcaggaacttagcaaataatcattcaattttatatttggtgctctttatgccaaatggacttgctctaatatgaagggagaggtacatatctatatactttatataaataaaacagtttttattttttgctcaattataaataaaacaattagttgttatactgtacatattacttattttatccttggttggtacttgaaatttatagagctcccatagcagacacatctacaccttgagttaaacttaattgcagaacatgtttatacttcaaatgcatttgttaccggtgtcgtggttatttgccctacgagagaacttgcaatacaggtaaaaatacatgtttgttagtgatgcttaatttactccctccttttcggatccatgttgtagaagattggctctatttaatatacaacttctgttctgtgttggatcatagattcatgatgtgtccgatgcactttcctattacaatagcattagtggctttggttgtatactttgtttaatttgctttactgcaatggtcaatccttattaactaggaacttaaaaaatcaaatggatggtcaatggtgggcttccggaatatattatttactttgtgctaacatggggaatgttatgataatccatatgaattataagcttgtaatgtattttattctatggcgccaaattgccttttattttctgttggttgtttgaaattgcagccggtgctcatcaaacctctcgtttccatcatgaaacttcagctgagagtataattgaatattatagatttaaaattt

SEQ ID NO: 231696 - DNA, 2263 bp, Cannabis indica
atgggagcaagtgaagtaccagggtgttcaacagcttgatctctgtcttgctggctgttgttctcatcagtttcagcatctatggcagcagggctttcatcttgaatttctatgttttcgaaggcataactgctgtcatgatcactgtgtgtgtgttgttgaagttgattaatatcagaaggtgcttcactggtgctaaggatggagtctctatcagttgtggtgttatcatttctgtttggcttgacctgtgtttcgggtactggtacatttagggatgctgaccaagagggaagctgaacttgaactggtttttcagtttgaaaattattgagaaatccatgtttaaatggaaactcattttcattaaaaatcacatttcttgagatgtatactctcccagtactgcttagacacttgtaacctttgaaattttcactatatcctaagtttacacacttggtggaatgatattggaacttgtgtgtttggtaaggtcttagacatggataacaagcaacaccaaaggtcttaagatatttgtaatctggtttcttagagaagagagtttccatgggagaaatgttacctaaaacaggtgttggcaacctgttaataaggtatacagcagtaaggaaagcatcacaccaatatttcaaaggcatgcttgcttgagcaaggagagtaagacccatttccacaatgtgtctatgctttctctcagctcttccattttgagctgaggtatggggacaagagtgttggaaatcaataccactctcaatgacaagattagagaagggttgatattccccaccataatcagatttcagcttcttaattttcctgttgaattgattttcagcaagattcttaaactgtgtaaaagcttgaaaggcatcagacttggcttttaatggataaagccaagtatacctgctgaaatcgtctatgaaatgaatgtagaatctgaagttagtgttagacatgataggggcagggccccaaatgtcagtatgcactaattcaagtggatttttagctttgtcatgattcaatttgaaaggcagagcatgagacttgccatattggcaagcctcacaaaaatgaaactcatcattcttaacattcttaacattcatttgattcaaaacaatgtttaaaacatgattggagggatggccaagtttcctatgccatttgtccttgattgaatttaaactagacacactatcagtcacagactgatttacactttgattaacaacagaagacaaagcagaaaaacatgtagatttgggctgaaaaacaggtgaaacagaggcactttgacaggttttgttggatggcttgacatgggttgactcgaactgatagagcccttccttaagcttcccttgaagcactttcttctttgtttggttgtccttcacacaacaatgatcagatgagaactcaacagtaacatcattatcattagtcaattttgaaatactaatgagatttttagttatcatgggaacatgtagcatttctttcaaaacaagaggcctgctgtcattgttagttgaaataaaaccagatccgatgtgctcaatagatagcttattaccatcaccaacaattaaagaatccttaccagtgtattttgatttctggtttagatttccagcttcagcagtgatgtgattgctcgcaccactatctgcataccaagcatcatcttgaagcatttctggagtagcaacaaaggcagcagcattttgtccagatttgctattttcatttgcacttccaggtggtgtagttcccataaaagactcatcatatcgattgtaacaataggcagcagagtgtccatatctcccacacacttgacaagtgggttttggaccacctctgcctcctcttcctcttccatttgaccttccacgactgttactgttgctgttattgcctcctctgcctctcgagtttcctgggttgtagttcccaccaccagtttggcttttgttagcaagattagctgagggagaaccattgtttccatgcttgttgtttccagaaaacgagctaagtctgtcaagcttactgtcaaaactcagcagtaagtcttgaagaacttgccaagttgtcttttctctagcttcaatctgtaaaacaatgggcaggtattccatgtccaaaccagagagaacattagaaactagaagagattcaggatatgggtcacctgctagtgcaagaacatcagcccattgtt

SEQ ID NO: 231697 - DNA, 1109 bp, Cannabis indica
gatgctcataatgattttctacttcaagagttcactaaggaggatgttttttctgctttacaaactatgggtgcagataagagtcccggtttggatggtatgtccgccatgttttatcaacataattgggaagttgtaggctctttggtttcacaagttgttttacatgttctaaatcatggaggtaacccatccgctattaataaaactcttatcactctcattcccaaaatgaagaaaccgaagacaatgaaggactatcggccaattagtctgtgtaatgttatttacaagttggtttctaaaatgattgcccttcgactaaagcatgttctaccaaatgttatctccgaaactcagagtgctttcttgcccaatagacaaattactgataatgttttagtggcttttgaaatggtgcatagtttgaagcatagaacaagagggaataaaggttatgctgctttaaaactcgatatgagtaaagctgttgatcgagttgaatggtcttacattgcagctgtgatgggtaaaatggggttcaatattcgctggattactcttattatgacttgccttcacactacatccttttctttcctcatcaatggtgaagttaaaggatcggttactccagaacgtggcctacgacaaggtgatcctttatctccttatttattcttgatatgttcggaaggcctttctaggttgctgcaatacgaggaatctattggtaggctacaaggattagctatctctcgaaggtcccctccaattacacatttgctgttcgctgatgatagtctgctcttttgccaagctaatgatcgttcctcaggtgctattaaaagagctcttgatgtttaccatcgagcctcaggtcaacttctcaatgaagacaagtcagttttgtctttttcaccaaatactccagttacaatgaggaattctttcagtcaaattttgggaatgccagttagtgattgtcatgaaaaatacttgggtcttccagcttattcggagcaagataagaagcttttgtttgcagaaattaaagaaaggatatggaaattattacatgcttggaatgacaaacttttttctattgg

SEQ ID NO: 231698 - DNA, 1041 bp, Cannabis indica
cttttataatctctcaagagagttgggtaggaaactgcaagtgagccaaatgtttgatgatcgagttatcatttggtgcgaagatgagatcgaaatggagagattcttgaggaaaggaaattggaatattccaggaacaggagatactaaagtcttctgtaagagatggtcaatggaagagcaaattagggacatcaaaattgaatgccgaggttcttggattggcgtcaaaggcatacccttgaatgtatggaacatgaaacttttcagaaagattggggcattgtgtgggggactgcttgatgttgaaaaggctacagcagaaatgaattttctccatcatgtgaggatcaaacttgaaggggatagcaatggctttgtgccagaatctttgaagttggattttgagaattctgtatttaagctagagttatttaagcttaatgatttgggatatagattcagtggttttttcaatacatgctggcatcaagactttgaaataggacagaggttcgaagatgaaggggagatgatcggggggacgaaattcaagggggtttccagggacatggaacctggccattttgaagaagtcgaagaagaagggcggaccaatgaatcgggtagggcatctggttgtgagaaggaaggagtcacctttttgccggacttcgaaacagaaactgaggtggaagatggcagcgatgaaactcaggtggaggcgatcatcacgatgataaacaggcctcaaaagacgacgacaggttcacagaagttgtatcgatcgtccctgagaaacattcggagtcggaatcggagtacactgcacctccgatggttatggtaaacggcgctcatccagggaagcaattattggagataaaagttagtgggattaccgaggttgattgttgccgcatgttcatcgtaacaagaagaggtggacttcccaataaaaagaaatttatgaaaaacggcttggtggatatcaagagaatttttagccgattatttttggatttaagctatgttgacaga

SEQ ID NO: 231699 - DNA, 778 bp, Cannabis indica
gaagacacacaacaatagaaactatttcagtgggttcattcaatctcttaccttccttacatataaaataaataaaaaaggaaaaacaaattctagcttcaacactcaactattgtgcaagttgcataagtacaccccttcaaccgcaaaaaacttattatttccaaccactaacaaatgtttgatggctatctatcgaaaaataaataaagaagatgaaacaacaactcagtagcctaaataaaaagatatttaaaaccatttcacaataacaagactaatcgcagtagcaaaactgaccccgaccaagccacgcctaaattgaagggttggtggggctggctgaagaaaaagaaaatctttgtccgctaaggattcacctaaacaaatctaaattcatcaatttattactaaaacatagttctttaatctacttaaaaactcatcattaagtctaagttaatgcttttttttggtttgcaagctttaagttaggttttttgtctaactaaaagtagatgtcatatttaattttaaattgttaattattaattttttttataaaaattaaaattataaaaatggaaaggcagtttaaaattttaaaggaaaaaaatgataaatattattttagaccctgtattttataaaaatatcaatgggactctttattttgttaaataaaaaattagatcctgtatttttcaaaatagtacaaatagtacattgagtttatttttttatcaaaataaaacttaataataatctgatctaccta

SEQ ID NO: 231700 - DNA, 587 bp, Cannabis indica
cttagccaaaacatcagcataagtattagcagatcgcctaacatgagtgatctgtgctcgtgggaaaaaggatactaaatagtttacatcgtttaaaatcaaatgaaaagcagaattacatatatgtgctatttttaaaccttgaaccaccaataaagaatcagtttctatgaaattaattgataatccaagattgacagcccatttcagagagtgagcaagagctacagcttccatttcttcaggtttgaaacacccttgtattggtttcgataaggcaacaactataactccaaatgagtctctcaccacagcaccgataccaattttacccaaagctttattacatgcagcatcagaattcaatttaagtttgccaagcggcggggctgtccatagagcagttggtgatggcaatggtgtttcttgagtcactgaagcccgtgaagtagttgatgtagcagaaccagcattgtgcaaagaggaagcctgagcattttgatatttcagaaggtagttggtagcaaaatccaatactgcagcagccttctttgatggtttattatggtattcagcattacgttcaa

SEQ ID NO: 231701 - DNA, 946 bp, Cannabis indica
atatatatatatatatgtagaagtcacttctcaaaataacccattgcagatgatgagaatggtggtatttatagatcagggatatgaatccaaagtcgatggctgcatcaacttaagttgtaaagtcagttacaactcaacaaactcctcgtaatagaatctccatgtcagcttaggaaagatcttctccagatgagaggcacacttcatggatgaatgttcaaggcagacaaagtgtgtcccttaaagtacgtcaactggagcagactatctagaacatcctttcaggagggaacgattagatttttagaactctttttcggaggaagagtagctttccagaagattccagctagaatggacaagctagacttccagaactattttccaaacaacatctagctttcaatgagacaactttcggagtggacaagctatactttcgaaactccttttcaaacatctagctttttacgagactcttttggagaccttttcatttagaaaactattccacaataaattttcgataaggtagtgtgactatatttgttcttccatgtgatcatatattcaatatttttttttgttatcaaatgtacattcgatataattaacagtttttttaggagggaaggaaggaatataagtgaattactaaaacatatctaaaacatttaaggcacatagctattgtaagttaattactctttgttaaaaaaagagttaattactcttatttttaatcggaaccaaatttggtttgacttgaccatcttcaataattctactattttggtttacatttttttcaaatttagtggaacaacttaaatgactaacaccaattgaccacactaaataaaaatatgttgcataaaaaatcttacattttatattattcagggatattggcatctaaaccacctgaactttacggtttgta

SEQ ID NO: 231702 - DNA, 588 bp, Cannabis indica
ctcccccacttcaacttgggaaagacttctctcttagagaaataccccttaagatatagctcacaagctaaccgcatactctcatacggttcctccattctgcatttcactttaaagaagatgctgaactaatgcctcggtcattttgactctttgcccctcgacatttcaatgttgccttagtaccacagtcctgctgactttcaccttaggccaacattgccacgatgttatcttagtacctgagtcctggagactttcaccctatataactggcactgcctgtgtcccgagtcttctttactttacatcctgaacaacaatcgatctccatgatacccatcttgatgcttgtaatcaataactattctgttgagtgaaccgtgaaggtctctccccaacttcaattgatggcgtcctcgacaacatgcccacatgcaaatgtctgaccgccccaactcttcatgcgcaccatctaaagtgcatcctgcaggatgttctcgagtcaactaactcatatagcacccctgttgatttccatatgcatgcattatctgcttaaccttctaactgattcacacttgcatc

SEQ ID NO: 231703 - DNA, 832 bp, Cannabis indica
taacaatgctctataacaaaatgtaagtaaaaaataaataaaatataaaattaacgcttaatacttaatatatgttttctatcttatcaacaaagtatataactattttattataattttttaattagctcataaataataataatagactatttatgattttttcccccaacattgacttgtaccaaattatactccttgaacttttcaacacgtacgtaaaaaaatttctttgaactattgagatcgttggactaaattttttttgtttaattttactaataaaaatcggacgtggatgaaagttcaaaatgcacaattcagtacatgtcaaagtttgggggcaccatttggtagatattaaacttcaagaggcacaatttagtacatggacaattgttagcttaataaaaatgaaagaaatttgaccaaagtccttgaatccaacaatctcactagatcgggaaaattttttaatgacatgaaaagtttgagagacatgatttcgtacacgtcaaagtttacggagcaaaaatcctaattagcctaaacaataataatacaaactattaaaaaaatatatatataattatattttaaataagaaaaattattttaaagttataatttttagctaagtgttgacctcgcttttagccaacaacaatgagtcttgataataaacgataaaggatacaattcagatataatatgaaaagataaataaagagcacaaggtttcttaaagaggttcggccccgagcagttcggtaattgttggaaatattttaccaagatctagatttactaccaagtatgtttcattaacatc

SEQ ID NO: 231704 - DNA, 588 bp, Cannabis indica
agatttcctagtcaagcctactggttttttggtgctgcatccctttctccctttctacttttaattagtgatttgatcctgtattgttagtgaaaaggaccactcctcttcttatgttgtaggccaagacaagactcgatgaaggtcaagaagcgaagatggagtggcacagtttcttaacattctcaagcttttaaattatagggtgatatcctattaatggatcgggcgacataggtttatttttgagagtaatcattcaaacatcattagaaacagtagaattttttttacttatatataaaaaaatgtcatgttctgagaggattcattgatttagagatacatactgatgttttccacagtatgttaatgtggaataagcttatattggctttgaatttataacttctttcatttgataagctattacatgtgggcttgactgttggtttttcaatctatgctcttaaataagtcattggcgttccaaattcttcattatgtaattttcttaaactaagaatgttaggattcgatgaggttgtcactgatctattttatttaatcagcttgcaatgatgatgt

SEQ ID NO: 231705 - DNA, 863 bp, Cannabis indica
atatgggaattcgatatttgcaattgcaactaagttgtcactggctattggaagaatctgattaaagagaaaattaagagtgtcagaagaaaaaaagaaagtaaattgatctttatttttttattaatttttaattttataatatatattttttaaattttggagtctttgaaatgatttttttaaaaataaaatataaaaatctacatggaccaattacaaattgacacgtaagtagctactgatttgacacttggcaataagttaaaattttaactttttaaaaacgttttaaagtaaattaacgagcctctcctataacatataatagacataatatgtagaaggctcaattgaaatcaacaaagagctttgtatatactccataataatcgaatcataaggcatgggatttttatgtgaatcatcatcaaaaaaatttattaacaaaataatcttatataacaactatttttacactctgcaatcataaattgaacttatcttacaaattttagttttagtatttgagttcaaaacactaatggagaaagcacaaattttagtatttgctcctcctactgctaccttttttcttttgtcattatgtgcttttctttcaactactactgtactattattatgatcaatactttgataaagtctccttccaaagttgactagtcaaaatatagaatagttgacaattctccttgcaaagatggagttgttatgtctttccatttttttccattgatttccattctagagagagagaagatatggcagtaggagaagcttttctatgtgcatttctacaagttttgtttgattaattaattagcttctcgtgagtttatagg

SEQ ID NO: 231706 - DNA, 1035 bp, Cannabis indica
ttaagtatttaatttcatataatataatttaagtatcactagtaccaaataacaatattctacaactaaataactttaatcttcctggtatttttgtagacttcttcaatgtaatgaccattggtcttattttatttttttatttatataagactaattagtaatttttttccttaaactttgacatgtattaaattgtgctccctaaacttttttggtcgttaaaaattcttcctgaactattgagattgttaaatttaagtacttttgtctaatttcattcaattatactgtttcagtgattgtttatatactaaaacatgctcctcacactttgatatctactaaattatgtccctcaaactttgatatgtactaaatcataccccttaaactttcatctatgctagaatttttttactaaaattaaacaaaattccttaaatttaacaatctcaatagttcatggagaatttttaacggcgcgtttatatattacaaccgtgttttacacgggactcgaacccaggacctccaagacacacacacccacctatggccacttgagctagcatcaagtagttaaaaaaaataaaataaaaattgaaggttcaaaaattagaggtagaaaagaacaagagtggagaaaggcatgtgaagtgtgtgaggtcagtgttggttgggacccgctgtcctgaggtttatatagtctgccaccttgcctacatctccgccgagcttctctctcatctctcttgtcactttccttttcaccacttttacagaacctcaaaaatctcaatatacatacggtcccaccacatttactatatctatatgcaaacttaccaaacactacttactccaacccattctttcacttttatatatgacgatcaaatttcgttacttacatatttgttcaagcttattatttgtttttgggttgtaaaggagaagcaaagctatactgaattagtattggttatcatgcatattgcatagtactgactactgaacaagcatgaagaaagg

SEQ ID NO: 231707 - DNA, 758 bp, Cannabis indica
aataaaaatgttttgctgggattcttaaaagaaaaaatgaggaaaaagatacagagttgggagggaaaattcttatctaaagcaggcaaagagttgctcttgaaaactatggctcaatccttgcctagttatgctatgaatgtcttcttgcttcctatgaaaactgttaacgaaatggagcagttaatgtgcaaatattggtggaagtcctcttcaaagaataataaagggattcattggaagagttgggataagctaacggttcataaatcaaaaggagggatgggttttagaaaccttcatgattttaatctctctttattgagtaagcaaggttggcggttgctctgtaggcctcacacacttgttggccgtttgtttcaggctagatattatgtgggaaaggacttcttgaatgcagaattgggaagtaatcccagttttgtttggcgtagtatctttgaaacaaaggagctggttaggatgggggcacgtacgcgggttggaaatggttctgaaattaatatagtttcatatccttggcttccttgtggtgagaattcgagaatcagttcgagtcatcgtgctttgttaaatcaaaatgttgctgctcttatggtcactgattgtttagcctgggatgtggacttggtgcgtgatttgtttaataaatacaagggatactcaactcatattaagtattcccttaaattaaagtcgtattgatgatgtttagttctggtcttttgagagctcag

SEQ ID NO: 231708 - DNA, 873 bp, Cannabis indica
gcgcaattggcgccggtaaaagccttacagaattggacatgtgttcgcgccatttggcggttcagtattcatcttttaccggcgcatttcattgcgctggtaaaagttatagctgaatccaatcccaaattcagcatctcatttatgctgacaacttttgtcggcgcaattggtcaactgcgccggcaaaagtggcttttcttgtagtgtacaaaaatgcatacaaaacaccagcagcaactacaacagccaacaactcaaaacatgcataaattcaatttcttaaaactaaagaaacttaaaaggataaagtcaagagtttacctatagcttatgaacacttaatccttgtagaaacttgcttgaaatgcagaaaatcacacccaaactctagttggttctagggatttcgagagagagaaagagggagtggaaagcgagagtcttttctagttttttccaattttcttattttattgaataaatgaaaaactaaacttgttttattaaaataaatcttagccataaagtaactaaaaatcagattgctttattaaaataaagtccactaaaggacaaaacgcaaaatgggtaaaaagaccaaaatgcccttgcccttactaaccaatcataaaatcggtatttttggaaaattctaaaatcccgactattcctgacattcccaatgtctaactttatttgtaacgccttgaccctcagggacgccacgtgtgtgcttttataaacttattatcactaatctataaattttagaaaagtgtggtttaatttaaatctttaattaaattcaaaataaagacttccattttaaatagtattgtaatatagggattccctgtttataaaaaaaaa

SEQ ID NO: 231709 - DNA, 689 bp, Cannabis indica
aatcaccacgatattacaaatgatgcttcaaatgagattcatttttatttcaatttaaaacatgccaaatgatatatctcacgaattaacatgttaaacttgtaaagaggaaaaaaaaatgtgacctaatcaattaacaagtgagcaatgagcaaataaccaattcatttaacttcacaatgaaccatactttataaaaggataagacaacttcatgcaatccacatattcacacatgctttgagaaagataataaacaagtaattttcaaaaggattttgaatcaagatttttcttatgtgtgtgcaagtgacctcatgtgagaacattggctcactctctcgtattttttattaagctgcccatttttttttcttttgtgccttttctatctttagtcactacagttctttcttttgtaaccagttacgacgctttcactctccctcaaagatgcagctatcctcttttaatcagaaatactaatatagaaggagcataccacttattagtaaatggactaaagagagctcttcccattgcatataaaagaggaagcctttttagctaaaaaaaaataaaggttaaaaacatcctaaaaaattcacctggttagagcttccttgaaagaactggagaaaccgtagatgggatatgaagtgcctcatgaaaaaaaatgatagcaatca

SEQ ID NO: 231710 - DNA, 1287 bp, Cannabis indica
gagctgcccactttgttgctaggcacgctcaatccttatttggtcctagcattttaagaacttctattcctactgatctctaaactattttgtacattcacaatgctaaattaatgaagttgatatttagggttttcggtttatattatgtatttaattttatcacaatatatttaatctatacatattatattatttacaacaaataatataataaatgacattaattataaatcattcaactcattaatccttttgatatagaacctatatatagctaatatatcttaagctaacacacatagtacactttttttattattattttattataagttgataagataaataaaatttcttatgaagattagagagacagaacctgagcacaactagtggaccatcatcaaggtgagggaaagtgggtgagaccgcccattattattgccagattattggaaggtacttttaaattttaattgataaatctaatcttcttggttgtgcttacagtacgagtgccaccacatataatctatagatcaatagcatttatataaccctagcttaattagtgattttttatatatatgtttatacatatatgtgtgcgtgtacatatctgtcagcctgtgagaggctctgtcaatattttgtatatatatgtatgcataattaagtaatagtatgtctcctctaccccagggacaaaacaaggccatcaaattaattacaagaattaaaggatattctaattagaatatcaaggaaatgtttgtttttaatatttatctttaattaggtttttttttttaattcttttgtagtatatttcgttttcacttgtacacgtaactaaacatacacatggcacaagagcttttgcatgcagtgcgtaacctgtgtttattattatttttttatatatataattaatataatatatattttatttgcttaatgcagcaaattagaaaagcaaagaatgttaaataactaaattatatggacatggtagatatatagctatatatagtattatagatattgaatacgtgtcatatatatcatatgctcgttctgtatagaattaaattagctgggttagtattgttttatattatttagctaatgacgtttttttaaaacaaaagctataatggtttgttgaaaacatatagtttatttatatataatatatagacgacacctactttctataactggtaataatactatcgttctattaaataattgtacatctaaaaaattgtaaactattaatca

SEQ ID NO: 231711 - DNA, 870 bp, Cannabis indica
ttaaataattaattctgttatgagtataaaaagagtttaaattgtcataggtggataccacaagttaatttataatttgttgaggggtcaaattataaatactcaaaactcattatatcatgagcctataaataagtaatagtccctaagaaatattatggttcttgtattttctgattccccattagagaaaatactttaaagaaatagtattagggatgcacatggggacggggcggtgcggggaatgcagtccccgtccctgtcccgtccccgccttttattatttgccccgtccccgattattccccgacgggtaatagggcgcagaatgcccgtcggtaatagagacaataatagggaccgtttatctaaaaataattaatttctagtattaataattttaagaatatttgcaaacatcaaagtgaaacaagtaaccacataaaaattcttcattccataatctataatcatgcacaccacttgcaactacgacaaagacactacttacaattgcagagaagaatatagcgtagaagtgtgggattggttaggacataggatagaaagaactagagaaaatatatatgagatgagagaatctttatagagttccaacttcttcatatttatggaggaaatactattcaagtatttcttgtattcaaatactgggtggctactgggtattaaaattctaaaacaattaacatatgcgtagcacaagaatttataaattaaaatattataattttacttatatttagtttcttatatgtatatgagttaatgaaggacattaactaaattataggaaaataagcctaattgttagtaattgatacatatatacgttattaaatttca

SEQ ID NO: 231712 - DNA, 1258 bp, Cannabis indica
tctagtccgatgtatacccaatacaaccaatactagtatattttgctaatgccctggaaagaatatttcacacatcattgtgtaagtaaactttatcgccgattatgatgtcagtgtaaattcagtgcactgataaatcatgggactaaatactttgaagcatatatcatgattatttttcactgtatagacaacactataatcatgaatacctatatattcaagacttaatagaatttatgcattaaacatataatcatgtaagtaatcatgtgaaccatgcaacacaaaataatttctaatcttttattaatttgtaaatctgattatatttaaatgagttttatttagggcataaaatctcaacaaactcccacttgcactaatataaaactaaaagtacttttcaattaatctcaacatcttcatgtccaagtcaaatgtagtatgcagtattatcattttaatagtatctgacatgttgtattcaataccaaccttcttcactattacatctctttagtcacaaaatccttaatattttgaaattcctttatatatgtttactcctcttagggtataggattctttactgtttggaaactatatttgtgttatgacaaagtaacactagtagataatccatgactagaataatgctaaaaactatatagaacttaccataggctaaatacttatctactagcctgttgggcctttttaacattcaatctcactggtggagttaggaactccgaataggtttttatacttctctaaaaatcaatgttttacccagagagtaatcaccatcccagatttaaactttctagcattaatgcaaatctagaaatctgagtcaatgcagcataaaaggttttgaaaacatcacccttataaactaacatataggtcctcctcaatcttaagatttatttgatttccttccaatgaacttttcctagattaaactgatatctactcataactctcacttaacagcaggtgtctggtctaatgcataccagagcatacatgagatccctctcactgtcgatacttaaggaattctttccttggcatttatcttttctagaatagttaaaaatattccttagataaataaactctatgactagaagccaaaagacttcctttggagttagtcattagaaaaatgctctagcatcttactaaagtaagttacttgtactagagtaagttaattacaaggtataccataagccataggtttaga

SEQ ID NO: 231713 - DNA, 1186 bp, Cannabis indica
atttcatttgaatttttcataaataactaaaaaaggcaaaaacaaattgttgatgctgaaaattaactcaacaacacacttatatttacacttcaaattctttacactaggatgatctcaatcaaaaatgtctcgggtcaaaagatggttgttcaacgcttgccaagcaatgaaacagtgtttgggaacacaaattctatgccaaatattattagcataatccactttattagcaatagttagggaagtatagaaaattttagttttaagcttacccttctgaacagcagcataaacatcctctttgtcaattttgtctctaagtttcaagagcttttagaagtaccaacaagcgtccaattttaacggagcctaccagaaatcttttcccttcaaatagattgaattgatccacttgacccacaaaatgtcttgtttacttgaggcagcccaaataaacttagccatcaaggaagtgttccagcttctccctttatagaattcaatcccgccataactcttggggagacaaactttttctcaagaaatgagatgaagtttgctacgattccccttcataccccaaagaaagtccttgtagtatttatcaatggttacaacaactttttgagggagaaaaaatatactcatccaaaagtttttaatacccagtaaaaccgaatgaataagctaagctctaccagcaaaagagaagttttcacttgcccagttatgaagcctcctctggatcttatctaaaatctcaccacagtcagctgctttccattttgttagtctcaagtgaacccctaaatattttagaggaaacattccttcttccatcttgattaagtctaagagaagagtcttgcaatcctccttgataccaccaaaataggcctgagacttgtccttgtttatagtaagacctgttactgcacaaaaatcgttaataatttgattaatgatctggatagagttgatattacctttacaaaagataataaggtcatcagcgaagcaaagattaattagcttcacttttttacatagaggatgaaagccaaagcttttgtctctgaagcttggaggagcagctgggttagatattccataatcaaaacaaagagcaaaggagatttagggtcaccttgggaaaaacttttctctcctttgaaagctccat

SEQ ID NO: 231714 - DNA, 1481 bp, Cannabis indica
tatggtttgtccctatttatttagggtaattttatgtaaggtcattgggtaagagaattaatctattttttttttttttttgaaaattcatctttattaacaaagctcaaacttacaaagaatgataaaggtcagttttacaaaaattagctaaccaattgggaaaaatagaaaaaaaagattgagatagcttgtgctcaaggcttctctttgctaacctatgagcaatctcattatagtttctatttacaaacttgagctttgtacaataggggaatgatgatgacgctttatcttattgtagatgatactaacatcacttagatcattgttgtccaacttgaacccatccaccaactgcttgcaatcggttctgacctcaaaatggctgctggtttccaacgggctggccttcatagcagttaacaccgcttcagcttcagctaagagaacagagcaaattttggggaggaagaccatacctgctgctataggattcccgcaccagtctctccaaatgtaacccaaacccactccttcttttccagggttcattgctgcatcacagttgacgcagtacacaccattcgggggggccaaccacctgctcagagcttcctttggttcggtcttgtcaggacaaagtgagatgtggtggttgttactaggcgggtagttgttcagaacccactcaataagccgagtcccttctaacacagggagattgttccaacgtttgtttctgttctcccatatggcccaaaaaattttaatcgcttcctcaaactccactttggacagcttatgacagatctccataagcaaatcaaacatggattggctgtggcaatctttaatcagcttataataaggcatacatttccaaataagtttagccttagaacaagaccataaagcgtgagggagagattccacatacctaccacattgattgcaaaggggatcaattgacatacccctatgaaccaagttcagtttcgccggaagccaattatgacaaagcttccaaccaaagagtttgatccggggggagttgaagttgccaccacattttccaccacgtatggatgggctccatgtttgagcaacgagtcgggtggagatttctttcccgagccactctataaccactctttaccaagtaatttccagtcggggagaaaggccatatcatggtatcttccacttgtgtatctataggcgttcccaaaatccaagggatgtcttcgggggtggaaatagatgaggatcttctctatattccactcatcttcctcattcaaaaggttatggatagttgtgtttggggctagtccttcatgtcgataaaggatagtaccatttggccgggatatccatttatcttcccaaattcgagtcattctgccattcccaattctccacctgcctccttcttcaagaatttgccgaccccaaatgatgccttgccaaatacatga

SEQ ID NO: 231715 - DNA, 1338 bp, Cannabis indica
taattatttggccaaatggccacaccaagccaagactgaatcaccgccacaattttcttagagaattgaccctcaaagaaaagatgggcacacttggcaaagttgaaacgtaacaggagtacttcttgtcctcaagtgatctctaattaacaaatgattatgagaggcttgccaaagaataaatttatatttttgtgtgaataacctacaccaaatcaccttacaattatccacctttcaatgagtgagaaaaacattgtagaatttattactaacccaaaatctctccccattcccaacctccaaaattgcatttcgagaaaagtggtttttgagattgagaagcttgcgccaataccagctcacatatccgtttctcccacttacccaaacgtcttgttactttaagtagatggaatcaatctattttacaaagagcatcttgctttgtggttaaagaccacacagatcgaaaaattgaagctttattaattccacttggttccatcacgaaaccccaagcctccataacacttacgcttaaaaacaagatcccaagaagcaaggcattttgttagtattctctttcacaccccacagaaagtgcttgcaaagcttgtcgatcagttgccttgacaactttttgggtcggagagcataaaaatgctcatccaataacaacagatgcctaacaacactgactgaatcaattgcactctaccagaaaatgagaggtgaagggtagcccaattatgaagcttcaatttaatctcttcatcaagaaaaggatcacaatcttctgccttctatttcgttggcctcattggaataccaagatacttaatagagaaataaccctttgcaaaatgtattgtatctcgaattccttgtttagtcattccatcaatcccaccaatgtaaacctatttggattggctttgaggccagattgcaactactaaatgtaagccatcctgcattacttggatggattttgtagaccacttagaaagcaaagactaacaatcttcaaagatttacacattgggtggtacctggaatctaacattcgggcaataaacaataaaaactaggtaagatattccattaccaacacaaaaacaaatagagaaatcgggtcacgttgtcttaggcctttctttccttgatatctcccttctgctcgaccatttagcactaacgaatagcatgtcatcatcaaaccaatgaacctagagggagaaatataactctttagaagttctcctgaaaagtcccaatctatggtgtcataaacgttatgtaagccaatcttcatgagatatcttggtggtattc

SEQ ID NO: 231716 - DNA, 1761 bp, Cannabis indica
ttatgttttaaataattaagaaattttttaattattcacgatttccaataatctcgttgattaggaacgagctgcacagtacgttaaatatcacgctaacacgcttataatagttagggtgttacagcaacttactttagtaagatgctagagtatttttctaatggctaattctaaaggaagctttttggctcctagattatagattttatttatctaggaacagtttcaactattccaaaaaagataaaagtcatgaaaggaattccttatgaattaatagtgagaggtctcatgtattagaccagacacttgttgttcagtgggagtattgagtaggtatcaatatttaatcgaggaaaggaatattgaaaaataatcaagtaaatttaaagatcaaaagaggaactatatgttagtcgataaggatagtattttaatactctaagactacaccaaattaggtttctagacttctgttaatgctacaaagtctacttatgatatggtgattactcttggggtggagcagtaatttttagagaagtgtaagaacctatctgaagtctctaactctaccagtgagactgaatgttaaagcggtcaggaaggctactagataattattcaacttatggaaagttctatgtagtttttggcattatgccagtgatggattaactactagtgttacttcctaactaacacagataaagttgccaaatagtaaagaatccagtatcctaagaggagtagacatatcgaaaggaattatttaatattaaggattttgtgactaagaaaatgtaatggtggggaaagtttgtattgaatacaacctgtcaaatcctattataaagataatactacttactgcacttgatctcgacatcaaggtgttgagattaattgaaatgcacttttagttttatattagtgcaagtggcagtttgttgagttttgtgccctaaataaaactcatttcaatataataagatttactaattaataaaaggtcaaaaatcaatttatgttgcatggttcaaatgatttatttcatgactatatatttaatgtataaattctattaaatccagaataaatagttcttcatgattatagtattgtcaacacagtggaatataatcataattatatgttttaaagtttaagtcccttgatttgtcagtatactggatttacaccgacatgataatcaacaatagagcttacttacaccttggataagtgttatgtcattttcagggtattggcaaagtatgttaagatcagatgtatggagtatacatcggactggaccaatatgaacttggataagatatcataaacttactgttatatctatctaagtcaatatcagttagttaatcttacgtcaatagatcttaatcctgatatggttaggttctgcttaaatgtattatctatgttcttagagttattctttaaagctcaatcatccaaatacttacatcttgtgaacttgataatgcaattgaatgggagcgctaaccatagatatggaatctataacttttacttctatctagacataaaagtgaaacgatagtttcttttgagcttgtcttaatagagataaataattgagacctcattttaataattatattagtttactgaaatatcatttatagttagctaagtgttttaaggataaaatacattaaaggatataacaatatatttgtccctattcgatgtatatcatctataaaggat

SEQ ID NO: 231717 - DNA, 900 bp, Cannabis indica
gatatcactatgagcaagaatccaagagcttttctcacgcaattgctccaaaaaatctgaactcgagtttggagctccatgtttaatttcatcaacaaaaaggtcaatcagagatctttcatcagcatcagcagtgttagacctctccctaccaaagtcttaagcaggaagagcagcatcagcaattctacccctcttctaaaccttcttctttgaagcatcagaggcagtagggataccctgaaccacttcccttaccaaaggttcagtttccatcagcaccaaaatctttctcttcatgtttgaacaaaatgccatagcagccgaaaagctcatattgtatacaaagaaaaaagaccagaggttagtacaataaaagagaaacaaaacaacaaagttaaatgcatagcatggagcatcaaccatctattgattccccatccttcctggagtagttcgagtacaggtaacttctccatcatccttgtctacgaacacagatattctccttgaatattctatgtcattttaaattgaagacacttctcccatcagtatctgagagaagatgatagttttactatgagcatccttgtcatttttctcaagtggtattgtccaagattcatcccgaaaaaagtgttagcatacactccctggcatgacatgatcatcccaacctttcgaagattttcagtactaaacagagttttgttatctctcccccatgcatcaatttcaagtagcatggcatcagctctcctcttcatgtcaattagaggagcaggccttttgaaaggaccaactttttggaaggcaatgtgtctcaatagaagaacaagagtatagaaatactctttgtgataaaaggtcacagttgcttttggtaatatgctctat

SEQ ID NO: 231718 - DNA, 639 bp, Cannabis indica
attttaatcaattatccttatttggaatttttttttaaatagagtgggtttgtaatatatcatgtatttctagataaatttcagttgatatacacatttatatatgcccctcaagtaattttaagaataatactttataattacttgaacaatacttaactttattaataatagaaatttacattatagaaaagaataaaatacaacatttacatttttactggtaatagggttgcaaatgatcaacattctagtagttttttattagcgagccgttaagccgagccaatttataaaccctagttccaactattgcctcgataacataaggaccctcccagtttgggttaaatactcttgcagatgcatctcgtgtatttgcaaatactcgccttaacaccaaatctctgacattaaagaggcttttcttcactcttttgttgaaatatcgcgtaattcggtgtggatatgctgcattagtaatttgtgattcagtacgcctttcttcaagtagaaccaaggacaatttaaggagttcttggttttcttcttaattatagaaatctcgtctatgggtcgcaatattaacttctactagcagcattgctttggagctaaatgccaacgagaatggagtgt

SEQ ID NO: 231719 - DNA, 912 bp, Cannabis indica
ataccattgttgggctatttcagctagagttgccaaagattcaacatcgcacatctccaaatacttgtaggagatctatttgtatcttaaagtacttcaggtgcacaagagggtcttcttttcccgtgtaaatcttccaagttggcatcttgaacttgggaaagggcaagggattaatttatgccacgaatggtgatccccttgacctttctagctcatgttttgaaggttttggaccagcttggcccttaatcatgtctcgtatttgatccaactgtgcttgcacagaaggatctgttgcggcaggggcctggttgattagccttctttgattgagctgtggcctcaaattggccagagcctagccgaccataccttgagagatggtatactcaaggtcagacagccctgagtctgctacttatacatggtcagccaaccctaagctaggcagggcctgaccgcccatacttctctacctaactgatggagtttgtgcgttgacatggagtagatcacaccaattgctagagttttgtggatttaactttttgaagtgattaatttcacttctcaaattgttgttttgggtgtttccacctgctctaggtccttttcagttgaaaattgatcttcgggtgactcgttccccttgggagagtgctcttctctagccagccataaggacttctgctagagtctgggcagtcatggatacttttggaggagtctagccggccatggggacttctaaaggagtctgttcagccatggggactcctattggtggttggccggccacaggatggatagagggggttgttattgagcttgagatccctggctagccccccatgccactggttgctgagatttggctcttttccctatttgacctttgaagaaaggtct

SEQ ID NO: 231720 - DNA, 985 bp, Cannabis indica
atggaggttactaatttttttttaaaaaaaaaaactgaaaagaaatggaaaataaaaggaaaaagaagaaaaaaagaaagggaagtgatggatgcttgattgatagggtcataggactcacgtgtactcatgcatgtggagagtatgcatgtggtaaaatagtaataaaataaagatgaagtgtataagagtttactttaccgtgtagtggtaatattttgtatttttaatgtaaaaattttaaataaataactaatataaaaaaaataaaaaaaaaaaaatgtgatcaaatttgtatcctaaatccgtacaatggtaggactcattggtacttcacattttgaaccatatgatcctctaagaataagttccacctctcaaattttagagccgcccacatacaatcattggaagccaaatgtatacccactcaatctttttgtttagattagaaatcatataaatgattaaccaaacggcaaacacaagggtcatccatgggcttgacttatataatttcttatttcttttttttagccatacaaatattatgttaaagttaaaatttatggaaaacttataaaaatactgacttttggcctaatttttacaaaaatactgccacactgcagaaattacttttatactgttttagccaattttttttttttcttttatactgtaaacaccaaaaaaaatgaggtctccatcttccacacccacggacagaaccactacaggaacaccataacaattggaaaacaagcattaattctggtgagactgagaaaaaaaaaagtgaaatcaacgtcaaatagataatcatggcaaaacaactataaaacaacactaaaacaaatcaaacaaaagaaaagaaaaaatgattaaaaaactaaaaactctactgcacagcctcaaataccaaatgcaatagcaattatatttacaagcccaatcttaaaaaactcaaaacaaaaaactaact

SEQ ID NO: 231721 - DNA, 1311 bp, Cannabis indica
agatcctattcctatctgactttgtgtgaattaaatatgagttttctttttctagaaaatttgattatattctttactttttaaggaaattcttatgatttttattcattttgatgtgatttcttgactaagaaaccatgcacagttatgagtattaatgttgtcaaatttgccttatttatttatggaaatgttgctgaaaaaactgtccaggttcactgtatctgtttgaacggactgactctctatttaaacagattttgactttcctttttgggaagattttcatttaatgacctgatcgtttcttggttgtttgtccacgacctagagggtttctaaactgtatatattcatcataaggtcgctagttttggttaactctcttggtgtatcaattctatattacttttcaaagttaaagagtatttttctttgttgtgtgaagaactctagtccaacaagttcttagtattttattattgtgttactctatattgtttcttgttgaaattatgcaggttgaatatcttggatattgttaattaagctttgggagaagtcttgtttgtgagtcacattttttgggggaaaaagtacatgtgagtcactcttcgggaggaagattgcaagttagtcactcttcgggaggaaaattactagtgagtcactcttcgggaggaagattgcaagtgagtcactcttcaggagaaagattgcaagttagacactcttcaggaggaagattgcatgtgagacactcttcgagatgaagtgtgcaagtaatacgaattgaagggagttcaaggtctcggcacttttgaactttaattagaagaatagattacaacatttgcggcaaattcaaagaaggagtctttatttgtataagtcaatttagttttgtaaacacttgtgattcatctaataaatttctttctctaggcgtggccagttgctgataccacgtataaaatattgtgtgttattttaattttctacattttgctttttacagtatatttttgttctattagattatgtgtctgatagaacagagataaattctgttcaaacaattttattataattctgcattatttaaattgtttgataatttcacttggtaattattaaaaacggaatttgaatcaacattgatcttcactgttcccctaccaggcgacactcaagcatggttaggagaaccgtagagagaaaggtaagttctcaaccgagtgagacttatacactggtaatcaacaaggaaattacgacctcaagaaataacaatatcaggagcaattacct

SEQ ID NO: 231722 - DNA, 1334 bp, Cannabis indica
cgggaaaaatcatcaatgaaggtgataaagtatttataaccacccatagcaggtggaacaaaaggcccacaaatatcagtatgaataagctctaacacatctgcagatctgtctgacttactctttctaaccttggcagtcaactttccttttatacaatcaacacaggcagtaaaatcagaaaaatcaagatcttgaagcacaccatctttcaccaatctctccattctatctctagaaatatggcctaaacatttgtgccaaagcatggaagatttcaaatctgatcttgcacgtttagaaccaacaacagcattaagagaagaagaagaagaaggacaagagggagaagtaataggaacaacatcatgtaaatcaagcttatataagtttccacataaagttccatttccaatcaacatagagtcacgatacaaagtcagttttccagttccaaaatgaagactataacctagtctatccaaaatagatacagagatcaaattcctcctaatagagggtaaataagcaacatcatgcaactccaaaaaaatgctcagtattcagctgcaaattaacagtcccaaaaaattcaactctgactttagtatcgtctcccatgtacacatactcctccaacctactcggccttcttcgacttgtcactgcctgcaaagaatgcgtaacatgaattgtagcaccagtatctaaccaccaagtgtttgagggcacatcaataatattggattccaaacaaaccatcacaagacaattacctttcttctctaagtgagctttgagctttcggcaatcagctttcttatgcccgaagcattgacaaaagttgcacttccctttgaaaaactcattcttatgactagttgaagaagagcttgcttgtccatttcccttaggactggtggctttcttcttatgaaacctttggtcactagagttgttgggagtgaactttctcttgtgagaattgtttggattggtcaccatggagatacttcttgctctcccctttttcatgtcctcttcttctttggaaagaatagcagtcatgtcctcaatggtccattgctccttttgagcattgtagcttgatatgattgaatcaaattgagaaggaatagcttccatcacaaattacaccatgtaatcctcaccaagatccaatcccatacctctgagcttttggtaacaacccatgagcttgtcaatgtgggctctaatatcactcatatcagcataattagtgcgatggaacaaaatcaagcactcatttttctcattctataagaactatttgtacttttccttaatggcag

SEQ ID NO: 231723 - DNA, 767 bp, Cannabis indica
gctgcacagtatgtttgaaaatcacgtaatacgcctaagttagttagggtgttacagaagcaagtattatgtgatttttctctattttagattaatcctcattcactataattatttaatataaccccaaaatactaaccctcttaagcagcctagaaaccactaaaacaaaatgactaaacttgggaaaagactattttaccctaaccaaaatctcttaagcttaaatcataacctaagggtatttcggtcattttctatctattctacaaaatcgacaacgtagaattttaaactagtctggtataaatccaatacaaatcatcttaattgtcgtgacatttctgaccacttcgtcgagtttccacagctgtccagcctgaaaatattttattttgaaaatggtatgtacgatacccacatatttcaatataatctccgtaattaaaaaattatgctttaattattcatgtttccctaatcaactcataattagtttaagtaggattataattctactctaatacccacttaatcacatatttaataaaatatgtccaattaaaatatcaatatgttttccaggatattacaataatcgttatgttagtaaaattgaacaaaattgaacaaaaggcattaaatccaacaaaaattaaatgaagataataactgcaatttgtaaggagaggaaatttgacaaaaaatgatgtggtagtggagaagatagaagggagactgaaaagttaaggtaagtttggttaagc

SEQ ID NO: 231724 - DNA, 882 bp, Cannabis indica
ggtattggtgaagatggtgatgacagtagtgatcatgtttgtgcaaagaaggtatgctttccagtactgccctcttcttggttatgtttcaaaaaagttaatcaagtgattaggcactgtgactttgctaaaagaattaagaaattgaccaatgagctagatagtttaaaaaaagatggccatgagcatggcatagttttgggggctattggaatgtatgctcaacaacaatacaatcctagttccatagtcaaatcaagaatcactactatttctttggttgaagaaactgaaatacatggtagagatgatgataaggaaattttagtgagtaagttgttatgtgatagtcctcaaaagagtagtaaagggattgatataatccctattgtaggaatggggggacttggtaaaaccactcttgcccaactagtttataatgatgatagtgttaaggctcactttgataagcgaatttgggtgtgtgtctcagatccttttgatcaaaaaagagttgctaaggcaattgttgatgggttaggaggaaatgctcaaaattatgatgagctagagagtttagttcaatgcattagtaactctatcaaagggataaagttccttcttgtcttagatgatgtatggactgaggagaaatcaaagtgggaacaattaaagcaaccacttatgcagggtggtgtgggtagtaggatattagtgacaacaagaaaagatgaagtcactataatgatgagggcaattactagcaagattacacttaaaaaattgtctgatgagcaatgttggttcatcattagacaactagtatttgtagagggagaagaaaatgaggtcaaattattagaagaaattggaagaaaaatt

SEQ ID NO: 231725 - DNA, 1338 bp, Cannabis indica
aaagctgagacgtcaaggactcctcgaagttttaaacctctctcaagatagagttagtgagatacagcgaccatgaaaaaagtctgatcgcatgattataactcgtattatgcgggacaagagagtaactcgcatgtatcgaagtatgtgcgagtatcctttctatgttcttgcataaacatagagaccaaatctctataatgcgagttggtcccaatgaccctacagccttgataaaccgatatagacacatatgtctaggttctatcagctcgtcatacaatgtccacaaaggcgactacataagaacgcagacatcctaaacgcaattaagtgttcggcccacaagcttaacattagaatatgaacagtcaactcgcatgttaaaggcacatacgttgctgaatttagtaattgctattcatttattgatgtttacgttatttagtttcgttattgtaatttaatgtgtaaacggattgacaatgaatgaaatctttgtataactaattggacacctgctttgtatataaaggggtgatctaccgtgaaatgagacctacgaaactcttgctacagtggactaatcagactgtgatctgactgaaccactataatcctttgtcttattgttgtttccagtttttgttaagcatttcatattcccagttcgagtactcgacgttctaggttgaatactcgcaattgttcttcaagcaattttcttcttgtcattaataatattacatacatttggtgttgcaaattttgctcgacaacaggaagtatcaatcatttcgatctcctccgtgccaacgatgctaggttcttcgaggaactgaataggaaccaagttcgctttatcactcacactactacccgcaagccgagctaacgcgtcagcagtcgtgtttgctttccttggaatttgtctgaggatgctaggttcttcgaggaactagataggaaccaagttcgctttatcactcactcgcaagccgagctaacgcgtcagcagtcatgttttcttcccttggaatttctctaagaccgtagcttttaaactatgcgagcaagtcgtgtatcttgctcaaatatgctatcatcttttctccctgagccgtattctccagatacatgatttaccaccagctatgcatcactacaaatttcaatatgctcggctttcatctctcgggctagctttagacaggcgatcaaagcttgatattcggcctcattattggatgctttaaagccaaacttgactgcaacgtgtaggtgttgccccccaggtgtgacaagggcgattgttgcaccagataattgatctgtagc

SEQ ID NO: 231726 - DNA, 1210 bp, Cannabis indica
ttgatacacttgaccatggaactattctacctgcagctatacctgatgcaccacacattgttgagcaagatacagtacaagaacaactcaatgaagatactgcaacacaggaaaacacagctcccaggacggaagaaacagtcactgtaactgtgattccttcctccagtacagcaccatctcatcacatgatcactagagcaaaggctggaatttttaagccaaaaacatacctcagcaaagccaaatggacacttgtctatgaagagccaagtagtgttgcagaagcccttcaacagtggctggaatagggctatgaatgatgaaataatagctctcaaaaagaataaaacttggactcttgttccaagatcgaaagctcacaatctagttggttgcaaatggttgcataagataaaaagaaatgcagatgggtattttcaaagactcaaagcacgattagttgcgaagggttttcatcaaagagcaggtctagactatggtgaaactttcagtccagttgtcaaggcttcaacagtgagaattgttcttagcattttcgtctctagaaactgggatattagacaactggatatcaacaattcattcctcaatggccacttagaagaagatgtatacatgtgctaacctgaggggtttgaagatccaacaaaaccatatcatgtttgcaagctccacaaatccttgtacggcctcaaataagctccaagagcatggtttgacaaattgaagaacaccttgcttgaatggaattttcagaactccaaggctgatacctccctatttttctgtatgaacaataataacatcatccttgtcttaatctatggtgatgatattattgttacaggaaacaacaacatcaatctccacaagtttgtccagcaacttaatactcacttcactctcaaagatcttggggcactacactacttccttggtattgaagtagtaagagatgaaacagggatgtatttaactcaaacaaagtatattgaagacctactcaggaaaaataacttgcaaaatctgaaaccatgtccaactcccattgcagcaggcaaatctctatcaatttcagatggaaaggaaatgacaaaccccacggtctacagaagtctcattggagctttgaagtacctatgccacaccagaccagacattagttatgttgtcaactctctgagtc

SEQ ID NO: 231727 - DNA, 1199 bp, Cannabis indica
gtaaaggtgcatgaagccatgacaaagaagaatcacagaagtttctggacctaggatttcttggatattttctacagcaaagtctaaggtatattcgaaatgtaaatatgcaaaaataagcataaagggaatcataaacttactcaagaatcagatgtctgggttcgagcaacgtcaatccgacaagcagccttgatgaaagcacttcagcaaacttaaagccaaaaacctctctttttgctctgaactttcttagcaaacaaggatggtgaaaatatgtttatgtgccaatgcttattgatatttataggaaagtcacgaaaataggtaatcgactcaaaggaacctcaaacgcctcagtttccctccttaaaagcaaatatgggaaatcaaaagtaatcaagtgcagccgtcagccgtggagagagaaaattcgatttcgaaatattaattgtcagagcatttattagccaaaaacggaagggatgcccagtgagcctcacatcgagtctcgaacggtcgtgcttgacacgtgtccccatccaacggcagaagcagctcaaatgaagtctacacgcgacttcggaagtctcgtacagacttggggggcaaatgttatcccaatttttgcactctgacgtggcatcacatgaatggtgacacgtggaatccacttggagcatctgctcgagaagcataatccgaggaggatgttttgctagcgtgccctgagcaaagttctcaacaatccgcgcagagcaaccaacacttagcgaattcagctttcgcattgtgagtcatcaacacaatccccataacttaggtatcagactacatggatatggtatacacacgatcccactatcaggatatttaacctcaatcccacgatctttgtactcagcattgatcccacgatcttttgtttatacacattgtaacgagagggaaaacccttcctctccaagcttactagccctataactagtgatgcatattcactaggcaaagggtcgaaaacagtttagctaaaactataccctaaagatattatctaagaattatatattcagagataccattgtaagagctacaagaaaaggaatctttctccttgttcttaagtcaatacatgtaacgaggattaggctattaccgaaccgctcggtgctgaaactctataaaattcttatgtcttt

SEQ ID NO: 231728 - DNA, 902 bp, Cannabis indica
attttgcagagccatttaatctgcgcaatgagtccatcaacatcccgacacccttcttgctcatgcatcactaagtgtactgcttgaagacaatcggactcaacaaagaaggagggaagattgcgttgtataccagcctacagacccatcaaaatcgcttgtagttctccctgcagtggcgtaatgttcttttggacgtacctgttagcagccaccccaacccaaccttcatgatccctagcaactgaactcagcccagcaatgccttccccaaccttgacccctgcatccacattgatcttaaaggagccttgcctaggtggagtccacctcacctcttcccgcggctgtccaggaggcttcgatacattgctctctctaaattcatgaagaaacttgctacaccattccaatatagcactagcttgaggcttgagtcccccatgattaattgagttgcgaatataccaaaggttccaagatagaaccagaaaaaaatcaaagtcctccttagtaaaagaactcgaaattcgcatgagaaaagcaagcacatcctctcggccttgtcgctgaatatttccataaaagccagccgcatgccaaacctctcggttaactctacacccccataatgcatgaaaaacattctcatacgcaccagtagaacaccgcttacaataaggttctacctggatatgccggtgagcaagagctgagttagtaggaatccatgaatgagccatcttccaaacaaagtgtttcaccttcggcggaattttcaacttccaaagcttgctccaccacttctcaacagcctgcgtatcagactgcacatctctcacttgtaaggcagccgccatacgatattcgcttcgaacggaatactccccatccttactata

SEQ ID NO: 231729 - DNA, 1648 bp, Cannabis indica
tagtagtataggccgttaggcttatcatgaattcttatgtgctcttgatctggtggtgcattcttattttggttgtatcctgaataagcatccatgaagcttacgatctcatggtcagttgtagcatttgctagctggtcgatccttggatgtagacagcagtcctttagacatgcttgttcaggttggtgaaatctacacacaccctccacttgttgtttggtttgggtacaaccatggggttggatacccaaagtggatatagaattgtttgatgataaagtcattggcacataaccttttgacttcatctcttagaacttggtcgcgctctttttccaacaacctccttttctattgcacaagtcagaagtttggatcaatattaagtgcatgggtcatcacagaatggtctattctaaaaatgtctccgtgtgaccatgcgaagaggtcaaggttttccctcaaaaattttatcaatactaattttatttttggcgttaaacctttcccaatcttcagtcttttggttggaaaaagtgtgatcaaccttcacttcttccagttcttctacaggtccaaagttttctataggatgcgaggatctatgtctgcctccctacttttggctggacttaattgccatttgctgtgctcttcatcagagcccttggcgggcatattctctttcatggatttagacaaggccaagttgtaacagttgtgggcaaactgttggtttcccctcaaacatcctaccccatgccttgttaggaacttcaagtaaaggtggtagatggatgttaccacctttaggtcgtacagggctggataacctatcatagcattgaaggctgatggcacgtcaattaccacaaattatgcctttgcattctggttgttggattttctccaaccatcaagggcagttagatgtaccctataggtgcaattccctaactaaagaacccatacatgacttgtgtgtaaggtgccaagttagttagttagagccccatctttcatatgttgatctaaaaagaatgttggagtaggcttcgttatccaccatgcaccttgtaaccgtcatgttcctcaattgtgcagtaatgaccagggtgtcattgtgcgggaagttaacttggacaacatctccctctgtaaaagagatggcaggctccccaagcttgagctgctttgagcccctttcttcaaccatcaagacatcgtttttaggctcgtgatagagtgtccgagcatagcattcccaggcctcactagtctcacctataatatgggatccaccaattatgacccctagctgaccctccattagaggtgccatagggtctccgttttgggcagcttgtgccttagattggtcgttctgcacataacgatgcaagttgggattcttcttcattattagaaattcaatctccctccttaagttcagacactcattggtgtcatggccaaagtaattataaaattggtagaacttcaacatgtccctcttactcatctcccttctgatgggagggggcttcttgtatgggatactatcttgtgtggccatataaatggtcccaagtttctccattaggagggtgaaacatgtgtatttctcctccttatctttctagtt

SEQ ID NO: 231730 - DNA, 1303 bp, Cannabis indica
aggaggagagagttagtttttagttttttttagtttttgtagtaggttgttttagttttacgaaaggtgggaggggtgttagtagggtaaaaaattaaatgtagtcatatagtagggtaaattttaataggtatagtatttagagaaattaattttagagtatttttatggattagtttttactaaattttccttagtttttttgagtgcattttatcttagtaaaaaaaataaatgatatgaatatatgaaattaatttttaattaaaataggaatgactaatattcaaacttctatggctggagaaccatacaccaaatggaaggaaagtgaagatgaacattttattatttttactaaaccagttaattatgaaagacacaacaagggggcttaaccactgagggatggcaagggtagaaaaagaaatgaatttattgtatagagataaattagataagactaaaataaaaaataggatgagaactttgaaaaaaaaaaacttatgctaccatgaagagaatgctactaaatagtggctttgggtgggatgaagaaaatcgaaaagtcactattgaggatgacgtatgggtgcaatatcttatggtgattgtagaggccaaaattgggctcaggctcaatgtcacatgcgatgtttctaaagaatgctcaaacaagattgggttggactatttgactagttatgacggtacaatcagcataccaagcccaacaagcccaaaatgatacagtcaagtcaaacattaacattaaccatgacctaacattgagctcacgatgatctgacccgtatacgagattgagtcttatcactcatctaatgatctctaaagtgatcagtcaaactggccacgcaaataacgatctccctgatcaagtgggagcggagcgcttcacaagggggtgagcgatcatgagtaatgtctttctatggacgcctataagagccactctcagtcactgagagaggcacatgaatccgagtcatcccaattctcacttattgttcactctctaattctctctaaaactacaaacttattttcacagtcaagatatgtggtaacttagttcagtcatttattatcatcttttttattacattgttaacaagcttgctgacttgaccgtcggagtcccttcggtcggtaccatctcggtgtcccaaggtttcccagttactctcttatttgttctacaagttgttggtgcccgcgtacaatcatcttcgattgattgtggattttaacatctacattgagtaactatttttcttgttta

SEQ ID NO: 231731 - DNA, 916 bp, Cannabis indica
tttccttggccatgtagtagacaaaaagatgtgattatgatggattcgaccaagattgacttcgttagggattggccaacaccagaatcagctactaaagttagaagttaattttgggcttagctgtttattattgtcaatttgttgaagaatttttgaagactgcagcgcctttagcagatttgacaaggaagaatttaaagtttacctagattgatcgatgtgagaaaagcttccaggagttaaagcaacagttgattactgctccaattttgactcttccttctgataaggaaaagtttgttgtatattgtgatgcctcaagactaggtttaggtggcgttttaatgcaagctagaaaagtaatagcatatgcttctcgacaattgaaagagttgaagaggaatcctactcatgatttggaacttgcaactatggtatttgcgctaaagatgtggcaacattacctatattgcgagaaatgtgaaatatacaacgatcataaaagtttaaaatatttcttcacacggaaagacctaaacatgagacaaagacgattatgattgtgaaatcttttatcatcttggaaaagccaatgtagtggttgtttcctgagtcagaggggtcaaggacaaatgagtaaattgagacaaatttcaaagcagttggcatataagatgacaaaggctaatattaagctagttgtgggtcaattagccaacattaccctttaatccacattattggaaagattcaaagaaactcagcatggagatctggatttggttaagattgagaataaagttttaactggtaaggctaaagactttaccatggatgaaagtagtatgttacggcttatgaactatgtttgtgatcctacagatgctgacatcaggaaggagattgtagatga

SEQ ID NO: 231732 - DNA, 1217 bp, Cannabis indica
gctaattcttcagcacctatcaagttggatgccatggcacaagcacatatcgaaaagcacaggtatttactcttccccttttaggctttatatttgtacacaatttcttccattttgttctgctttctgatagaccccagtattagtatggtgaggttgagtatagcaaataaaagagatgtgactaaatgtattgaggagaattgaatggtaaatagaaaagttatgcaatgaattgagtaaaaccctttgcatcaaaggggcctaagggctcccattaatttgtaattagttttctcatatagtcaatataatactctactgtttggctactatttgctactgtttcattgttcttgatgctattgtgagtctgttttattggttggttttcttgagtttggagtactcggttctcatcacttacactttttcttgactacagttgcattcagttcatagcatgactgttctcatgaaactttttattataataactctgaagtaatctaataaagctatggttagttgagttcaattaatggaagtaatactagctccattggttccaatgagaacgaaaaactttgttagaaccaagttaggggagtgcaggtcatgaatcgaaaccaattgcttcggttttgtttctggcttttgaacatgctattctttggtagtttgttcttgtagaattgaatagttgaaaaaagaggaagaatgttaacttgattgtgatcaagacccgagtccggtagctaagcaaacccaatagaacagtaactgaattatagaatagtagagctatctagcagtaacagaagtattgaagagatattattgattggtagaaaatatcaagagtcaagtttcacgggaattcgagagccttggactctccatgacgctgtgaatcaattttgctaatctcagttagtctaaccctcttctactaatatcctggggtctaaccgatcgctgcaggatcgaaaatttattggtactaatagtgttttttgtcatgtaaacagttaacataaccttattaaattttgtgtaatcattgttacttttgcattaaaaaataagtctctctctatataaaaatgtctccatatcaatatatgttttggttacacttgtatctatttatgtaagaaatcataattactggtttttcttttttctgctatatataataggaaacttcaagagga

SEQ ID NO: 231733 - DNA, 1188 bp, Cannabis indica
ttgtcgtcgtagtagactacttcactaaatggatagaagttgaacccctggcgacaatcacctccaagaaggtccttgactttattgtcaagaacatcatctggcagttcggccttccccaaaagattgtgccagacaacgacaaacagttcgacagtgacatgttcactgaaaactgcaacagacatgacatcatcaagagctactctgccatggcccatcctcaagaaaatgggtaggtagaatctgtcaacaaaactctcaaggacaccctaaagaagcaccttgaggaagcaaaaggcaactgacctgagctgctcctagaggtcctatggtcgcacaggactaccgagaagacggccactaggcaaaatccatttactctggcttacggttatgaggcgatgttgcttgtagagctagtgccactttctcacagaagaacaacctatgaccaacaaacaaacaacaccctgctggcagattcccttaacgaagtagaagaaagaatagaattagccaacctaaagttgtagtcctactggcaaaaagtagcaaggcacttcaacaaacacgttaaaaacaaaaaattcttcataggagacatggtgcttcgaagattgttcctcaacactaaagactcaacagtagtagtgtttgggccaactaggaaggcccttatcaagttacatagataactagtaagagggcctataagctgggaaggtacaacgagaacatatagctcgttctcctagcaagatactagaatggagagcaccttcacaaatactaccaataaccgacttacaaaactctactccaaagtagcagttttatctacccaacattagagtacaaaaagcgagcacccacgaccctttttgggtgtggtctcccactagtcttcaatattggcctctactttactaggcaagcaggggtagccacttgacatctagaagctaaatttatgtaatataggcttgtagattcaattcatgtaagttgcacagcaacaaagaccaattaatgaaaatatcattatttatattctgtttattgtgtgtgtctatgaacacttgctcacagagtaacttcttaaagttgttctcttagttttacctgcgtactatggtaccctcgaaagacagaatccaggcaaagtctgtgaaacttggtgaatag

SEQ ID NO: 231734 - DNA, 1844 bp, Cannabis indica
ttcgatgacatatcgaccctcccaatttgggttgaacactcctgctgatgcatctctcgtatttgcaaagactcgtcttagcgccaagtctccaacattgaatagtcttttcttgacttttttgttgaagtatcttgtaactcggtgttggtatgctgcgttggtgatttgtgagtcagttcgtttttcctcaagtagatccaaggctaattttaaaagttccttgttttcttcttgattataaaactctcttttgtgagttgatatgctcacttcaacaggcagcattgcgttcgagccaaaagctagcgagaaaggaatgtgtcccgtggctgtcttcttgatagttctataggcccagagtacctaaggtagctcgtcaacccatctacctttggcaacgtctagcttcttcttgatagtatcctttagggttttattgactgcttccacttgtccatttgcctgaggcgtggatactgacgagaagcttttgataattttattcctctcgcggaattcagtgaacaaatcgccatcaaattgggttccattatcggatactatattcatgggaattccaaacctacagataatgttcttgacaacaaattcaaggactttcttgcaggttatggcgacgaggggctcggcctctgtccatttagtaaagaagtcgactgctactaccgcatacttagcacctcctcgcccagtgggtaatgccccaattaggtcgatcctccatatagcaaatgggtagggcgaggtcatcattctaagttctgttggctgtatgcgaggtacatgtgaaatcctttgacacttatcacattttttcacaaactcgtgtgtgtctttattgatcgttggccagtaatatccctatctaatgatctttttaaacagactttgctagccggcatgatccccacagaagccttcatgaatttctctgatgatttcatttgcttctgcaggaagaacacaccgaagtaggggcattgaataccctcttctatatagttttcctttgatcattatgtagcgaagcattgaatacaatagttttcgcaccttgtttttgtcattaggaagttgtctatcgagtaaataatttatagtaggtgtcatccatgttggagagatatctatcatcctgacgtcttcagtttcacatatatttggctcgccgagcatctctaccggaactaagttcgattcatccaagtcattctgcgaggctagttttcctaaggcatcgacgttggagttttgttctatcaatttttttttgattttaaagtaattgaatcttttcaagttcttccgaaatttctctaaatacttcgccatgtttaagcctttggcctggtattcctcgaggacctggttcacgaccagctgcgaatcactatgataaatgagattttttacattcaatgcctctgctatctttaagccagagatcaagttcatattccgcctcgttattggatgcgtcaaatttgaacctctgagcatagtgaaacttaaagccttatggcgatcttgatattacccatgcacccaaaccttgcttgttggatgtgccatcaacgtagaacctccaagtttttgcatctcgctgatccggtggattttcttctggagttataccttctatcgagaagtgagccaaggcttggcccttgatggatgtttgaggatggtatgttatgtcgaactgccccagttcaatcgaccattttatcaatcttccaaaagcacctagttttgacaaaacttgtctcatggctgatcggttaacacttttatggggtgagcctggaagtatggccgta

SEQ ID NO: 231735 - DNA, 1151 bp, Cannabis indica
tggaaaatccaacaaggtttctttaaaaattcacgaatgaaaaaaggagattttttgctttgattttctaaaaaataaaagggctaaaagagtccttctaaaggttaaagtcccttttatagatttgaaagggataatttttttttgaataatgatagaaacttcattaactcaaatcttccaaaatcaaggaagaaattacagtaggtaattcaacaccaagtaaagtacggtcagcctccgtaagagaagatcgcgccaaagcatgcgcaaccttattagcagaccgcttaacaaaattaaaagaaacattatcaagagtggccaacagagccttacaatctaaaattatatgaccataaggagaggtcatattttattactttgaagatccaaaacaactctttgacaatcagactcgacgatcacaactaaccaattattatttttaatccagcttagagcttcttttattccaatggcctccacttcatgaggttgaaatgcaccagccttcttaaaagatttcgcttgaatgaccgcaccagccgcacttcgagccaccaaaccaataccaaaacttccaacatccgaaaaaagtgcaccatcaacattaactttgaataaaggaaaaataggaggggtccaatgcacatttcgaatccgattggattcattaggagtacctaattcttggttttgagaattataccaatcatcaaagtttagttttgccaatagtatcacttcatcaaacgtaggttgtttagcattccaaaccacctcatttcgaactctccaaattgaccataagatcatcccagcctctagacattcaaccatcttccacgcacccaaaccttcttcccaccagctgcaaaatgtcatagcagtagtaccaacaatggggtccgaacctgcctccatcacccttttgcaaaatcgcagcgaacaagaacatgaagtgccatttcaggagcagccatacacatcggacagctagaattaatgggaacatgtttcgttgttagctgaaaccgagtaggaagactattagtacatacacgccataggaaatccttgactttggggggagtttaagctaccataacttcatccaaacacccgaattactgggttgcatgttgctg

SEQ ID NO: 231736 - DNA, 600 bp, Cannabis indica
gagagggatgtgttcaggaaatggaacttgacaatacttcaagctggtggatttggaactgcttgagttttgggatgtgttagtctggctcgaggtggaggcttggggagctttgagggcactagtgttgctcatggtagcattgagaagagctgtgtaagagggagttatggtgtcgggttggtgtgggactggggcacgggtttgcaagtcaactgggttccattgtccatggtcttggatagggggtaaaggtccagatttgtaaagaccaactggttgggtttggccgtgggtgatggctttgtcaggggcattataagtgggaaatggaggcataatttcaggggggcaacacagactgtactggcagggttacttgtcatgaaagcggctaccgggggtagcaaaagcaagttgttcagagcacaacatagtgttagtggtaaccttaactttgccagagatggttttgatatcatacctgagctccggagggaacggagcttcgtcacaagctttcatgtaatccacacatcccttattgtaattgtgccccatacggccacagaaaaagcaaatgtcggggaggttctcgta

SEQ ID NO: 231737 - DNA, 1158 bp, Cannabis indica
cacatcagtctaaatccaatcacacatgtaaacataaataatttctaatcttttattgataacaaataagattagattgaaatgggttttgtttagggcataaaatcccaacagtaatatagtccaattttcaagactaattttatgtaaagtgttgctcaatatgtaccatggctacatgaaattttctttctttcttttaatttttttttctattaataaaaattacgttttaccaaatttaatgtaaagtgggaccatagtgggaaactttattttaactaatggagtattttttataagaaaaagtgtcaaatcttacgcgtatgagagaaatgataaaaacgataatattttaaaatgacgtgtgtattttgacaactatagatgttgcccctattgaaaatgctcttatgaaatgctagaaaaagtggcttttagcatttctcatttgtatattcttctttttatctcttttatatgtatgctatcctcttctgtccaaatgacttttgtaactttattagagtttctctaatattgctaatgtgtgaaagtaaaatactatatatatataagatgaatgtgctattcttcccatatccaattagttttgagatgaaactccatgcaccttagccactttcattccaaattctatcagagtcaaactaaactctaatcagtattcgatagccaaaagagccaaaaagatgagccataaaagagccgcttgtgatccgttgtgagcctaaagtgccgtcggtccaaaaagatgagccaaactaaaaaattacgatgtctctcttttagatttcttttgagacctttcgaccaatgtgtgccaatttccagtgttggggatgttgccctatttcaaaatctataaatttcttgatgtgtacactcacaaatttcctgattttgccttgtcagattcttttaaatttcacgttcggctttgtgatctcttaaaggtcgttctttatacccacactttttaagtctaagtgtgagaaggatgtatttaagttagtctcactactacaatttttacattttagtgacactatttagtgacatgcaattttgtgcatgtcactagagttgggagtgatttttagtagacatgcacaattagactctaatcaatctttg

SEQ ID NO: 231738 - DNA, 1134 bp, Cannabis indica
atgggtgacctcctggaaagttttcccaggaagcgcacgagtgaggacaaagcacacaggaaacactcgtgttggtttgtaaggccaatcttcagtccatgaaccagctagagtgacgtactagtgtataagagtcatcattctgtgggtgtaaggacccaatggaggcttgaagcggggacgttacacgaagttgagatatttattaaatatataattaaattatcatttaaacaactaattattttaaaaatttagggttgttgaaacaaccttaaatatcttttcaaaatttcaaatttaaactaatttcaaaatatctaggtttatttagattattttatcaaattaaattaaatatctaataagataaacgatttaaaaataaccaatagacattttattttctaatcttataatttaataaaattaaaataacaaaataaaataattttaaaatagatatggttaggaaatattattttaagagtaaaataataaacaaatgataatttttcaaattatatgtcaaaatatctcaaatttagccttttttaaatttcttcaaaaaatatctagattatttgaatgtttaaatattatttataaatgtctaataagtaaaataatataaaatatcattttttctaacttataatttacaaagaataaaatatttcacaaaataaccaatttataaatttaaaattattatagttaagatatctataaaaatatctagtttattttaaatttataattatttgatacatcatataagataattttaatataatattttaaattaaaagaataatactatcttttaatttaaaagttacttaatattaaaatatctaatcttttaattaaataatcagtaaattttaacaacttaataaattttaaaaatttaaccataaattaaaatataaaataattagttgttaaatttaaacctcaaaatatctcaaattaataataatctattaaaaaattaaatattactaatttgtaaatttgatagttacgtttaaatgttaaaaataatattttatttagatgtttagggtttcaaaaaataagaaattaggtgaaaaatcaccaaaaaaaatcgcattttgggtgaaatca

SEQ ID NO: 231739 - DNA, 589 bp, Cannabis indica
atcttattctaagctctgaaaaatacctcgagaaaaatcggtttcaaagccaaaaattagagttttccccactgctggcaaaaccggttgactgctttcactatgcctgtgaaatcggttaaccggtttccctgctgcagaaaaatggaaactcgggtttttgctccaaaaccaaaccaatactcgtccaaacctgcccaaaccttccagatcaatctcataccataaaaacattaaatccaaacatccaaaactcagaaatatactaaataaacaaaatcaccatacttgagtgaactttgagttcttaaacatcaattctttcatttccaaccataacatccatgtaaattatccaactcataattaaacaaacctaatttgaccttagaatcatactccgaacctcaataattacacaggcccgaaatcaaatgaaaatccaacaaaaacttagccctaaacctagaaaatcaaagggaaggaataagagacttacctccaagcttgggctacttctacacctcactacctccatcaaattttgcctgaaatgaagttgaaaattctggtataggctggttttcta

SEQ ID NO: 231740 - DNA, 1680 bp, Cannabis indica
ttttttttgtgaagcaccatgggctattttgatttccatctcatattctcatactatataattattatgtttttccttccattctaacatttttatttgtaatggtttttttttttgtttattttctttggtgcgtttatatatttatgtattgttaaaataaaaaaaggtgaatattttgtaaaatcatattttataaaattgttttcattttttaattaaaattaaaattaaaattttgaaaaaaaaaatcacttttaaaattttttaattagtttttttccttaatcaatattttagaaccctgactcggattcggattttgaacttgactcgggccctagacaattttgactcggactcagatctagatttagatttagactcaagctcgaatttagctttggtcctgaatttgaacccagatgcgatttaaataaaattaacaaatgaaaatgatatttttaggacaattttgtttttgtttttgttttttaattgaaaaataaacgtaattatagaacattttttttaaaaaataaattttaaaggatttaatttaatttgtgtgattaaaaaatttaaaaacaaaagtattaccaaacactgttaataagcatgtgaatattttagctttagttgacaataatatttgattttatttttaaagttgtgttaattcaagcatttttggaactcagtggtgaagtgcgaagtaggttcaaatttcaaaccatatcaaagttataattttactatcattcactaacccccaactcaagtttaaagttcggactaacattattattcaaggacatgttccaatagggtttgaaagggaaatttgattttattcatgttataggttaagaataaaaacttaaacctaagttgttcaatattggtaatatatccacatttcattgtataccctaaattacttatctcatttaaaaaaactacttaaattttctcagccttctctctttcccactgataaagctctatcccacttagtatatactaggaggccacgtggtgagtataagtccgaagtttaatttgttaaaagggcttgttaagtatgtaagaatcatttagtatttttatcctttacttttcttatttgttttagtggctgctgtaataaggggggcaggggtcaaattcaattattggccaaatcttataaataggaagctgagaatctaacttgggataactgagatttagatgagttgtaactcaattgggagagaaaatcctctcgaatggttgaattggagagactagcctctcgaaagctaggtgtaatattggccactaatatcaataaagtaatcattgtaagggattaattttttggtgtgttgaattgtagatagaaacattctggtctaaagaaagttctatcgatttggtgcggtgactgcggacacgatgcctaagaaaccaacgctatcatggtgtttgaagaggatttgaggccttaaagtcagaggttttaggactcaaggattctctcaatgattcgcttaagggtttagctctgtgaattcaactacaacttcaagaattgcttcaagaaatgattcaacaacagttcaaagccctattggaagttcaagaaagatcaagaacagtctaacaaaccagagaagaaggactagcaactgctag

SEQ ID NO: 231741 - DNA, 804 bp, Cannabis indica
aaccgctggaaagaggtcccctctgaatgaatgtcgaaaggaatcagacaattcacaatgacaaacatcaggtgcaaaatatccaagcaatgtgggaagatcaagagaaaagaatagaaatgtgaaagggcagtttaaactgccaaagaggagtagagggaacgagagccggagaaccttcgccctcgctcccctccaagaaaaatatacaataataataataaaacaaaacacacatcattagacactcatagaaggaggtgttctacatatggtcgccatggctgctgcttggaaataacatgcatactatttctctcagaaagaagaactattatatgtcaccatttgccttagtgaccaaagagaaaatatatatatttagaaagagagaagaacttacacgatgaaggcaaggcagaggtagaggatgtcgtacgacggtaatactttcctggcaacggtggaggaaatcggaggagtctggaattttgttaagaagtttgaaagcctgaaagtcgaaaaacaatgaaagtgagccagtcgtaagaggtactggtttttataggactaacagggtgtgagatatcatcgaatgagtaccatcgaacggtaggggttcacaatggttcaaatcccaccaaactaacggttaggatgaaaatgcatgatgaagagaaatggcggttgaaatgtttgagtatctctctgacatctgcattaatgtggaggttggtcaataggcgggaaacgaatcgatgtctgctaagagacaagaaagaatgattacgatcattaaaatga

SEQ ID NO: 231742 - DNA, 1129 bp, Cannabis indica
gctgcagtaaatctcgcgtttgacgaacaaagagcctatcaaactgtaggtcagcaaacaccgaatgtcattcccctgggagaaacggaagatgacccgaagatgaatacttcccagacaactaatggtcagtcgcccaatccccagttacgagttccgctcgtgggccaagaggtaggcgggcagaccttgtccggtaattcattaggagaatccatacctgatcgctccaacaagaataatggcgttattcaacttgtcaaccaagcgaatcaatcattaaggcaacaagactcttctgtgtttgataggttgggaacaacccatgacctaaggaatgatctaaatagaagaaggggaccagacgagcagaatactacaacaatcgtgcagcctagagcccatactgaaatcaccgctcagaaagatgctgacgtaatccaagtcgaccagaatgccaagcaggtcagccaagccatacaggctcagcttgacgaattgaaaaatatgtttcatggcgtcgctggaaagcgtaacaatgatcttgagtttgaccgagctcgcggaactcccttctcaccaaagatcaatcttttgccactgcctcacaagttccaaatggcaacgtggaagatgtatactgggagagaagatcctctttcccatctcaagtactttgagatgcaaatggatttacaaggagtacggggggatgtatgctgcagaatcttccccaccactctgtcggaagccacacagcaatggtatttcaagttggctcttggaaagtttagttcatggaaaaccttttcttcggaattccgtgcgcaattctcttccttgtgttagctcccattgcatttgggagatttggtcgaagtaaagcaacgaccaggcgagccactccagggatacatcagcagattcatgatggaagtgaccaaagtttcgcgggtaaccgaggatggaaagttatccacggtactggggcgacattgaagtccttggtaaactttggtaggatataaggaagaacgggtcggtagactcaatgtgtgatttccttgaccgagccgaaggcttcatcaagctcgaagaagccattcgacgagcagaaggtgagcaaaag

SEQ ID NO: 231743 - DNA, 947 bp, Cannabis indica
gtatttgtgtaataaaccaactttgtaagtaaaaaagtagatataagcgtgtaggagtatttaggtaataaattgtgcaaatgtgatttttcatgtaaaaatttctaaaatatatatgttccttttaaaaataaataaaataataaaatatatatgaatgttcattttaattaatcaaaaatagagtgaattttttatatttactaattaatacatatatttttttacacgaataattattttgattttatgtaaaattaacactaaatataataatttattattattattattattttatttgaattttttaaaataatatataataatcatgtgcacaaccaaataatatataaacacaaactgagtcgtttacacaaatgataaagaggaagttgtggaaaaacttcgaattttgatcacctaaattcaactaatatactctgaatcattattgccaatatacctcctcttgctctaaagatcatcacaaaaagcttcagaatttagatcaatagagtattgcgagacattattcagatctgccactcgagattgcacctttcagactcttcgtttcatctgtccatacttgctaatatgccattgttgtagattcataacacaagattctatattttgaaccacaacaccaatatgatcattagaagttatagggagccaactttgagctatgatacccttgctttaagggtaagacaaccaaagattttcaaatttgaatcttgtacgtcttcaattttgttgaaaaggtactgctattagcttgatggtggctacaatggcatggtgattagactgaaagtactctaggtgttgaacatgaggggcagcaaaagtattagtgcaatattgattgacaaaacaccaatctggccttcttttaattgtggctacccccatttttaatccatgtaaaatcatca

SEQ ID NO: 231744 - DNA, 761 bp, Cannabis indica
tgtaagagtaagaaaaaaatttgttaaatttaccctaaaaagaatgatatttttaatttttaataagggggccattttaaacaaatagaatgagaaacctatttacatattcacgtcttagtagtacgaagttattgtgcctataaagaagaaatatttcgagatggcttcgggccacatttcactaaggggtaccattatcagaaaagggagattttcactattttgataaaaatgattattagtgctttaaatctacgtttcctctctacttgtccaaaataaaaaagtgatagacaacggtcttggctccctccttgtgaaatttcacgttttttccgagttgtgtacggtgagattttaagaggaaactaattagtgtaagagtatgaaaaaaacttgtaaaaatttaccctaaaaagaagaacatttttaatttttgaattagggggctattttaaccaaatttaacgcaaaacttatctccatcttcaggtcttagtagtacgaattcattgtgcttagcgggacaaaatatttcgagatgggtccgggctatagttcataaagaggtaccactaactagtaaagtgagacttttacttttctaataaaatgattatttgaaaactacatttcctctccacttgtctaatagaaagtgatggacaacagtcttggatttctccctgtgaaatttctaaatttttcgagatgtgtagggtgagattttaagagaacactaacaagtgtaagagtaa

SEQ ID NO: 231745 - DNA, 2154 bp, Cannabis indica
agttttttttagggcataaaacccaacagtaggcttgggaggagatctcgaattagttagacttagagaggtcgtctatcaagctgacttaactaaagaatcacgtgctgctaattgcgatgtattcgctcagtagagatgcggattcttgagatggttggatgaccaagagtacatctttcgatctcaccagccagagttggattgccgcaatagaggacccaacgacctgataaggtagttcaatcagagaaacaatggaagaggctaggatctcattagagatccactccaaggaggactagttgatagattagggagagtttatcagcaagctgaccaaccaggttcttcgggaaccaagacattccttcccatacctgaaggaggataggccttgccatgaaggtctaatggcgagaatagccagatcgtggcagctagcagtctagtgggctgactagggatcttaggctcaacaacagccccccatttaccaacctttagctagctagccacttgtaggagtacctttggctggccaggggagtacactcccttcataaaaggagagagccactcaaaggccaatctttaaccggtgaggcctaggaacgggtggcaacacccaagacaacaataacttgaggagtgaatacaatcacttcagacatttagatccaacaaactccaataattggtgtgatctaccccatgtcaacgcacaggctccaccagccagtcaaggaagaatgggcggccaggtcatgcccagctcagggctggtcgaccatctgctagacatagggctggccagccttgaacataccctctcccaaggtatggtcggccaagctctagccaatccaaggctacaactcaatcaagaaaggccaatcaaccaggcccttacaacaacagatccttctgtgcaagcacaattagatcatatatgagacatgctcaagggcttggctggccaaaaaccatcagactttgagctggacaggtcaaggggctcacctttctcgacatacatcaatgccttgcccttgcccaaattcaggatgccaacttggaagatgtacacggggaaaaaagatctcctagtactcctgaaatactttaagatccaaacaaatctctaacaagtatctggagatatgcgatgccgaattcttttagcaactttagttgaaatagcccaacaatggtatttcaagctgctaccagaaaatttaattcttgggaagaattctcgagagagttctatcctcatttctccgcttcaagacaaataccttcacgattgaaggatggatcttgtcaaaataaagcaaaaccagactgtctgtcacaataagtcgatattgatttttatttttaagaaggttgattactattttattcattatttttcttttgtttactttttttaatcaattattaaatacataatgtgtctatcgtttatcctacaggaaaatttattctctaagactggtatgacgctctaaaattactttaaaaacatctatctattcttttctttaatctctctctttattttaattttattctctcaaatatttattctttaatttttttaaattatctataacgaaatattattataatatgtaaatctactttcttttaaaataaaaattctaaactatttatatataaatatatacttataaatttaatattattaataatattaataaatttaatatatattacatacatattcttctcttaatttttcttttgttttttttattgtgttttaatttttgaagaataatagcaatcttgatatatattatttgtgatcaatcccaatttaaaaatattttactttaagatttaatatatcttttgatattctttactctctactattccttttgattactaaattatttagaagtcttcttaaaacgctatgagaagtatttattaattttacattagttttaagttttttttggttcaaaattgatatacttatttatgagaagacaagttagtgtaaatgtatattaaatataatttatttagatatatgtgtaatttttttttcttaaagctatttaattatatatatgtgtatgatataaaatatcacatatatacatgaattaattg

SEQ ID NO: 231746 - DNA, 708 bp, Cannabis indica
gatgtgccttgtgggtagaatggtgaagtccctaatgaaattcgatgtgggtgaatgggatgacgatgtcttaaatgatgtgctcactgcaagagaccaagagctagtgtggaagatacctttgtcgactgatgttgaaagtgatggctggttttggagaaaggaatcatcagggttgttcacagtgagaagtgcatatgcaattctgtagcagcaaaaaaccagcatggagcaaccgattttttctggtgcatggacgaatttatggcagcttaaactcccccaaaaagtcaagaatttcttatggcgtgtgtgcaccaatagtcttcctacccgatttcaacttacaacaaaacacgtctctattaattatgaatgtcctatgtgttttgctgccccaaaaacatctttacatgtcctcgtacgatgcaactttgctcaaaactgctagaggtaggttcaggttcctgctgtaggaactgctgcaatgaccttttgcagctggtgggaagaagggttaagaaagtggaacacggcagaatgcttaaaggcaggtatgattttatggtcgatttggaatatgagaaatgaggtgatttggaatgctaaacagcctacatctgaggaagtgttacttttggaaaaactaaactttgttgattggtataatgctcaaaaccaggaattaggatctcctaatgaacccaa

SEQ ID NO: 231747 - DNA, 1732 bp, Cannabis indica
tctcttaaagtgctacacatgacggttgggtattgcattttgatgcctcgagtgaatattctgtgaagatatgatatcatttggcttgttcattggaaacgcaagacctctcttccagctcactatcatcagcaacatgattaaaatctttttggaatttaaaattaccatctaaagtaaaaatctttgcttggagggtcattcacaactcaatacaagtagctgcctctttgtttcagaggaaaataatcaattcaagtaccttcagtttatgttctaacgcattggaatcggttggacatgctttgtttagttgtaagcatgctaaatcagtatggcattcttcagactttacttttgattttgcagtagtaactaggataattgaaggtcattttctaattcaactgtcaacaacacatacaaaatcttatttggaaaagattatatgcaccatgtggtccttttggtttgacatgaccaatataattcatcacaaatcacaccagaaaccagttgaaacttatgcgaaatctatgacatatatctgtaatttttagcaggtttctacttcaaactcagttcattgtttgaatcatactttagctgatcataaaccatggacatctcctcctcaagggcaataaatctgaatgttgatgatgcaatacacgcatcacaaaacagaatgggctttggtcaaatcagaggactccaacactaagtttttccatcaaaaggctaataccatacgcaatggaaacaagatcaactctctcatggattccaatggcattactcgcacttcacactctgatatttgcaacattattgaagattactttcaaaatatttacacatcgaatgggattgataatgtcgcattagatcaagtcttgcctactgttccatactctttcactactgatatcaaccattctctggtgcaaccatatacttctaaagatgttttcagcgccttctcttccatgaaagatgatagcagcccgggtttggatggcatgtcagttatgtttttcactaactactggcacattgtaggtcatttagtcacaacagcagttttagaggttttaaatgaaggtgcagacccttcggctttcaaccagaccttgattacattgatccccaaagttaaaaagcctacttctatggcccaattgagacctattagcctctgtaatgtgttatacaaactggtttcaaaggctattgtgttacgattgaagccttttctatctatggtcatcttggaatcgcaaagtgccttccttcaatctcgcctcatcaccaataatgtgttagttcctttcgaacttcttcactccctaaagcatttgaagagaggaagagaaggatatgcagccatcacgcttgatatgagtaaggcatttgatagggttgaatggcactttattgaaaaaatgatgactgctatggggtttgattatgcagtggtgaaccttatcattcgatgtatcagtactgtttctttctctttctcagtgaatggttctactcatggtcatatcattccctcacgtggtatccgtcagggcgaccccttatccccctatctctttataatttgtgtagaaggtctatcacggttactgcaacatgaagaacatactggaaatctccaaggaattcgaatttctcgtggtgctccagctatctcttacctatattttgcagacaacagtcttgt

SEQ ID NO: 231748 - DNA, 1096 bp, Cannabis indica
gattggattggatcggatactttgtgaacacccctacataagggtactgtcaaggaggtgaggaacgttttttcattacattaggatataatcgggatataacaaatataagaggatataaattaaatatatagaaaagaaatgtaaaaatgaaatggattaacaaaaaaagagtatatggtgcaatttccacttgaatgattgattgggaggttaaaatttgtttttgtgaaagcccataaaaagaagaaagaagtaaaattaatctttataaaagcccacaaaagaaaatcccaaccaataaaatagaactaaggtccatatcgcgaaaaatgggataacatgacaaggacccccaaactatcatgcaaggagaaaggaacaaaactcaagcccaatccaacagcaatccaagataaaattaaaccagaccgagctcaagagaaagccgacttgattctagatcgaaatgagccagggcaagatcaagtcaaacagtgccaaaataaataatacctcgggataaacacaggcaagatcaagacacatcggggtcgagacacaaacttatctcgaacccacgagatagacacacactaaaaatataaaataactagaaacaaggatacgacaggacaccaacaaattttgagatagaaagatcattacctcccgatccaataaagaaacgaattcgaaccagtcaaaactaaattaaccctcctgaagaaataacccccatgcaaaactaatcattagaaattagcacctcataaagacacgtgtccgtagaagcatttaaggaatgacagcacaaccatacatgcatgggatgcacaaccatcctcttcaactacaaagccctaatgcaaaggcttgtccatgggtctcgactaaaaaaggcaataatagtagagttagggttgaccctggggagggttctgacaatggcaaggggttatgtggcactcaaggtagaagaaaagcagcacacaaaagaagtacttagaggaacctcgaccatagaagattcgatagcatacgaagcaaatgaaagaccaacaattgcaagaccctagcacgtcaaggtaatgac

SEQ ID NO: 231749 - DNA, 903 bp, Cannabis indica
tattatattgaattgtattttatataatatttttatgtaaaactatatgtggtattaagttttatgagcacctaaatatataatcttttagtataaattaaagtttaacacagtattatataaaaatatgatatataatcaaatttagtataatactatacaatacaatatgacctaatacgatgtcccaaacgagccccaaatgtattatttatgtcatatgtaaatatttataattttcatgatttgtgctcggtaacgatggaaaaagtgatggatggccactaaatcacatgagtaagtttagaacctaattctttgtggggcaaacataagtgaaaattggaatatcagaattaggcgatgttattgtagtggaacattttacccctaagctatttaatttgttaagcttaacaaaatggtaagttagtcatttatgcttggttattaagtggattaaccctttgtttgatacaactgaccatttttatgtagagataaacttagaatttatgataaacttagaatttatctcttaggttaaggaaaataattaagatatacatagaaagaaaagacaaaatacaaaacaaacctattcaatctctctctccctttttcggctgaagcaaaaccatgaggaaccaactgctaacttctttttttgtagaatatagaaaggattctaggtggtttttgtggagggaagccctaaaaatgattactctttaagtttttaagcttttacttggataatattatgcaatttctagcttgaggtactgtttgagttgggtttggttttagttcaatatctggtttatatttaagttgaatcaggttaggttctgctagtttgttggtttgaggagtggttgagcaagtttgagttttcaaact

SEQ ID NO: 231750 - DNA, 1000 bp, Cannabis indica
aaggatgtcgaatggaatatcaagatcaaagaaaagttcgaaacaagtcttttcttaacttttacatttgcatctgaatcaattcaaagcagaatattaactaaaatgccatggtatttatctaatggggtgctaatcttgggcaaaatggagaattctaatgaatcttggaagaatgatttaactagctttcctatatggggtcgggcatggggagtttcgattaatcttttgactacaaacaacacagttcgaatggtagccaaggcaggggaagttattacagtgcaaaattcagatatctccaaaatggtagcagatagctttttccgattctgaatctggatgtctatcaacaaacccatatgtccaggttttcccctcccctgtagcggacaaaagaagtggataacattccaatatgaagaattacctttcatgtgttttaagcgtggaagaattgggcatagccataaagactgtcaccaagatccaatcatgattcaggaggaaggcacggagggtactgctgcgtatggaaaatggttaaaggttagaaatgggatccgagaaggcatacaaggtgatagatatggaatgggaaagaatagtgctatagaagatactatgaagcaaccgacaaccaccattggaagggctactactgtttcttcttctccttctctagttactatgggagatgtaagaatagggagtatgaatgggacagatagcagagaaactaatcaaggcaagatacaacagtttttagaaggggggtcaatgcattcatcaatggattctggtttgaaggcaggggacataggtaaagaggaaacccagggtaggagtgatgatggaagtcggggaaaacgtcgaattgtggaagactatggagactcaggctacgggaagctgaaaaaatcagccacggtcttatccaaagaaattcaggatcaagatctctataacattccagtttcctacgcacaagaagccc

SEQ ID NO: 231751 - DNA, 2331 bp, Cannabis indica
tcgcagaaccaataatactatccgcatgctcactgatgaccaaggcattgaacatacttcaactgatggaattactcatgttgtccagtcttattttcaatctttattcacctctgaaggtattgatgctgctgctctccatcaggttatttccacagtcccgagtctcatcacagcagaaaccaatcagattctaactcggccttacacagctactgaagtatacgagactcttaaatccatgcaatctgatggcagctctggaattgacggaatgtccgtcatgttttacactaattattgggaaattgttggcgatcttgttactcaaactgtccttaacattctcaatgatggaggtgacccttcaagctttaatcaaacagtcatcacattgatcccaaaggtgaaacggccaaccactatcactcagcttcgtcccataagtttgtgtaatgtgctttataaattggtctccaaagcaattgttcttcgattacaaccgatccttggtgatgtcatttctgaatctcaaagtgcattcctcaaatcaaggttaatcacggataatatcctcatagcctttgaacttttgcattctcttaagcacttaaagaggggcaaagaaggatatgctgctatcaaattagacatgagcaaagcattcgatagggtggaatggcatttcattcagcatatgatgttaactttgggttttgatccttcagttgtcaatcttattatccgatgtatctcaagtgtctccttttcgttcctcattaatggctctattcaaggtaaagttcttcctactcgtggtattagacaaggggaccctctatccccttatctatttatactgtgtgctgaaggactttcaaggcttctacaacatgaagaatcaagaggtaatttacatggtctgaaagtgtctcggcatgcccctagtgtttcacacttgttcttcgctgatgatagtttgcttatatgtcgggccaacaccaaatcggctactgctcttaaggattctcttgatgtttattgtcgggcttcaggccagaagcttaatcttgacaaatcagttctttcattttcaccaaatactctaccttcggttcaagctcatttgcatcaaattctccaaatgccagttaaaccatgccacgaacggtatctggagctcccatcatactcaggaagggataagaaggtgttgtttggagacattaaagagaaactttggaaacaattatctgcttggcaagaacaactgttctctattggtggaaaggaagttttgctaaaagccgtagctcaatccatcccaacgtatgcaatgagttgtttcagactctccaagtctcttattcaccaaattgaggtcatgatgaataaattttggtggggttcaaactcttctaaatcgggtatcaattggaagacttggtctgctctttgtcaaccaaaatctgaaggtggaataggttttaagagtttcattcacttcaaccaagctatgctagctaaacaggcttggcgggttttctctaatcccacttctttgctttgtcgtattctcaaagctagatacttttccaattcttcctttctggtttctaacaaaggctcctgcccttctcttacttggcaaggaattgtttggggtaaagaacttcttgtaaagggactcagatggaaagttggttctggtcaaagcattttgtgtaattctgatccttggattcctggtataacaaattttttgcctttgcgatcaaatgggattgaaccagatcagcgtgtatcttccctcatcacttcagcaagacagtgggatttgaatgtcttaaatgcctcttttcttgcttcagatgtggataaaattcttcaaattccattacccattttccctgctgaggatactctaatctggcactttgaaacaaatggttcgtacacagtaaaaacgagttatacattggccactaatttagaagaacagcaacctgctgtcttgggcattcaagttcaaagctggtggaataaattctggtctttctctcttccatctaaagtgcgaattttcttgtggcgggctctaaatgattgtcttcccacagctgcaacacttcatcaccgacatattgttgattctcctatatgtccaatctgtaaatcagctgctgagacaactattcatgcgttgtttttctgcaagagaccaaaaaagatatggccaacttcatccttttctctttcccatgtgattactgaacatatgtcccttacataaattctgctttatgcttcggattcgtggacagatcttca

SEQ ID NO: 231752 - DNA, 580 bp, Cannabis indica
catagctcgtaatgttgtttttaatgaagatttcttccctggtgaattcattaacacaacattaacttctgaagcaccaccacaggtacattctacaccaattacacctcttgtttttaattcaacagtttctggtgttcaatttcacaatcctaatgatgttgcttcttgtgtattaccatcgggctgtccaaattatgcaacatgtggtgctaatattaatgcaccatctggtgctgatcttcatacaacatttaatgcaccatctggtgctgatcttcatacaacatttaatgcaccatctggtgctaatattaatgcaccatctggtgctgctgttggtatattgtcttctgaggcttccccaaatgttgcatgcatgctacctccaatttcccatgaccctctatccaccaccaatattaatcaattaacagccattgttccctcccaatttccacctgacccgactatacatcagcctcctcaccaaaatgataaccccataagccacaataattgtcccacacctgtagccactgccccaactacacagtccaatactcacccaatgcaaact

SEQ ID NO: 231753 - DNA, 627 bp, Cannabis indica
tgtgtgtgtgtgaatgaattatatttatgcttattttaattaattaattagtaaaatatatatttgtaatcatcttaaataatctatcaatgtttattgtttacaatacctatgaaaaagtgttatttttcatagtgggataaggtgtatgaggttaatgtagggtactttacaaaataaaatataaaataaatattattttgaatcgtgtattttgtaaaaattattgaataaattccttttaacttctcacgattatttttttgatctttctacaaagatttttttatttgaatggatctttctacaaagatttaagtgctatataattctgtatatattgacatttctgtaggggtccaattgtatagttgtcaagcttccttttataaccatctcatcttccattaattaggtttaattttgagtgggcatctcccattaatgaccattaagtactttaataattgcttgcaaaagaaaatgttttacttaaatatttatttttactaacatattggtaatatgctaatacaataattattaatgtaactttatcaatgggattatctacaattagtttttaaatttaattaggttatccataaagttaattagtaatttttt

SEQ ID NO: 231754 - DNA, 925 bp, Cannabis indica
ttatattaaattatataaaaactcgataattaattgaaccacagaatattgttaggcaatactaatatcctttagcatttatcatatggaagtggaaggtggttgtgaggaggctcggcaatttacacgtgttcctttgtttatgagtataggaaaggagaggagaggaaaggacagaagagacgcttggtcgatgattacgagagacttaacacgcatacctcctcacactctgggctccacctattaccggggtaaaaatggaaattagtgtaggctagatatatcatatcattatcatgattgctatatatcttttcccatttttttcttttcatatgtagatatgttgggtataaattttaattcttaagttacaattaagattgcaaattgtctttcttaaaataatatcatctagtatttttgccaaaagattccaagaaaaaaaaaaaaaaaaaataacatatagaaggtatttatcatgtttctggaacaaaaaaaaatctttgtcttatctaaaaaaggataataaaataaaaagaaatagtaataggaatcttcaaaaaggtgagaaaagaaagaaatcgttattgaaaaggataaaaactagggtgtttcaatgtaccactttaaaatgagtgatacacctctctatatttttggtactagttaactaaaactttcttaaacaattttacaactttgagatgtaataatattggaaataaacatttatataaaataaagagtaaataacagcatttaaattttagaatttgttagtactataaacttaataatttttttaacaacgtaaatactaaatatttataaaattataattttttttagtacaaattttgtaaacgtcttaaataagacacatagggctcgtttggaaagccgtattaggtcgtattgt

SEQ ID NO: 231755 - DNA, 991 bp, Cannabis indica
tttattttcttacacaattttctctattttatagatcatattttttctgagatttaactaatttatacatttcaagtgtgaatcaagtttctaagaattgaaacaacaattaattacagctccaatgttggctttatcataagattaggaaaagtttgtggtttatagtgatgcctccatacagggtttgaggtgttaactaatgcaagctgacatggtctttgctcgtgcttctcgttagttagaggagtatgagcaacattacccaacatataatttaaaacttgtcgcagtgatgtttgcattgaagatttgagggcattatctctatggagagaaatgtgagatttacactaaccattagagtttcaagtatttatttacttagaaagatttaaatatgaggcaaaaatagtggtaagagctagtcaagaattacgattgtgagattctttatcaccccaaaaaagttattgtggtagcagatgccttgagtaggaaaggtcccaggcaggtttttcagtatgaagatgatttctccttagttagcaactaacatggttaaggtaagcattgagtttgtgataggaaaacttagcaatttgaggcttcagtctgatttgctaaaaaaagattgaaaatgctcaagtggaagaccctgagttagttaagtctcgggaggaaattttagttgatcgagctaaagacttctcagtatcagatagtggaatgttactttacaagaaaggagtatgttttctaaacagtagtgagctcacaaaagagattttagatgaagctcacaccactccttactcattgcatccgggtaccaccaagatgtatcaagacatggaatcctacttttggtgttgcggtatgaaaaatgatatggtagattacgtaaccaagtgtttgacttgtcagcagattaaggctgaacatcagagacctgggggtttgttgcaacctttaacccttcccgagtgga

SEQ ID NO: 231756 - DNA, 825 bp, Cannabis indica
gcctaccaagcatttatttttgagaatctatttttgtttttgagaaacatatttatttctaaaatcattagatttaaacatgttttgtatagtaacacatttaggtcgagtgtgacctttaatctcacaaaaatgacaaatatgaatgaattgtcttctattccctttatagttatcaaacttactgtgctgcttcttttctgtatcagcagtgtattttgctgcaataacataaccttgcaaggtagagacagaacctccagaaatgaaaatattagatttaacaaatttggtatttgatttggattgagtcgtaacataacttagacccgcatgactcgtttgacctgaattttgaatcttttcaaaaatattagaacccagatttagcattttgacatttcttttaagattttcaagttccttagttaaagagataattttagactcttttaaaatcaatttagattcacaatatttatttctttctttaagatctttgatattgtgacaccaatttttattaattttaaccaaggagcaattttcagtacaaatttccaaccatttacaaaacattaccttgtaagattcagccatagagttctcatcaagatctgactcatctgagtctgatccatctttttttccattgctatcggtcaaagtattattcaaacatatgaactttcctttttcctacagatatcttgacaaaacacttgttagagcaattttttctttttcaccctcactactttcaaagtcatcactccaagtaactttaaaaccttttttatttttctttaaggtattggcacattc

SEQ ID NO: 231757 - DNA, 1221 bp, Cannabis indica
tgaaatgagtaactctaaggtagagagtactccacttgcacaacacttcaaaatgagtgttactcagatgtcagaagaagagactgagaagtcaaagatattgagagttccatatgctagtggtgttggcttcctgatgtatgtcatggtttgtactagaccaggcataacatatgcattgagcatggtaagtagattcatggaaaatcttgaaaaggagcattgggaagccctgaaattgattatgcattatttgaagggaactgacattcgacatgaataaccggaatgaatactttgatgtgataaatggttatgtgggttctgattgtgcatggtgtattgatacccgacagtctttaaccagatatgtgtttactatatatgttcgaaactgctattagttggaaagaaaatctctagaaggttgtggcgctatcgacaattgaaggagagtatatggccttgacagatgcgatcaaggaagcactatggttgactgggttaatggaagagttgaaactcaactagaaggttattagtgatcattgtgattaccagagtgcaatttaattaattaagaattgtatgcatcatgatctaagcacattgatttcaagcttcatttcgtacgagaggttgtggagaaagaagctgtgaagattgccaaagttccaaatgaagacgatccttctaacatgataatcgaggtagagccaagtgtgaaatttgagcactgcctgaagctgattggagtcagctgagcccggaggagctgaggggacaacagtattttaacaacgatttattaagcaacttcaacattaaaatcaagttggagatttattgattataattacaagttttgtcattcgggaagctatgttactccatgttactccataaagaaattacaaaaagcttggtagtcatctagaagctttgttagtaaagttgtggtcaatctggatggttcttccatgaagcttctcttccgtaattgtagtgtcttccggatagcttgtcattaatccagagatgcacttccaggtagtttgtcattgatctggagatgcactttctgggtaccttactgtcagtcaaggatgttcatctaggaggagcgcttgtacgtatcagcttatctgtattaaagcttctgaaatgtctgtaccaaataaaagtgcattatcaaagctgatgtggattattattgctggt

SEQ ID NO: 231758 - DNA, 901 bp, Cannabis indica
taataataataataataataataaaaactttattattaataattatcttattatttcttagccattaagaaatctatacttctagggcgctaatttaaattttacatattcctaattaccccaatacatacactatcagctaatcacaatattcccattaaaactaataactaaacctgttatgacatttttggcccccgatcgagtctccaaggttgccaaacctgaaaatatttttattccacgtttagcttatattacattaaaacatactatataaatctccataatttataaattacgcttatttacttacttatagcgaatttaaaatttatgttgaactagattagtacgatcataatcccactcattatctaattaacccataatataattagaaaccctaattatttaccattaggcttattgggatattacaaccatcccctccttataaaaatttcgtgctcaaaatttacctaaataatttggggatacagctcctctgcaactctaattctcaagtcgcttcctcgtaaaataagttgtatggaatttaatgtcatcgtaactcaaaatacgtatcggatttgacacatactttgttaacatagaaatgtggaagacattatgcatccctctcttaggtggtacaaagaaaatactatgtctctgaccctcaaaatatatcacacatgcttgttacagactctctcagcatttaaatgtatattttaaatgttaatctgagataattactttcggagcatcacaaggttgaactattcccttgacaaatagattagcacactaatccgtaacgggaaataccacgtaagctgtgcaatcccacatcccctagggaaggtcaagtgggatgattctgagactgtgtagg

SEQ ID NO: 231759 - DNA, 926 bp, Cannabis indica
ttttttaatatttttttttttgagatatgagtttataaaaataagggatattggcggctaaaccatctaaactttacgttttgtaacacttaaccacaaaaactaaaattttggtggcaaaacctactgaactcccattctgttttgctctatacccctctgtctaaaaattacaattaactgctatggtggactgctaaagtgtatactaatgtatacgtgtcagaatttaagtggtccacgtaatattaaaattattttaaataatttaaatttttattttatttttcttattctttttctgttcttgtcgtcttctttgtgagccaacaacctgggttccattactattactatcaccacgaatatttttgcaaaaccaacaaaacctagaaataatgaatcaccctaaaactgccatagttatcaccatccaccacaaccaccacactacaagccactaccattaccgccaatatttctgtaaaataaaaaaaaaaaacatacagatctgaaataaaaaactcaaaatggagcatcaccgttgaaccaccatgcaaggtgactgcccaagttcgatagtgacgaaaggggtattgaactatgagatcaagaagcccatgtcaagaagaaaatacatttggagactattagtcgaaaggaggtccagaagccatcgaatcagagtcaaacatctcaaaactccatggattccggcgatggtcaacacccgattttaacgatcttcaagcccgatctattgagggattttgttctcctagacctcccgagtttaaccataccattcactgtccaaacctctgagggtggtcgttctcttcgtgcagcgtgtgtcgtcggccagtgatggaataccatcgtcgggtctggaggataaaccaccgagagtgaaggagagggagaga

SEQ ID NO: 231760 - DNA, 558 bp, Cannabis indica
tgaagatgctgttctcttagagttatcaacgagctgtaatgctttttctccacagtacatggagtgagagagctctttcttttcggagtgtatgttaccgattcagacaagatccttctttcgagttacaaggtacaaaatagtatgccttgaggttatttatgaaaaattcagtgagaaactcgaatttttggtgatggattgagaggctgataggatcattggcttacctttggtgaagttttgctcagagtgcaatatcaggtcatgactagtgattttgcataacgttctgatgtaaatatttcaagagggacttctattatatatattggttgtattgaccttagctagtaactcaagatttttatagtgctctttattaatatgtagatgtatgtatggattgatatttgataattaatgtttcaataacatatggccctactgtgtcgtttgccaattatttctgtctttttacctttgggaaatttgaatttctatgcatgtattaggggataattttttttcctaaactaatacttttctacattgaaa

SEQ ID NO: 231761 - DNA, 959 bp, Cannabis indica
tagtgtttgtatcgaataggcattaaagcattgaacatgctgtcgaggttattttccctgaagcatgccactgtgcatgctatcaacatatttctatgaatgtcacctacaagttcaagactgatgtatgtaacatgcaaatatggctggtcacttacgcattatcgaagagagaatgtgatagacatttacaagtgcttcaacgaatagatcctaccattgttgcttatgttgagagtatagaattggaaaagtgggctcatccttattgtctaggagacaggtacagcataaggacaaacaacgctgatgaaagccttaataatgtgacaaaagaattttggaaatatccattaactactctagttgaattcataaggttcacactgcaaaattggtttgctgaccgtctcgaaaaggtaagtaagtgcactacccctttagcaactcattttgaggaagatttagtaaagcaacacggggatggtaggtttagaaacgtcctacgtaactgtgcacatttgtttaacgttggtagaggttctaagggtgagaaaggtggtgatgtgaacttagttatgaaaacatgtacatgcggcatgttccaattgttaaaaattccttgtccccatgcatgtgtcgcgacaattactcagaatgtcagcctgtacgctttgtcctccctttattacacaaaagaggcgtggaagaatacttacaatgcaacaattaatcttgtcggtgaggatgatgattgggtgcttctggaacacatgcagaacatgagagtcggggtaccagtggagaagatacccgtaggttatccaaggaagaacaatgtaggaagagtacagagtagtcgatatccatttaacggtcaaaaagttgtggaacatggccattgttcaaactatggtggcttgggcaacaacaaagctacatgcaaggccagggtttga

SEQ ID NO: 231762 - DNA, 1138 bp, Cannabis indica
gacattgatgccattttagctatataaatattttgttgctttgaagctactaacattcccccgttttttatgtatttactttttttgctggttcggtcgaattaatcaacatctaaatattgaatgactttgacagtggtttaatcccacaaagtttgatatttgaatccttcacaatcatccacgtagaaatcactattgttctctgctcccaaaataatgtaattgcagtgtcctcgttggcaactccggtgaatgaggtggtggtggcagcaaaaatgagtctggattttttttcttttccttacagttacccaaaaatatcacgtgggtagaatatagatgagttaaaaataaataacaatgtgataagatactacaaaattttactacaattggattaaaaattaaaggctataaaaaaaatgcttttacttgtaagagcaaaagtgatactctcacataaggaatacgctatgttttaatagaaatacttactgatgagaaatggaatcactgttaaatgagcttgagtgattacaagccacgtcatctacaacgtattaattaataagtacaatacaattaagtcctggttataccttgtttccctattctgtaataaataataatataataataaaatacaacggtaaaaaaaattgttgtgatgaggaatacttattataaatatagaaatatattgatgaggaatagaatcaatcactgtaaaattagtttgagtaattacagttcacgtcatctacaatgtattattctatattttgtaataaataataataatataaaaaataaaaaaagttgtacaaaatacaatggtaaatacatataaataaattgatgagaaatagaattactcgagtgattacaagccacgtcatctacaaggtattaattaataagtataatacaattattaagtcctggttacacatattctgtaataaataaataataataggggcttaatgtaaaacctcacttgagtttgaggtttcacattcctcatatgagacaaataaaattaaattgtagcagtaggtaatataacttgctagagtcggtttaataacttgatggcaatttgttgtcagaaaaataatattttatttttatt

SEQ ID NO: 231763 - DNA, 791 bp, Cannabis indica
gaagtaattggcaatatagaaataaaaattactaaattcgttgtggtacacgacacacatcaaataccagggaaaactcaagagaagagaaaaatctacatctacatctagttttgcttattatctcttctaattttcatttatattatgcttgtgattatgtttgaaattatggagtagtcctcttttaggttaagggttatttcaaaacttgagacataactttttgaatgctttgataaatattattattttatttcttcacattgaattgtttatattcttctatgcttaattttatgattaatattttgatcttgtttaaacgacctctaaattaggttttagattcttctcctatcattcttaaaattcctattcacctaatagtctaagattctaggtttaagtgataatttgtttttaatggtattgtgacgagtatcattatctgtgatgaaaaatataatataacctaagttaaatgaattaaatgctaaattaattttttgcttaaattaacttgtcttcacagaatttaatacttttcctaagttaaatagattgcatgcttcgtgggtctactgtttaataaaaagatttaattattgagcacttctccataattaattgtattaaggagactgagataagtaattatctgcggggttaatagtctaattttgaaataaaatataatatttattattgttgttcttgattaattgttggaggtggagaataattcttaactgcttttaaaattgtaattatcatttattttttatttt

SEQ ID NO: 231764 - DNA, 1683 bp, Cannabis indica
aagtacttgaggtgggaaagaggatcttctcttcctgtgtacattttccaagttggcattttaaacttgtggggcattgccaaaagatttatttcgagagagaaggaagttccacgtgctcggtctagctcgagatcattatttctctgtcccgccatgccttggaacatattttttagctcgtctagtggtgcctgcacaactggactgacctgctcaacattttggtcaatttgaatcacaacagtatcttttttagcgtgaatttgatcacgggctccgggctgtgcgattgtcgtgacaaattgatcgtcaagtcctgtccttctgtttagattgctttctaggtcatgagttgtctccaacctatcgaatatggaagcgcctggctatctcagcgactgattcgcttggttggcaagttgaatggcaccgttaacctggttggaactatcaggtatgacctctcctgatgaattacttgacaaagtctgctcgcctaccgctaggcccacaagcgaaacttgtgaccagggatttggcggctgaccatttatagtctgggaagtattcatcgctggatcttcgtccgtctcacccagggggatgacactcgaaggttgctgtcctacagtttagtaggttttttcgtatcagcacagtagcttgccgactacgatttttaatctcagtatgatgagcccttaatgcttccatctctttgttctccactcggcaaacatgcgtctttgttcctcgaatgcgagatttaccacagcgcggagttcctcctaatcatgatgtaaggtattggtatgaccttgcatgagtctaagagcagcacagaggttttgaatttcagtatcatctccaatggttgttcgaacgttggtagtgggtgggatgactgtgttggtattcccagtcttttacacaccaggcgcgatttcatctacaggagtcgtcacaccatgacctacgttcgacggctgttcaagatgaacagctggcaaaacccttgcatttcctgggttttgcaatgcaggatccaccgcctgtgaattagttggatcaaccaggcccctacgagtctgtaccaccatagtacttgtggttagatttttaatgaagaacgattcttgattcttctctcaatgaaagcaccaaaatattgacctcgcttttagccaacgacactgagtcttatttagtaagcgataagtaatttatagcgatagatatatagtaaagcaatgtaaacacacaagaattttatagaggttcagccccgaacagtttggtaatatcctaatcctcgttatttgtattgactcaagaacaaggacaaaggttccttttattatagctcttacaaaggtatctctgaatatgaattcttagataacatctctctaccaaaatgtttccaccctttgcccagtgagtatgcatcactatttgtagggctatgagcttggggaagaagtatttcccttcttgttacaatggatataagtgaaagattgcataataaatacagaatacattgattgtgggatttggacagcttgccatatctctgcaatctgatcccgaagttatagggatttctttgatgactcacgatgcgaaagctgaatttgctaagtattggtcgctttgtgcggattgctgatcgctttg

SEQ ID NO: 231765 - DNA, 1638 bp, Cannabis indica
aaacttagtcgatttaagaaagcagtgttgtatgttagaactgctacacttgtgtatcaggtatggcaatctcggaatgacctgctttggaattcagtggaacaaaaggagggacaagtgatctatttactaaagaagaagttaagagaagaatcgtacatgtttggcctaaaaatgtcactacagttgatacagaatggttctcaaccgctataaagttatagaaaagcattaaatgtaatagagagtcatatagagtaattgtaaaaatattgtatagccggagaaatataggtcttcaaattgaggatgctaataggatttaaaattaatatttggagtaatgaattacactatttcactaaaaaaaaagataaatggaatctcagtcttctacaatgtgacttttcccctactgatgttgattatatatccttactattcctttatcctataataatctaaattataatttgattgggcatcacagtacctcagttgagtatttgattcagacgggctatcactttgcttgttctcttgaggaacaatttctttcctctagttctacatctcaagctgcttggtggaaattattttagattttgaatcttccttttaaagttaaaatctttgcgtggagggtgttttataatgctataccagttgctatcttcttattttataggaaaattattgattcaacatcttgtagtttatgctctaatgcttgggaatcggtggggtatgtgatgttttgttgtaagcatgcgaaatttgtgtggcaattagcaagttttgaatttgattatcaagcagtaagatttttgaagaatggttattctttcgcttatttggcttcagtttataccaaatctaaacttgaacaaatcatatgcactatgtagtttatttggaccgataggaacaattttatccatggtaaaaaggcacatcattcatctgaaatttgggggaattcatgtgcttacctctgcaatttttcagcagcttagtactattgacagtgagaactcgtcaactaagttagtggtcggaaaatgcaaggttacccaaaaatgtgatatagatatgataaagatgaaggtgaagagatgtcttaatattcctctccatattgaattcaatatctgagttgcaccaaatgattttccaaccccctctcacatctgagatggagggtatttataggctctaatggcctggtgtacaaagtgatcccatggggacaagatgtcgctttcccgctgcatgctacaagtgttggaggcagcttggcttcctgtacccttgtctagtgtaagatggtccccagttgcaggttgtaggagggtggttgcagtgtgtggtcttcaggtgcacgtgcgtggtctccggttgcatgcgtggtggtccctaggtacaggttgtaggagagtggttacagcatacccttggtcaggtcttcagaaagcgtgattgtacgctcttcccttgcacgccttgtcctttgattcctctctcaatatcattcttgtcgtcatgcattgacctctcaccttatcttcacaccctccatgccacattacacttgacacccttctcccatacactcaactcccccacatgcacacacgg

SEQ ID NO: 231766 - DNA, 1039 bp, Cannabis indica
ttttttttttgagaaattttcactattattacaaatcaaagttcatttacaataatagaaaaaataggatgagatatttcccctattcaaataacatctttatccaactttagagcatatttcgctaacccgtgagcagcttgattagcatgcctacgaatatgcataacagtaactctagggaaaaaggacaaaagacaacgaacatcacctactaaatctgaaaaacaagataaatctttacgtgacgtggccaaagctgaagaaactcggagagcatcagtttcaacttgtgttattggtatttgttgttgaaatacccaattaaggttgtgaaaaagtgctttggcttccatttcgtcacttctgaaatgaccttggactgatttggataaagcaccaactacttcccctttgcaatttcgaactactgctcccatacccaaaactttatccatagcattaacagacacatcgacattcattttaagacaattgacatccggcggcttccatggtatcccattcatagcagttgtggttgaaccagcgacattattcatggagttatgtcgcatttgctgtggaccatcagaaccttgtctagcaacatgctggtttggcacactctgctggcgattgctctgctggtatggccttgtagatggaggttgcatctggtttggtgcaaattggtctggtacatggcctctttctcttccttttgccttagctgatcgatatttatcaatatagatttgagcctgctgagatacaagaacagaggaaacacgatttgtaccatcatgtaactcgcagtttcgatcattccatatactccacattaggcagatgaaactttcaaactcaaccttatccatggattttgctttatggataacataatcttcattgaacatggcatgggcacaattaaaatcaatactgaattgagtttgcttccagacagccttagcgaacttacatgtgaataacgcatgccaaatcgattccccagcacattgacatctagagcatg

SEQ ID NO: 231767 - DNA, 1324 bp, Cannabis indica
taggcttcgttttctggttttggaaagaaatagatgaaacatatatatggtgacgtggaagaatatgaaaatgacaagtgtcatggtgacgagaacgtttcggatgtgtggggtccttcttcgccgtggtgctcagttttcgtaagaggaggagagtgagactacgtcaccttgttcgtatgtgatgtaaccgcgatggccgacagaataattgttaactaatttcttagtaaactgtggtgaaaacatatgaatttaggacttcttgttttgcgggtatgagtaaaaatgagctatttcaatcaatcaaatataaagatttgaaacaaactttttgagtatacgtctaaacttttcttctccctattctattgaaatcagtcatctaaaccattcctaattttatgaatttatttcgtttgccgatgaaaattgttaatgaattcgaaatttattgaatgtgtgctagattttggtaggggatagtgataagaaaaagatacattggtgtatttggtccggcttattttagtataaaaatgatagaggtatgagctttcgtgatctatttcttttttaattaatttttacttgctaaacatgcactaaagttattttgtcatctaactctttagctgctaaagttataaagggattctattatgccaatagttcattgtttgatattgaagagacaaaacgtgtttcttttctttggaagagcattctttgggatcgtgaccttttgaacaaggttgtcgctggttggttaagaaagttaatactttcaaaattcgggatgatatgtggataccaaatgaccatataggttgagcctattcttttaagggcagtcctactcttcaattggttagtgacctcaaactttaggtgggttgaaattctctcttattcaggaaatgcttgataatgtcgaagccaaaactatttttgtctattccttgttctttctttgatacacaagataggtttatctgacatttttcaaataatggtttatatgctagttttatggtactaaatcaagtacgcagcgaaagagttgtttctgattttatatgtccaagatcaccgtatgtgtatatatattaaactgaacgtaagttgtatcattatttagatgattagaaaacttagatcgtagccttccaaatcttccatcacacacaaagactattgtgggctagtaggaaaatagagtatagagttcttcagtttatctcaacacatgagcaataacttttctttttagtgatagagagaaaaaattaattagattgacctttttaggcttcccaaaaat

SEQ ID NO: 231768 - DNA, 1084 bp, Cannabis indica
aacaagactattcgtcttgatgatagcccgtgtgtaagcattgtctttgagccaacttaaagcctccctgatacctatactttcggccagtttaggggccaccgagccatctttaatccctgcaaaagcagagatcaatccaccatctgagtttctcaccacaaatccgaagccatgcttgaaagaggaggcaaaaatggccgcatctacattgagtttgatacctgaagacggttttatccactgctccgcaccatctccctctttaagaggagacaacaagggtagattaccctttccttgagcttttatccattggtcaagactcaaatttgcaaaagccaccacatcactcacccttctcacccgctgcttccacaccagatcgtttctcgctgcccataaagcccaacacaacattattactcgccccaacatctcactggtaacacaactagcagtagcctcaagccacggcagcaaagaagagaaagaatctcttgctacagtagccaaaccagcaacattgaagcaagaccaagcaaaatcgcaggccaccagtaagtgccattcagtttcagcaaagacatcgcacataggacaattactttccaccaaaacctttttgatacacaggtttctttttgttgcaaggcaatttgaggccgctctccaaacgagatctttggctttaggaggcactttgaaagtccacaaaatcttccaaaacttattgctcactgtgttggccgaatgatgtttttgatcctggagtaaattatatgcactgcgaacagagtagaactcgttcttctcagcagcccaataccaggagtcgacttcaccagattgatcaatgggaattccaagaatgatagccgcatctgtgggggagaagaaatccttcacaacatcactatcccagcagcgattgtggacttggaacaggctgttaacagtaaaattctcaaggtcttgaaccatgggaacagggacagagtgatccaagctaggaagccaaggatcgttagtaatttgtactgaagtaccagggccgattctcttccttaggcctagcttcact

SEQ ID NO: 231769 - DNA, 1638 bp, Cannabis indica
atgattagatgcacatatactataattgaaaaaattggtcgcataatccatcactataattgtgttcttaagtgtgatttgtactattactcgtttggatcatgttttaaaaaaaatggattgagcttgtattttggagattggttaaagataggtcattgagcttaattattatttttcaaatgaaatattagacttcattgaaatattagcattctgaatacaataaggcttgtaaatcagcccaagcattatgttccaaaatgctgcaaccagaaaaaaaatcgagagtgtctagcaacgacatgtgcaactcgatttgttgatcgctttataaaacgcaaagatacattaattaacgaggataataaagtctgacaatcaagaataaccaagccaaaagtagagttcatgcgttgattgctacgtatagcctaaacacacaacatactgtccgattcaatcactatattgtgccagttattacgcttgacccagttgagagcttcttcgattcccatagcttcaacagtctcggcagaggcacatgcttggtacccaatttttgcttcgattaatcggccagaactgtccctcgccacaaccccgtaactgtaagaaccgtctgatggaaataaggcagcatcaacattgattttgagataatctgattcgggtttaatccattactcaagcttataaacattgttttcaagagacaatgacaacaagcatgttttatcctgagcatttttccaatgatcaaaagtgacagtctttccatattgcccaacacaacattgcaacccgacacactttatccacatcatagctctgtaatatgatgtcaaaccatattccaaaggaagtggaaattgctgcaccagtatgaataccaaaagaagcccaacaggagctagcaagaccacaattaagtaaaatatgaacagtagtttcagcacaagaccgacatataggacaagaagaagaaattttcaccttcttggtgacaaggttaatgcatgttggcaaagaatccaagatagcatgtcataggaagttctttactttaggagggatctttaattgccaaagcttcctccagaacccactgttgttgggacccgatggactgcctttttaagattgaaggagatgataagcacttcgaatcgagaataacccagagctctctccacatcaagaccaaaaatctgaagtagcatttgaactcaaaggaataccaaggatcaatttggcatcacgggcagggaagagatcttgaataacatcatgcatggtcccaacagcaagaatggacatcaatcatagagttaactgaatttattaagaaggcctggatgaatgggacataccgatttttcgggtcaagcagccaaggatggccgagtatactagttgattcaccattgccaatggtacgtatagcacccattcggacaagtttttgagcatcccaaatactacgccacacaaagcttgggttgttacccaaatcagcaaagagaaaatcagttgaagtaaagtacctggctttgaaaaatacttttttttgtatcaattaatcaaaaataccctaatattatatttcattaaaaagtactcacttttgtgagt

SEQ ID NO: 231770 - DNA, 584 bp, Cannabis indica
cttaccgaatctatattataaggaatggtcagatgagatggccactcaacgaaattaccgatagcgtgccatacaaaaattaattcatccttatttataaaattacattaaattatacataagatagcttacatacctcttctaattggcagaacaattgagatcaagaccagaaatcaaataaaaccactgaagatacctgagaccactatttctcaattgttgtcttgtctctcttgatgctcttagtttaatcgcttctacctggaggtaaaataagaattatttacaattagtgccaaacaatataaaaaaaatatttattctagtcaactcataatatgaccaattaattaatagtgtcataataattacattctcatatcttaactttgttaagaccatgtgaagagttaattcaattataaaaataagactaaagagtataaagcaggcacgaaacgaaatataagtattggttatgcaacaaaaattttcatttatactttatgtgatggagtgcctctttgagcagtggacttatcattacattaatagtacatatgctcttaagaacacaaatt

SEQ ID NO: 231771 - DNA, 863 bp, Cannabis indica
tttttctttttctttttttctccttcgacttctacctctaacagtccaccccaccaccccataattattttctttctccaaccacaccaccccaactagtcttcttcctccagccacaccctaacccccgacccacctctttctccagccacactacggtctctgagctaaccgaagttccaccgcgcacggtggccgtctaccgtcgaaggcgaagcttacagaaaatattgacgaggtctaaaagatctttacgaatagaatatatttttgaaagtcgttttactcaatggatctcgaatacgactagatcggacctaagattttttactccgacgagcttttgacggcgaagggaactacgggaacctcggagctcgtggtttgaaactcgacaaaggccatggtggccttgcctccagagaacgacgtcgaggcccgtggtggcctctatttttgactgtgagatttcgtcggtggtgaaaaatatcgagcctcggatagagagagatttagggctttggagttgtggtcggggcttaaatgtttgtctttccacagttcttccatggctatgtgaggattgagcttgagggaaaaaaagtgaagaaaaggggtcaggtgtggctggaggtagaagaagaaggagaaaaaaatattaaaagaaattatattttgaaatatatttttaattcttttaattttaattattttttattaaaattattatttagaccaatatgactcatgtgttaattatgaataacttaacggatctgtcaaatttaaggctaacagaattacaaaatatgtgaccttaagaactattgcctctattttttgaggttggagactaatctgca

SEQ ID NO: 231772 - DNA, 3412 bp, Cannabis indica
gtcttcttcctccagccacaccctaacccccgacccacctctatctccagccacactacggtctctgagctaaccggagttccaccgagcacggtggccgtctaccgtcgaaggcgaaacttacaaaaaatattaacgaggtctaaaagatctttacgaatagaatatgtttttgaaagtcattttacttaatggatctcgaatacgactagattggacctaagattttttactctgacgagcttttgacggcgactgaaacggcgaagggaactacgggaacctcagagctcgtggtttgaaactcgacaaaggccatggtggccttgcctccagagaacgacgtcgaggcccgtggtggcctctatttttgacggtgagatttcgtcagtggtgaaaaatatcgagcctcggatagagagagatttggggctttggagttgtggtcggggcttaaatgtttgtctttccacagttcttccatggctatgggaggattgagtttgaggaaaaaaaagtgaagaaaaagggtcaagtgtggctggagatagaagaagaaggagaaaaaaatattaaaagaaattatattttaaaatatatttttaattcttttaattttaagtattttttattaaaattattatttagaccaatatgactcaacatgtgttaattatgaataacttaacggatctgtcaaatttaaggctaacagaattacaaaatatgtgaccttaagaactattgcctctattttttgaggttggagactaatctgcatcatagtgaactttttaagtacttctgccgcaaattttcttaaaaaaatgcaataataataagagtaatgatatgtaggtaaaaaaaaagagtaatgatatgtacacatgcacataaacttgacacatatttatgtagtaattaacgtcaattaatcatttttatttaagatggttctcacttattaaaagtaatttaccacacatggtcgaatctgggctaagacagattagacctgcgcctaagatccaccaaactatggggctcaaaaaatatattttttaattaaaattatacatatattttagtagttttcaacaataccatatattttttaaataaatggctcaataatcttttttctcctaaatatatgctatgtttgtgtgtaaattatgtttataatagttctctcttatctgttttttcttttttgaaaaagagtagttctctcttatctaaagtaacttcttaaatagtagcatatccaaagtttcaagtttgtaagtgtcatacacctaatgtttattttagcagcataaatattacataaattaatatttatgtcgcttacaaacttaaaaattaaatatttatagctctatttattttactatactaataatgacgaaagaaagagaagccaaaatgttaattccttttgtattaataaaaattagaaaacatattttattgtggtttttaatttctcacttttgggcaactcgaaacgccaaacttaaaaaaagtggaaaaagacaaaaagttcaattccttttcccttttatcttgtttttttttcctttcatcttgttttatgttttttaattttcctttttattaaaaaataaaaataaaaagcttcgaactgatcgaaggggtaaagagaaagacacgtggtcccatcgatcgggaagatgtggtcacgcgactttcggcacattggcaaggcttcttgtgacgcgcctactccacgatctctaaaccaatcagaagaaaatagatggcgcgtgtagattaattcgcgtggggtttaagtccccaaatatacgcacaaaatatttagatattaaaagtgtcgtcatttttattacacatttagtcgaattcttcttttttttttgctaaataaatgaaacattccatcatcaacaatctgtacatcgtatgaacctgattaccaaacaaatcatctcaaggtttcaaaccaacaattattgaaaccacactttatctttaattttaattaatgagcatgtttactttggtgtattcaagattagaattgaatggagattataattataatgtttggtaacttttgttaatttttttttattattgcaacgaggattacattacttgcatgaattttcattatatgagttgattcatgaatgaggattagtgaattacaatcaccaatacattataaaagattttctaccattctctcttttatctctttatcaaatgtagttgacaataaataaaatagaggatattttagttaatatattaattattcaattttttgaatagtaattaattaattattcaattttattttataataaattaaataaaaaaaattaattacaatcttcattacaaaacaaatcaaatatggtaatagtaaaaagtaattccattactgttaccattacattccattactattcctattatcattacaccaccttagagcatctccaatataagtgtaaagaagtggtaaaaagttaaaatataacccatttaacaaaaagtgtgctctaatagtgtgccaaaaggtgatgtaaatttggcacatagtaaattttgtgtcaaattaaatttggcacattatttgctatgatgtaaaatttacaccacaataaatgcactaatttttcatttatatttatgtcatttctattattttattagtatatttaactatcacattaaattatgaaacatttatattattttttttattatcttacatattaaaataataataataaaattgattataaaattattagactttattttttaataaaacattaattagatattaaattttacaccaaaattttacaattgtgcattggaacacaaagctaaaatttggaataaatttaccataaaactactttttgtgttaaatatagcacaatttttacatctccttggtcttatatggagcttaataatttattcttaagattatttttattttttaaataaataatttagttgttaaaaaaattattttatttttattattttatatataaaaataatattgtaaaattttaagattctatatatttatatgaaaaaaagtttaagaatgatgaaatgtcatctcattattttttttttcaatattttagaagttttgagttttcactatgaaaaaaagtcatatcattttttactaaataaaaaaattcacattatttaaaaatattttaagtgttggggatgaagtatataaataaaactctttagttttgttttacccaatttattataaaaaaatttagttcaactaacataatatttatatatttaagtttaattacttatatctatattgcatatatcgacttcatagagagttgataatttattcttaaaa

SEQ ID NO: 231773 - DNA, 1152 bp, Cannabis indica
tattgtaccttcatctcaatttccaatggaacaatctggtgggagttatatgatgcaaatacctttagttattttgagaaacttagatgggatcaatacttctctagttgcgtacactatagagtctgttcaagatccccgaggtactcttgctgttggtgaggttgctactcctcctaataatcgtcttggtggaggtgggagtgattccttagttgatcaaagtaaaagagctctatcgacatcaatgggctcgagccagagaaagaagtttcagggaaaacaaggacggggtggccatcagtgcagccctcgaagttattatacttatctagagtgcttcttttgcaagaagcatcatctgggagagtgtaagcagaaatgttttcattgtggtcaagtaggataatacaagagaaactgtccacaactacagaaaaagggaccagaacaagaggtaaaatttcctccatatttgggtgttggctattttccaaattagagctgaagatagttcttcggaagtgtcaggtcagtttcttatcaactgttctattggactttatgttaattgactttagaactacatattagcatgtggtagttagggtgattaataattggatagaccttgagatagatatgaaataggatttagaactctgttacctggcggagaatcagttatctccaaaggagtagtttaggtctatgccgattaaagttgaatactgacctcatagttttgggtatagtagagtatgagatattactcgtaatggaattattgtctaaacaagttgctagtaatgatttcaaacagaaagtagtaacttttcaactttaaagtgaaggttcgttcgtattatggtatcgggatagggttttttggctccagtttttattatgataaaagataaagatccatcatggaagggatggcgtggattattagcaatggtgttagatacaacctagccaaaacaattcagtttatggatattatggtggtgtaaaagttattagatgtattctcagaagaatttcccgaagtatcatcacaacaaaaaataaattttgtcattgtatggtatctggagcagagatggtttcgaggcaccatattgagtgaatcgagcagaactcaaggaa

SEQ ID NO: 231774 - DNA, 1178 bp, Cannabis indica
aatcaaatttccctttgtaaatcaaatgtatgtaacaaaatacaccaaagattcttacaacaaatttaccctaagatcttgattaataaattaagattcaaatctaagtccccttagattcgaagacaagctcccttgcttcgattgagctgaaatccctttagctatgactctgaactcccttcagatgaaacaacctccattatcacttcatcatagaagcttgaacttttcaacaatggaggaacttgtaagaaacaaagaagaagaagaagaaaaggatttctgccctagcagagaaaaacctttatcaaagaattaaaatgagtgggagttggttagaatattcaagaatcaactatgtataataccaactcatacaaaactgactttgacagctcactaacaactcattgatagctgtccaagatattttaatatgaaaatgctgatctgtcaaaattaacccataaaccagtaatagacatgctcagatggaactactgactgtctagatggcagaaaactcataatttgacaaacacaaaaatatagttcttacaatctctcccttggaaaattatgatcaatgcaaccaacaacataaaagagaaactaataaaaactaagatgctaagctgtcacataatagtcaccaatataccaaccaatatacaatatatccccctcattgagcataatgaaacatccccatcatgaaaactccccttgggaattgggctctacaggagggataaaaatagaacaacattaagatgtcccctagacctgatcaaaactgttaacactcaaatgggaagattccccctggagaccaacagagcgaactagagaagaagcaaatggaaaaaccaaaatggtgaaactcccactgaaatgaaaaaacaaaataacccttggcccatttagaaataacccaagcccatcaacataaacaaaaatcaagtacaacaatgctcttccagatcataacaaagacacacggtaaaaacaataacacaaataacaaaatctaaccatgcaagaatacacacaatccacaagatgagcaatttgacaagacaaatttacaaaaaatattagacaacaaacactaaagtattgggaatattttaccaggatctagatttactaacaagtatgttgaattaacatcc

SEQ ID NO: 231775 - DNA, 883 bp, Cannabis indica
aaaacgactttctctgtaagaactttattcttaacaatttatctaacaatttgcatgactattataactcagataaatcggcaaacgaaattcgaaatgctttgctaaagaaatctgggatgctctgtcatgatccaactcctccactatatattaaattaccgttttcttactgtttaatcttggatcgactttgctatataagttgtatcagaacaacagaagaatgcatcctttcaacaacaaaaattctcttccttacaatttttctcagagtaataatttagagtgtaattgagcgatatcgtttggtacaaaacatatcgtatacaaaggctatttgatcctggggacgtcgtggatgctagactatcattcacacttcatgcagaactacgaaacgtcttaaaaaaaagcgacataactcagccatgatcttctttctgtaattcattccagttttattgttttaaatttggtataacaactttaagacgttctgttatgctatggctgctactgatgaattttctagttctgcttctaacgatattaacaagcctttctgttttgagggattacactttaagcgatggaaacagaagatgttgttctacctgacgatgaagaaagttgctttcgttctcactgctttgaacccttctctgaagcttctaccgacaagaacaaagaggctgaacctgagaagcaacaaaaagatttggactcctggatcgaaaacaactttctctataagaaatttattcttaacagttgaactgacaatctgtatgactattataactcagataaatcaacaaatgaaatctgggatgctctgcaaaagaaatttgatactgaagaggctggaactaaaaagtat

SEQ ID NO: 231776 - DNA, 1054 bp, Cannabis indica
gagaggtcgccattcctcgtcttgaatctttttctgcctccggcgatgattaatttgccggtctgcttcggcttgttccaagaccattctacaggttgtttctacatacccgagccactggtcctcgaagattcagtctccaaaatcgtctattgtggtactctgcctttcaacttcatgttcatcaagattcctctttagccgcacgcatagacccccacttgcccgatcttctctttgccaaaaggcctcatctctagaagcccggttcgcgaggcgtccctctcgtagcagggttccaaacctcggtcaaagaaagaactcgggtctacgctctcatcttcaaggaaggaaaccgaaagatcagaaatgtcatctacctttccaacagcgagtcactatatagtgactcgtcttcgtcttcttcctttggattattgagccaaaaatgctaaagtcgactcagcgactcactacaacaatcatcatgctcacggaagcgaatactacaatcctcctgctgcaagaccgtcaccgagtcactatagtgactcgtcttcgtcttctttcctccacatttgttattttaatttaaacacacattttcaaacacaacttcattttttttagaaaaaaggtgctcgaaagaaattatctatacacacattctttcatgtgatattcgaaattaatgtcatcatcactattaactccctaactatagcaattcccacttttttatcattaatttttctttttctttaaaaaatgctttatttttttttatttttttaatcttttaaaatatataatctacaagtgatattgtttatattattcaaaaattttatttttaaattattaatgtctcaatttttaagattataactagatcactcaaatatttaaaatggtacaatgaaaatacataaactcatgatcaaataaccctagtatataaaggtaatgtccgtatatatagtaaaataatatgggaagataaaaaattaaatttgaaaaactggttaacaatattatttgttcaatatttctt

SEQ ID NO: 231777 - DNA, 1860 bp, Cannabis indica
atataatatatattgttttgaataagtggaaataaataacaaataaggttattgatggcagtactattatgctatttacttattttattttggtaattatattaggtttttgaaattttatatataagtagctaaatattttaaagataaaatacattgaattaatggtaaaatgataatttagtccttactcgatgtagctagaccatctatagaagatcctttattgtttaaattcaaataatagataacttataatgtatttattcttggtaaatagagcattctatgtaaccaagaatgcaattccaaatctatagtggagttaggaaaaattaataagataaagaatttactaagtaaattctaaaactgcttattggcagtttgattatataggcccggtcgtcacactacctgagatgatattgttttgtagactgaattaattagtttaattaatcaattagaattttaagtaaaattatgtcttatttatgagttttattaaacaagggcgaatttgagaagaaaaagaaaacttagagtatatttttttaattaagagactttagaagtttaattgataaataagttatataataatttatttgataattaattataattattaaattgataaaattaacatttaaacagttagaatgaaacaagtgatattcttaagaattttttttttttaataaaatgacaaaattgaaactcataggtttctctataagatttcggctataggttttaattaagctattctttttatcttctttaatccgttttaattctaaacctaaccctaaagttacaatataaatataacatgatagctagaacaaatgtgactctccttttatcaaacaaagagaaattaagaggtattatatatattatatacagatatataacttgaaattctttcattattcttcattaaatttcttgtattaattagagctttgagtatttgtccacacatttcaaggtaatactcaggttagtgtagaagactctgtaatgttttacaacttgaaaagagaatccatgttcaattcttgatcatactctctccagcagaaatgatcaatggataaattagagaaataaactaattaaagaaatcaattaattaattaattctactagtactataactaatgtaaggatttcttgattccttatgtgtttattttattgttttaggatttccatattaggatgttagtttagtattaattcaacatacttgaatagtaaataaatcttgcttaaataattttcaataactggtatcaaagtcatgttaatcatttataattcatgtaatatggaattgaaacgattttgtatgtttttatgtgagatttggatgattcatgattgatttatatattttgatgaatgtatgtgatgataattttattttagttctaaaattattttagaatgatagttggttaaaaattatgcaatttagaattttacaaaactcaatttcttagatcaaaatttttcttagtattgtcgatagtttttcaatgtcgagaaaaactttttacgaagtttttccatcgatacctattctacctaattttgcgacagtagaatactaagaccgacgggaaaattatacccgactgtcaaaaacagtcaagaaattccaattttctagtagtgaaagaaagccctacaaaactcttttgatttgatcaatagtgtgctttagtgctacaaaaactgctacttttagtgacaatattttagttacaacataatttttttgtgactaaatgtgactttttttttgataaatcagcaagttgtattaatgatccacaaatcttt

SEQ ID NO: 231778 - DNA, 545 bp, Cannabis indica
tcaaaatcaaaagcacacatcgaacttcccaacaaccaaaaaattcaaactaacaaccaaaagttgtgtaatcaattaaaatacaacgtaattgtctccctgctctggaatgttctagggtcctttctggtttttccagtttcactcccagtctatcttccaattcacttccacttcccaaccgtcgttttctccctttctctttctctaattaatgcttcctcatcatactctgcacttcatcattgttgtttcttaaatgcagcccccgtttttcctctaccgaggctaccattaatgaacactcaggaaatctttggttctccttctctttcccatcctttcacgcattcaataaccgtctgtttcttcagatggaggcgaatcattgccctatggctgggcagacgaggatctagacctccagcagttcgaatggtgcacacacctcctcatcttccaaactctactttcctcaggtatctctttcttccttttttctatttaaagacctgctttttgtcttctgatcatcctccgtctgt

SEQ ID NO: 231779 - DNA, 2090 bp, Cannabis indica
gtcgcaggtccaaatccagatccctgtttagttctagctcatgtcttgggtcatggttcgggtgtcaggtggatgcttgcgtctaggtttgggtcttgggtactgagtcatgggtctaggtcccagatttagggcatgatcctaggtcccggtctgtgttcggtactggtccttgtcttgggtcttggcttggtctaggtttgggtcatggttcagttctaaggtcctaggttcgagtgtcgggtcctaggtcgcactcccagtcccatgtcccggtccttgtctcagtctcagtcccaggtctcgatcttggtcccaggtcccgagtctcgatcccattcccaatccgggttctagtcctagtcctggttcaggtcttggtcctagttcgggtctaggtcccatacctgatatcggtctaggtccccgtcccgggttcgagtccgagtccttgtacgagtccgaatctgggtctgggtccaagtttcagtccgtgtctgggtccgggtcttagtctgggtctaggttttggtctgcgtctgggttctggtacaggtctcggttctggacccaatcctgggtcacgcgtcttgggttacgggatctggttcgcaggtcctggcgcaagtctgggttttggttccagtctgggtctgggtattgatcccagcttgggtccggctcattgttcggttttgcgtctagatctggtttaggtgaaggtctaattccgattccacgatccttattccagttcttattcttatttcgattctcggatccaagtttgggtttgggtcctagtttggaagtggttccaagttcgggtcttggtacgattccaagatctagttgcccactaggggttgggtccaagcccttggtcgtgggtaaagatccgtatcccaatcttaggtcccggtctcgttccgattcggatcttgggtcccagtccgtgtccgggtccaggtctggtatgagtttgggttatggtttgggttcggttttggtctaaggtatgggtcctagtcacagttccagttctaattccgggttttggtttggttttgggtctgggtctgggtccaggttgcggttggggtccgagtcttagtctgagtctgggtatgggtttttcgaatcccgatctgggtccaggttcaggtcctgggtctgggtcccaagttcgagtctgggtcgtaggttcaggtctggatcagcgtctaggatagggtccaggtcccgtgtttcgatcccggtctggatctgggtcttgttcggtattcgggtccaagtctcggttcgtgtccatgtcatggtctgaataaaaatttaggttaggggattggtttgggtctgggatcaagtctcgagttcgggttcgggttcaagttcgagttgcattcctagtctgggttcaggaccgggtctaggtataggtcagggtctggctccgagcccgagtttcgggtctgggttctggtctagtttcaggtccgggtctaggtctaggtcttggccacgaccccagtcctattagggtcttgggcacgttctagtacaagtttcggtttcgtgtcttacgtctgggtcctagtccaacttcgggtccttctctgagtccaggtcctagtccagcttcgggtccttctctgagtactagatcaagacaccgactatgggtctagtccaagccccaatttctagatcctgagacaagatctggatcccaatcacgggtcccaatctggtttcggttcattttccaggtcccggtctaggtctcagtctagttccgggactgagacttgggtgcagttctaggtctcaatcccaattttgggtccctagtcttgttccatgttcgggtctgagttcaagtctgggttcctatctcgagtcctagtttaggtttttattcaattttgggacccaatctttgggtgggtcggtgtccgagtccgagtactagtccagttacaattttgggtctgggtccaggtcctggtcctggtccttttcttgctcctgagtcccgatcagcttctggtttcgattctagtttcaagtcacggggtacgggttcgggt

SEQ ID NO: 231780 - DNA, 1177 bp, Cannabis indica
agggtcaatctgacatatcctggggttccaggtgaagtaagcctggttttgtctctgaccgctactggttgacgactagatttcctcgtggttgcttggtatggaaaccatagtgggtcgaaatctattcacgttacaatttttcttacaaaattgctttaacggagtaactgctccttgtattcttgtgtctcgctccctgtaaagaccgcgtagctttaatttagaaattagaagataattagggctttattatgaaaattaattattaatattgaattaattatttatgatgatttatttgaattcagaatgcatttttacgtcacatatagaaatttcataatttttgcatgttttgtgcccggcaacactggaacgcggtgtatggctattagaatcacatcttagtatttttagtatattgggacaatattttagacattgggaatgtcgggaatagtcgggattttagagtttcccaaattacccctaagtgcccttttatgttgtttttgtgggaaatgggtaaaatggtcattttggccactagtctttttgtctttagtgaattaatttattgttaatgatctgattttattagttgatttagctgaaattatttttagaaaaactaagttttatttcatttttccaaaataagaaaaaaatcaaaggaaaagctttttcactcaaactctctccctctctttcgttccacccttggagcagctagggttcattttgttcttcaattattcaaggagattcagctggtttttaagtgatcttgatcaaggtaaaggttttagctcttctcttcttgttttcttgagatttaagtttgagatttttgcatgattgttggtttttctgctgtagttgttggatgttgttttcagaggtttagttatgatttattatgttgttttaagcatgaattagtagttgtctgaaggttttagcaagctttgagttttagagctcatgcttgaagctttaatggtgaaaattgattttgagcttagatggttgttttgttcttggaatatgtttattggggtataatatgcaggggtttgttttttgtaggttttctaggtaaaatcggctaaccggttttacagttacccagattttgctgcagagggaaaaccggtttttcagcttgtcgttt

SEQ ID NO: 231781 - DNA, 1287 bp, Cannabis indica
tatatatatatatattcaattaactcacactctacatgctattaaaattcttactagagtttccactctatactatacattaagtgagaaataaatgagccaaagcgccactctacacacatatatatacataattagattctaccctactctctatgtacttctactctacacacacatatatatatacagtagttttcatttcacaaagtgtgtaagtgtcattattttgacagattatattaatagtaagtccagtcgtatctggtgtttctaatctgatataactgcctaccagctttctgttaaagtctgtgtgggtctgttatgttttaacagttggtttatttgtttattaggtcggttgaactattgcctataaatagctaatttcgtctgtaaatgagtgagttagctaattgatatttttgggttagttctattatatcgtgagagtttgtgtggtattttgtattgctcgttgattgtttttcaggtttgattccatagcttggagatgaagttctatagcaaaaagatcaaagcctagtatcactgagttctgactgaagggagtttagtatcatcttcgacatcacatctgaagaaatttcaggttgaagagaagtgtcgaagacgaacttagctgcagcacaagggattgtgtgcatacaatcaagaatcttggttgttgttggtaattcattactaattgctgtaaagattgtattaaattcctaagtgtgaattggagattgtagtacgaatcttttggatttagtagatcttttggatttagtagatgttattacccctggttcggggaacccaagcactagtcggctgagatttgttctcagtgtagatgaagcttgtaaatcattgtgtgctttactgctttatcttcaaactagttcttgaatgcatgagttgaagtaaaacaatctaatcttgaacaactcagtaacttgaatctataaaattagatagtttgttctttcatttggtatcagagcttgaaattttctaaaaaattgtgttagatcctagacttgtctaatccttgatacgtgttcaagatttgatcttgctgccactaaccctctctgactttcttctcaaagaactatagtacaagagtttgcatgtttctttctctcctctatacagaatggaaatgtttaaggaaggtggattaacctcgagacctccgatgttggagggtgctaactacccatactggaagactaatatgcgtgcgtttttgagagctgttgatgaaagagt

SEQ ID NO: 231782 - DNA, 867 bp, Cannabis indica
tgggggcagatatataccggagacttgcagaaacggataggaataacagcagggatgtgtattctaattcagaacaaaccggaaatgaaaggtgaccggtacgaggccatcttcagcttttacttcggagaccacggccacatatcagtgcagggtccttatgtgacttacgaggacacatgtctttctattactggtggaactggaatatttgagggtgtgtacggtgaggtgaaactgcagcagattgtgttcccctttaagctcttctatactttttacttgaagggcatcaaagacttaccggccgagcttgctgtgaagcccgtacagcccaatcccaccgttgagcccagcccaactgctaaggcctgtgaggcccatgcttgtgtctctaattacactaattgattttgcatagctatggtagatggattatgtcttattttatgtttgtcatgaggatcctaagtgggtgtataagaaacttttaggattgttcttcttctttaaattgaaccatgagttgtaatgttttaatgagcaaagctgtagtgttttttttttttcgaaaaaacagcttgtaactatattaaaataaccattaagtgcaggttacaagtgctatataattggaacattatccattccaaatcactttcctttcctttctagtcctaaagtcctcttagctaaattatgacctaacacattataatttcttggtacatttttaagaattacagtagggaaataatatagagaattacaaatcaaacttaacagatcttacaatgaggagttatccaatctctgttgattgatttgtctgtaacaatttttgaatccactttaattacatgaata

SEQ ID NO: 231783 - DNA, 601 bp, Cannabis indica
catagctatggtagatggattatttcttattttatgtttgtcatgatgaggatcctaagtgggtgtataataaacttttaggattgttattcttctttaaattgaaccatgagttgtaatgttttattaatgttttaatgaggaagctgtttattttttttttccgaaaaaacagcttgtactatattaaaataaccaataagtgcaggttacaagtgctatataattggaacattatccattccaaatcactttcctttcctttctagtccaaaagtcctcttagataaagggataattgcggcaaaagtccccaaaaacttagagttaatacagattaatctccaacctcaaaaattggtggttatagtcctcaaggtgatattttttgttagtccgttggtccctagttaaatgcttcatttgttcatttaaaaaaatgccatgtgttgacaaattattggttaaaatcataattttaatttaaaataatttatttttttttcttcttttttcctttttcctttttcattagtccagacccgtctcttctctctccacttcctttttttccttctacgcctaaacctccatagccacc

SEQ ID NO: 231784 - DNA, 957 bp, Cannabis indica
cacttattaaatttgttcctatgatgactaaatcctgcgttgttgctgatacaagtcgaaaacactctctccgaggtttccagatgaaaaaatagaatgtagagggaaaaaagaaaaacctgataccaaaagataacatgtagaacttaactttgcctccaggctctgggtaggctgccgcgctttccttgcattaaaggaaaaaaacaaaatgttgggaaaatccatttttttactgctttcccagggtgattctatcatttacttcttttcttggcttcactgtataggataactcccatgactgtaagagagtaacccagcattccagtcacagaaactggatttctgaaaattaaaattgaaaccaccactgccacagctccctttgcatttcctagcacctgtagagccagccatacaacttaatttagctttaatacaaacttcaaatgaaacattgcattgttatagtggaaaagataaggaaatttggttggcggaagtgaaacaggtaatacaaagcatctacaatgctataaactttaagcctcgaggatgattattctgctggcccaccgctatctattatctaccccaccctttctttgtttatctcaataattctaaattatccttctttccattctcaatctttttaaatagtccactatcatttcacctgaatatttcctccaacaattgcaaatacaagacattcatctcaatccatgattttgtcacgctgaagttttattcttaaaatgatgcatgaataagctttcatttaaagttccttcaagtcttcaaccgcccaatccttccatactcaaaaacagaagtttatatatatatgtgtgtgtatgtgtatatattttatatatatatctgaatgattctatacacagctccaatttgaaccatcaacttctatacttattaaatgtttagatacct

SEQ ID NO: 231785 - DNA, 908 bp, Cannabis indica
ttcaccgtttataattgtaccactcaagtccaataattaggtatgtgcattcaattctttatactaaatcataggttagaggtgttgtgttgtgtcaccaccaaaatttcgataattcatttcccttacctcccttacctatattttgtgaatagtcatattttggatttacaatttcttgtaatactggaaaatattacgactcatctaccaaggtacgttctccagaaacaatggataatcatcctaacaatgtaatacatacataagatacatacaaatttaatatcttaatgtggatctgattcattgaaccaagaaaaaagtagttacgaaagaatttcattttgaaatactcataagataaaacatttcttatgttattatttatagtaagagagagatgattatgaaagttgaaatcactttctcaattagaggaaaaagcatactggcattggtcatagctattacattattacatgattgtttcatttttgtaattttataaaatgatctcatatgcaaaatcgtcttaaatttgaaactaaattaatcaatattgatgacatgtttatttctgcacaagtagctcttgatcactggaataaaactcaggataaaatttcgttgtcatcaatctatctggaaagcatcggtgatggtgctgagtcatggactagacccgtagaaaacacaatcaagattaatgtagatacaacactctttgatagcgacaataattatggtttcggaattgttgcccaaaactatcttggtcaccttgttgcagcacgggtcggttgccatggcggaagatatgcaggtgaagtcattgaagccatggggattaaagaagatctcagttgggtaaagaccaataattggcaacatgttcaaattgagac

SEQ ID NO: 231786 - DNA, 954 bp, Cannabis indica
agcgatgcaagccagaatcaatgaacaagatgaaaagattagatgtctgaggatgtggggtgcttctgaaatgccttcttctatgaaacggatggaaccactgtacagaaggttttgcaagcaggcaccttcaatctttttgggaggtctagatgtgatgaaagtcaaatagtggctgattgttattacacagatttcaaacttaatgagtgtcattggcaacgacagagtggcttgtgccacattccaattccaggaagatgccttggtctggtgggatatggtagctcttacttgggatgttactaccattacctgggaagagttctaggaattatttaatgcaaagtattacaccgagacagtcagaagtgcaaagagaaaataatttactcagctgactcagaaagaaaatatgattgttattgagaatacaacccagtttgatagattagctaggttggctgtggaaattgtgccaatcaattttagtaagaaagaaaagtatctagatggttgaatcccaaaatcaaatacgacctgatgatcacaacggatgataacactacctatgctgatatgctgggaaagcagtacgagctgagggcgcagttgagttcatccagaagtctcgagagactcaggttgttggtggagccactactcctcctacctctggttatggtaggggtggtagtgactcgatcgctgatctgaagagaaaggcaccatctgcacatggtggctcatatcaaaataagaggttttgagggaactcaattcgtggcaattgtcagtgtaatgaccgctttagtaatgtagattagaaaaggcaattagcactaatttttattattttattattttattattatttgtgaattaattttgaatgtggaccccaatatttagaaataaatattagagttataatttctcaattctggagatttt

SEQ ID NO: 231787 - DNA, 1419 bp, Cannabis indica
accttccctttaacatttcttttattcttgaaaatctatttacacactatgggtgtaatgtccttaggtggagttttatatactcagcctttgttggtgctcatggaatccatttcttgatccatggcattgttccacttgtctgagtcagggtcttccattgtttgctagtaagtcaatggatcgtccttctctgtgttagagacaagaacatgtttttcgtgttcataaaagataggttgcctcacaaacatctcactacgacaatgtaccggggtttccttttcaagaatagtggtgaccgttattggtcgttcaattgatgatactgaagttgatggctcaaaaatctattagtttctaattttctcgatgaccacttgactacatggtttatgacttttcatatagtcatgttcaagaaaaatagcatttattgatacaaatatttgttgtcttaaagactatagaagtatctccctcgagtttctactgaatatcccacaaacatacacactttagttcatggagcaagtttcccagtctttggtttaagaacatgagtaggacaaccccaaatatagaaatgttttaaattgggttttgtcccattctataattctattggcgtgttgcttatactctttgagggtactacatgtaaaatataagtagctgtcagaagtgcatatccctaaaagcttagtggtagtgttgagtaacacatcattgatctgaccatgtctaataagatccaatttcttctctctacatcattctgctgaggtgttcttggtgttgtaagttgggataataagatcccttcttcaagcaaatagtctttgaatttggaatctaaatacttgccaccacaatctgatcgaagtttctttaatgacttacctcattgcttttcagccatggctttgaagtcttttaacttttcaaaagttccaaacctcttgaccattaggaaagtatgatcgtatctagaataatcgtcaataaaagtgacaaaaatattcgtaaccacctcaagtttgaatattaattggtctgcacacatcggtgtgaataagctcaagtcgttatttggctctattgcctttttcataaaaatatcttttatccatcttggcttctagacaagattcacataccggaagagttctgacttttatttctctcaaaggaccatcatttgttaaccagttaattgtgtctagccaatgtggcctaaacgtagatgccacagatacgtttcatcaccatttggaacattttgcctcctattttattgaggcaaagctactctaaataattcattattcaaaattaattgctcacttggtctgagcacataaagtccatttctttattttgtagaataaattgtcgttctaaacttagaaataataa

SEQ ID NO: 231788 - DNA, 857 bp, Cannabis indica
cacaatctgatcttggagttgcccaaactcattaaaataaggaatgaatcagggtggagcgtttgtgacttccatttctaccagaattctggcgtattgtagacgagttcgatccttggtgtgttggtccaccatgacaggctttccaattgtgctaaccagagcacttagacttttggtaccccaatattgaagccctaggtcatgtaatctggtccacaatggaacagtgcgaaccagattcattgtgtttaaattcgcagaccaaggacggactataaccggttttcgatcaaatttaaccactcctgcctccactacctgatctcgagttgcttcatcattaaaccgcaccatgattaatcccatttacagtttactaacctgaataactcaaagatggccccagacccttttaacaaagccttcgaatatagtaatgggtagattagctccctataccttgcatataattgctaatttctagcaattttcctcttctcggacctcctctagatctacctgagcaatttttattccatctctaatcattggttctgtgaaaagaagccgttgatctcgattattagttttttccttcgtaaacgtctcccagatcctcccagctgatttcggtgactgttgaacatttgaattcatcatcttttcatcttccacctcctctgcccaactctgcgatcgacttttgacagatgggttcaactcctttgcttcgattagatcctgagctttgactatctcagcaatcaaattcaatccctcagtcgaatgagcattgttgacttcttccgtctcccctgcaattcctacaagtgcatattcgattggaattcgag

SEQ ID NO: 231789 - DNA, 795 bp, Cannabis indica
aagcgcaaagatgcttattacatgcctcaactcacttcatttatacccttatttttccatacacctcctctttttcttccatgtgggacttttttctcctaaatcccaatactctttcttcttcctataatataccaatcctaaagtttctgtttattcaattgagttttaagttctccttgttagtttttttttaataataataaattgggttagttaatcacaataaattgaatgaaaaaaaaaatgaacagaaggatttgtttgtttagttttgatccaaaaaaattggttgtctaatcaaaagaaacataatttaatttattaatcacttcaaagaaggtgaccaaacaaagtagaagctttacattaaaaagaaaacaaacacttttacgaagaaacgtttactcaagtccaaacaaaccaaagcaaaggcatttgtgtctcttcaaatcgagaaatggggctttagattgagcattattattaagtattagtagtgcccaacacttattcttcttggtttgtaatattatgtttaaacattattcttcttctaatttatatgtaacagtataattattaagatatctatacaaaaaaagaaaagaagattagatttaattaagactatttatgtgtgtttggcaactgcacggtggccattgccaaggcggccaattgggtacgtaataacacagcaacttcctcacctcataatcctcactcaatcaatatatatttatatttttatatagtgttatagataagataagatagatttacatatacaat

SEQ ID NO: 231790 - DNA, 2274 bp, Cannabis indica
tggtaaaatatttccaacatcagaggcttgccaggagctatgaatttcatcaagtggaatgctcgtggactagggagtgatcgagaattctgtaatctctccctgcttgttaagatgtataagccttctcttctttttgttatcaaaactaagttgtgtaagaactctgctgatcgttttaagtttaagcttgggtttgattttggttttgaagttccccatatagagcatagtgggggactttttctattctggaactcaaacattgatgtaactattcctaattattcggctaatcacattcactgttttgtttcgtctgctgttttttctagttttaatttcactgctttttatggtgcccctaatcctggaaatagagttcacacttgggaaattttatccaggattggtttgtcttgcattttaataccctggtttgtgataggtgattttaatgatttcttaacttgggatgataagtcaagtggtaatcttagaaatggcccctccactcttttccgtacttttatgaacaaatttcaccttcaggctttacaaccaaatggtccttgcttgacctggacaaataatggccagggcattagaaacactctggagcgtctcgattgggctgtagagaatagcatttggcattcccaccaccccaacagtggcctcaacaaccttgatttttttggttctggccatagatacattcaaatcttgtttgatcagatccaacactcccacattcacaaaagaaagacaaaagattcctctttgaaaatgtttggctctctgagccacgatggaatgatgtccttctagaagcctggtcttccaatgttctcagtgatgatccttccagtagccttctgtcaaaacaatccacttgtgcaaaatttctttccagctggaagaacaaagctttttttggtttccagagccgaattaaaaaagcccaacatgatcttgagcaggctaggaactctgaggacacctctcctgagtcttattctcgacaaaaagcactccaagagaatcttgattctctcctgttcaagggagaaacgtactggaggaagtgttctcgtgtccaatggcttaacttgggggacaagaatacctgttttttccataaatttgcttcaaacaggaagcggagttataggattgattcccttacctctgaggatggaactgtgttttatgactcagactcaatcctctctctcatccaatcgtattactcaaacctgtttacttctcaacaccctcaggattctgatatcgaagctggtctctctaatgctcttcctaggattgaccctatgcattatcaaattcttgatgaagctttctctccttctgaggtgaagaaggctcttttacaaatgggttctgataaagcctcgggtattgatggcttcaataaccaattctaaccaaaaaaactggagtgtagtgggcaacaatatcactttaacactactcttgtttctttgattcctaaggtaaagaagccaactactctgaaggactatcgccctattagcctttgcactacgatctacaaaattatctcgaaggtccttgctaataggctcaagcttgtcctcaatcccctgatttctccaaatcagagtgcctttctcaaaggccacttcatctctgataacatcctcatggctcaggaaatcttgcactctataaaaaacaggaaacagggaagattgagttggatggctgtcaagttgatatggccaaagcttttgatatagttgaatggaagtttctcaaaaaaattatggaaaagtttgggttcccccctcggtttaccaatttgatcatggcatatatcaccacggccaccttcaaattcaacgtcaatggccaagctctggggcttgtcactcctacctgtggtattaggcaaggtgatcctctctccgcatatcttttccttatgtgtgttgagcgcctctcatccattctcaaacaagctgaacatcaagaggaggattttggtatcaaaattactcgtatgctcctaaaatctctcatcttctttttgttgatgatagcattctattctatcggtccaacatcgaggcatgcaatgtcataaaagaagctctggaccactatcagaaaatttccgggcaacttgttaatttccaataatcttctctatttttttctccgaatacaagccttacttatcagacccttatccaggactacctacaggttcccattcccaatcacatg

SEQ ID NO: 231791 - DNA, 610 bp, Cannabis indica
ctcaaagtatttatctttcatacacttacccaaagatcttctttatctacagaaaattcttcatacaaaactaaaatccaatctctcttttttctctgtatctctctctacctctcaatctctttcttcaaaatcaccctctcgaaaaactcgtcagtgactctctctaaaagataagtattggtggcatttatagataaggaatatggattccaaagtcaatggctgcaaatgctaacttgttaagttagttacgacttaacaaatttaacaaacttttcgtaatagtatctccatgtcagcttaaattgaagtgctttcagatgagatgtacgattcttagaagaaaaatcaaagcgtacgctgacgggtcttcctggataggaatagcgacagctgaagtcgattattcgagactcccttccaggaggaacaaatagccatccaaaactcccatctggaggaagactagctttcttgaaaaaaataacttttagaaacccttacatttagaggaattataccacaaattctacctaatttttttaaattaaaatatgacggtgatgaagaagaatgcagtcgttatggttggtgtttcagatatctc

SEQ ID NO: 231792 - DNA, 529 bp, Cannabis indica
agatatctcagtatactaacttcagagattgataaggtctaaccaatgcttgaacttgtttgcttttaagaccttggtcctaacatcaacaatattatttcctgatctgaccttctctaattcaaccaaaccttcctctatcttctttctaatccagtagagttttgtgtctatatgtttgctcttttcatccaagtacacaccactctaccttttatttgtttcaattcaactagaattccctgaagccataatgcttccttgaatattttcgtagtagccataaattttgcttctacggtggaaatggcaaccacaaactgtaattggacctcccagcatatacagttccagtttgtcatgaaaatataagaagtggttaattttctcgtatctctattcgaagcataatcaacgttcatgaaccctttaaactccagttttccttttgctttctcataggtcataccataatctcaaatggcctttaaataccttaataaccctttgaggaccttccaatgttcaa

SEQ ID NO: 231793 - DNA, 1908 bp, Cannabis indica
ttttccttagaataaattatttcactttttgtgctacaaaatcaacaaaacattagtaacaaataataatcaactatttgttaatcatcaaaacaaggagacctaaaagtttgagttaacaaagggcataattgagaagaaaagagaattcaaggtttattttattaattaagaaaccttggaaggtctaattaataaatatatctaaatggtaattttatatgataattaattataagtataaatatatagaattagtatttcaataactagaacagaaaagtggcaatactaaagaaatataactttgcttcattaaggaagcaaaataatggtaaaaatctaactcgtaagccttcataaggggttcaaccatgagggagtattttaagccactggatctttcaaatcagcccatttagttctaaccctaaacctaatgaattcctataaatagaacataacaacctttgatttaagaaagcacctttagattctttcttgtgtgacaaattgaataaaaaaaaacctactattttctatttattatttttgaaaattttgagttttcttcacaaaaattcgtggtccttggtgttgagaaattgtccacacattttaaagaaatactcagcatagtgaggaagattgtgtagttcaaattgtcaattaaaggagaattcgggttcagatctttgtcatactctataatagaaaggatcaagggttaaagatccgaatgaaatgattcatattattccgctgccattaatgtaaagttttctataacttttatgtgtttccttcattattttagagaatttatatttaggatgttatattatagaattataatccaagatacatgttagtaaatctagatcctagtaaacgattttcaacatatttacacagtcgaacagggtatattcactcagggttccatccaaagtagattagagagaagccgagcaaggtccattcattgtacctctccaagcaaattcaacatgccaagttgggttccttgcttcgtacagaaggacacgacattagaaaatctcttaagatatttttcttaaatatctccacaactatggtttagttaaaatccctatttttatgggatttattttgttgagagaatcatggaatttattatttagtttttcgctttccctattattttgggtcactgactcatgtatcttctttataaatagtgaagtcatttcattatttagggatttgaaattgaactttgtaaagagctattgcgttgttaaagtacttgtaaattttcttgagattataaagaaactcaccttgttggacattgtgatcttaataatattctaagtaatacaacaaaaaatggagtaggctattaccactatcatagagtcaaactattataaattctttttgttcttattgctttattattattattattattattattattattagaaatcgatcattcaattcaatcgctttaaagactcaatgtcgttggctaaaagtgaggtcaacaacatcaagacaacataaaaaataataaacaaataataaaaaattaatagcaaaattacaagagtacaatataaaaatacatcaaaagaccgtattttatgtaaataaaatcttaaaaactatacaaatgttaaaattttcatacaactatatttttgtaattttttttttttttggttatttttgtgcttttttgaaaggaaaattttcgtaaatatgagatttgagggtatagtttactgttttatagcataaataaataataccatagggttatggatcttttattttttttttacatttatatgggtttttttatgccatatttttgtaaaaaaaaaagtggaattctcatatttgtaaaacaacaat

SEQ ID NO: 231794 - DNA, 1896 bp, Cannabis indica
aattggtaaattttgccaagtcgaccatgtttttttctccaaataccagcactgagatcaaaaccagtatcaccaccatccttggcatccctgttagagacactattgataaatacttgggccttcctcaatcttttgggagaacaaaaaaggatgccttcaactacattaaagatcgggtttggtctcatctaaacaaatggaattctaagcttttttccaaaggaggtaaagaagttctcttgaaattagtagtccaggctataccctcctatgctatggcttgtttcaagctccctgcctcttttcactctaagctcgaatccatgatgcctcggttttggtggggaggaacggagcacaaccgtaaatccactggaaaaattggtcttccctttgtttttcaaaatttcatggggatcttgattttcgctcaatgaaagctttcaatcaggcgttgttggccaaacaagcttggcggcttcttcagtctcctcactcacttgttgccaccttactcaaatctcgttactttccaaatacaaattttcttgattcgggaaagggccatcgaccttctcttgtttggactagtatctcttggggcaaagaacttctccagtcaggtcttcaaagatcagttggtgatggtaccacaatctccattttcaatgatgcctggatcccaagatatggtaaacttcattattttagacaccgctcagatgtacatatgactgtggcagatcttttaacacctaccaatggaacctcacctgtctccaaaccacctttcctgcggaaatttgccaagccatcctaaccaccacacctgacacatattactggtcccttacaccccatggcacctgcacagtcagttcaggctatcatcaagcccatagtcagatacaccgaaatgacccaacaccttcggatatcacagcctcccaaatttggtggaaacagatgtggacactcccttttcctcccaaaccgaaacactttctttggcgtgcttgccatgatattctacccaccagtcacaacctttttaaacggaaaggtctaccttcttcacgttgttgccggtgtttttattatgatgagaccctagagcatgctctttttcaggtgcccaactgtccaggaggtatgggaagtaactagttttcatgattttattgctaaaaatatattttttttaacttgtttggacttattacatcttgctgccaccacttttactgctagaaactatcattactttgtgtgtttgttgtggaagctttggaattggaggaatagatggttacatactggtttatctacaacacctgcccaggtgctgctctgggttacagacttctagactagtatcaaagttgtaacgacaaggcttcttctactagtcacacccaggatgtttctttgctgtccaaggaaaaagaaccaccattccaagctataatctccgactttcagtagatgctgcccaagatgcacgattaaataaaatgggattcggtatgactatccaaacaaaccaaggagatgtacccttaaatttggcaatgccttggcgtggaactcaccctcatttactaatggaagcacatgcattatactttgctctttcttagtgtcataaccattctatttatccagatgccattgtttcggattgtaaggttttagtagattatatttccctaaagcttttattagttacatcccaagaggggcaaatgaagctacccattatctagctaaaaaaactttaggcctagatcaggaggctgctttgtagaagaatttatctttacaattgtaatttgtatcttttttagctattaatggatactttgctttctattaatggatacaggtttcatg

SEQ ID NO: 231795 - DNA, 1178 bp, Cannabis indica
acaacaaatagagagaccttaaagtgaaaaacatatattaattaccaaagaatattactgaccaaattagtattacaaaacaaaatatcaaaactttaggtgcaacttaaattctatggaaacacatataacaatatatatatacatttaatatattcaaattttttagtacttttgagtgaattcaggtcacttttatatagaattatcgtgccagtttcagatgagacaacaaatgaaccaagatcattcatcatgtcaattccactatgcactaccttttgtactatttagatatcattgcatactctttggtataaatagaattgtaaacccctaagagaaaatcataagaaatatatttgacactcagcaaacgatgcactaaaaagacattaccaaatcaaagaagaaaataaatttaaaaagttcacaaataattggtttgcataagtgagaaaagaatattacaagcaatcatagtgcagtagagacaatgataatggtttaggatcctacgattggaagctttgcggtattacaaacccttagcttctctgtcttggtttagagcttgagcaaataggaggaagataagattatgcagaaggtacgactcaatcaacaacagagtagtttaattcattctaaaagtgtactcagcatgccaaggaagaaaaaaaaacttgtacatgtaggcaaatttgaagattttgatcattttgaaataaaaataagagaatgatttgattatatgaacaattggaagataaattttccgaagttcattaagatgacccaacaatatgaaaagagtaaaataatattattacaattgtcaaacaacatggatattaaaatcataagaatcacgaatgattttaaccattttctttgcaagttacattttgtatcataaatatagtcattatcaaaattgagacaaatgcaaaaaagatatataaattgtccataaaaatatgctgaaaacgaagataaacgcaaaaatagtatcattcatatatttaataacaactggaatatatataatcatgaataaaatagattgcagataattttctaaacaaattgttatattaatacccacagtaaatgactgccattcataaaaataaataaataaattgtaatatcccagaaaataaataatatttaaa

SEQ ID NO: 231796 - DNA, 1815 bp, Cannabis indica
tgaacaagctgagttagcaaggggtcaactcatgagagctcaaaagaggatgaagaagcgggctgacaagaagagaaggtttattgagtttcgagagggtgacttggtactagtaaagatgctgccgcaacagtttaaggcattgcagaaatttcacaaggcgctggtgcgcaagtatgaaggaccctttccagtcctcaagcgggtaggcgaagtagcctacaaacttcaactgccacaacagttgaagattcaccctgtatttcatgtaagtatgctgaagccataccatggtgatgaggaagaccattccaggggagtgtcgaagcgcgccccgactgctgtagtgagttcttatgataaagaagttgattgcatactgtcttcgcgggaagtcatgaagaagagaatttctcggtatactgagtacttggtgaagtggaagaacttgcctgatgcagaggcaatttgggaacctatgtcccaattatggcaattcaaggatcacatccttcggtttaaggatggtgaagcgacggggacgtcgcaggcttgagtgggggcgggtgctacatcccgagtattttatcgggacaagcagcttgtggcaagctgcttgagctgcttggaaagtaattcgcgggattaagcacctgattgtagcacgccgagtatgagcgttcgggaagcgtcggggtgcatgcaacatggatttggtgcaagttagcaacctgccatgttttgtcatgctgatgtcaccccaagtgggcaaagggtcaaccccaaattgatgggacacttcccatacgcccaagtgggagctacttggaggaaaaccatttccttggttttgctttatgctttatgctttaaagatattgttggttgcctatttaattaaaggcattactcttgtaaagttagttgcatttcatttgtaaaggaacttccatttttaatacagagagatttctttggttagttgagtgttcttcaattgttcttgttgttcttcatatttttctgctgcctttgttgtttcgattgctgttgcactcggttggttggctgaacctcgcaagcggacctgtggggcgccgcacactccttcgacaaatcgttcggagcgtgtcaagtggtatcaaagctggttaaaggtagagtacccagaaaaaaacatgacgaatctaagcgccatggaaacagttttaaagtcttcgaagaagacgaaggagaccaaagaaaaagaaagagatttgagggagactgttacagatttggaaaagactctaaagaagagtgttgttcttgctaaagacctagatactcgggttgaaaatgtggagaagaagcaggacgagttgacggaagaactcgctactatccactcgctgatcccgggaaaggtccaggagcatgctgctgttcttcgagcggaagttgctactgtctgcgacttgttgattactgaagttgagtgtttgtgtgggttgaacaaggaacttcaggacaagaatgaggaaatagagaggcgccacagagatgagttggcggcctttaaagcacggctcgacgaagtccaagcggattgggcgatgtgcaagcgagctgctgcggggatgggaggaggcatcccaacaattctgagactcgagattcccaagcttaaaacatttgcgggttccagaaacgccaaagaggtggataatttcttgtggggtttaacccgttattttgaagctacatgtattactgaagaggaggttaaaatccgtacctctgctatgtatttaactgatacagcgatgctatggt

SEQ ID NO: 231797 - DNA, 661 bp, Cannabis indica
caatagttgagtggtcaagctacaacgaggtttaatgaacctgctacaacagttttcactattgtgtcttctgagcggtagttaaaattgaatataagtattcttaaggctatgttgcaatcttttaatctaattttatttttattttttttatcaaacgattagggaattaggatggtgattattttacttattttttaattcaaatcctagtcgtgcatttaatggggagatgtaataggctattattttagtagattattattaatataatattgcatgatttattaaaaaaataaatataatacaaactttggtatagttaagctattttacacgcatgatttatctttaaacatgtttatagataaataaagtaatttaaattaaatgtaaaattatcataaagtccaataatacaatagtgacctataaatcaataatttgttaatgaaaatattatacatttcatgtgaaacacaatgctgtaaatatgggttgagctttttaattagattgattaattatcattaaattagatgaatttatacaaatccctacgcaggacagtaattctttaaaagaaactatggtgccgtttggttaacacttttagttttttaattttttaatcacaaaatgaaagtaaaatttttgtttt

SEQ ID NO: 231798 - DNA, 1671 bp, Cannabis indica
cgtgcgcaaaaatccaaaaatcaacatttaacactctgacaaaaaagtgggagaaatcatatctccctcgtaatgacactacagcttgacggctaatgacataatacattaaagggctcgtcataaatgccacgtgagcaaaaaatttctcagaagaagatattacaagctcccgaaccatggcatgtcccaaaagcttggggtaaatgttatctgcattttttcctacacaacacgtggaccttaattaaggagagacgaaaaatcattaagccatccaagggcctcgttctgtgctccaggaggataaaggccctaaccttgtggaatagacctccacgaaagaagtcctcctgaatgtaggccacaagggagatatccgcgagttagcaactctctcccctctacaaggtgggaccttttgctcccgcaaagatcatggaccttccatcaagatgtattggtctggggtactcttttgacccgtggaggctcggtccgcacgtgccaggctgagggcccaccgcttactcctttcctatgtacgatagaggttgtctctcacaccacatagagcgtgcatgtccttgtgtatcgtacaaaatgatccaacgaccaggagcacgagtaagtcaaacaagaaaggccttagagtgacacgcatccaaagcaccaccagtacatccagtaccatctgacaacggtatagaccacatggaaaatataccacctaccaatttgatggtggggatttattcttatgaggatacatcaacggcggtccttacgaagggattggcctataaatacccccaaagacacaaggcaagggatcagaacctgaacttcttctcctttgatcccttcaactcttcaccttgagactgaagacgaattctctgtaaacacattactgtagctccattattaactcttgaatattcttactaagcttcctcttcttcaagaggagcacggtggatcggagtaaaagtccatcatttttgtatgtgtataacgagtcaccggccaaagagcctaatataattgactcgcagactaaggataattaacgcctgaaccacgtaaaaatttgttgtctgtattctcgccatttacgcttttattactttcttaagctatataattattcagttgccgaaaaactcggtaaacacttacctttttgatccgttgaatttttgtattgatgaggcttttgggttttgttttttacttcaattttaatgtttctgcttcatcttgtcgggattaatggtagtttttcggctgttttggcattttttgacagtaggttttgagaacgaagccttccacttcgttttagcctccatacagtataaaagaaagattttaagaacaacactgtataaaagtaattttttgcgtattacagtataaatgtaatctttagcccattttactatatatgtaagttcccctaattttttggggacacaagttaaaaaataataacatggttgctaactaaatcaaaatggttgattgaagattttactcgtagtactactcataataatcttatataaattaaatataagtattctctttccaacgaaaaaaataataaatagatataagagtagtgactgcaattgggcggttaatatacgaggaatgcaattttgt

SEQ ID NO: 231799 - DNA, 997 bp, Cannabis indica
ttgtacgagtcagtaggtctgtggtatactttgcctgagtataagatgcagatcaatggaggttcttgtaacttcaaatcccagaaaatacctgactggtctaaggtttttgagtgcaaacgaccggagtagctgagatatcaagtgatgaatgtagtcaatgtcttcacctgtgagaagtatgtcatcaacatagatgagtagaagagtgagtttgccttgtctcttgagaaaaaaataaagaagtgtctgctcttgaattgtgtaaaccccactaaagtaaagcttgtttgagcttgtcaaaccaggctctatgagcttgttttaagccatagatggctttatttagtttgcacacatgatgaggatgagtctcactcttgaatcctgcaggttgagccatatagacgcattcttgaagatctccattcaagaatgcattattgatgtcgatttattggatgggccaattgtttgtaacaataagggaaaaaataatgcgtatggtacatggctttatgactgggctgaaagtctcaaaataatcaagaacttgtgtttgctgaaaccctttggcaacatgacgtgatttatacctgtcaactgagccatcttggttatacttgatgcaacgcacccacttattgtctataactgtcataccaggttggtagggaaccattttccatgtgttatttttagtgagagctttaatttcagtctgcattgcattgagccatagaggatcttgaagagcagccttaagggattttggtttaatgctgatattagaggtaacagtaagggcttttggtttttcgaaatccagctttggcatgggtgatcatgttgtgtatgttgacaggttgttgttggtgagtagggacaggttgttcatgactgatgctgttagcaagaatgagagtgatttctggttcatgatcaagtgtagaaggggacacattttggtctacagactgttgggttttatgcccta

SEQ ID NO: 231800 - DNA, 1268 bp, Cannabis indica
aaaaaaaaaatttcgacatttataaaccgacgctaaatactaacttttttattttattttaagcgtcggttagaaaatgacgctaaatgacgctaaaaagaaaaaaaaacaaaatacaaaatacagaaaatatatacgtatagatatctcgaacgattgaataataaatccctgttaatagaaacaagattcacttaccgttacaaatcaagaataggaaatttattaaacaaatcacagaacaatatcatacaaatcatacaagaggaattatacaagacaaagacattcttagtttgttagagcaaaaaaagaactttgaccacatcaaaataacataaattcattttgcatatatcaatggatggacatatctttctctacaaaagaagataactaaaaatatataactcatctatatacaaacacacgtacacacacatatataatatatatggagagggagagagagaatgaaagaataagaagcagaagtcagtagctattatgtcaagaacttagataagcataagtgtataaaatttattctttctaacaatgcaacagagagtagagtacaaagacaaatactacctataatatccaagaatgagtgaagaagaggagagcctcaatattccaagagtgaaactggaaaaccaaggattagaggcaaaactaaaactattacacatatcaaaacaatactaatacatttttaagctatgagaggttagcaaactaggaaaccataagtttgtgctaaaacctatatcatgcattgatcaccaacataacaggctttaaactcattttacaaaaggaaagaatcacattcaaaaaaaattgatatgactaaatataaaaacataaaaattatatatagtctttacatgggagacaacataaagtagcatgaatcttgaggaattgaaaaaaaaaatcattaatctatatagtcaatctcaatctggtctaatcactattaccgactattaatacaaaaactcatattcttattggtgcgatgtcgttagctttctcggagacatatgcattgatcctcggagacataagatggcagtgcatcaaccccaaagttttataaatactgataacagaattatgatctcaacactagaatttaatacacatgtacttcacttttcctcattatgcaagaaatcttttaataaatccattccatagacagaggcatttagatacggcatttaaattcaattctctatgatttaggagaaaagcac

SEQ ID NO: 231801 - DNA, 914 bp, Cannabis indica
ataccccactattcaaggctggccctgttctaaagttaccatataaatagaatatgatagctcttatttcataatgttattgactcactttgtcagaccaaatagaaaataaccagagctctcataatttcgaaatctcttcttcttcttcttgtcaattttgaaccccttaagtgattgagtgattgcccacacttttcaagatatactcaagataatgtagaagactatgcaatctttttgttacttaaaggagaattcaagttcagatcttgatggtactttgcaacagaaaggatcaagggttagagatctgaacggaaggagttaaattattttgctgccatgaatgtacgattttttatacctttatgtgtttaattcattattttttaagaaattcatattttggatgttagattgtagaattataatccaacatacatgttagtaattctaaattctggtaaaatatttccaacaattggtgcatttcaatatcgggtccacaaatttttatttagtgaataatatgggaaactactaagtactaaccaattattaagtgtcatatctgtgttgtgttgaacatcttaaggtgccaaataataatattccattattattaataataataaaaaatagtaaataccattttgagccacatgttttgtaaaagttaccgattaaaccctgaccatgtattttctaaaattgtacaaataggaccatgaactcaattttttgacaatttcttttttaatataaccaacttgaagacaattcctatctctaatatatgcataaaatataaccagttttgttataatacatttaaatcgagttattattaacttttattttgacagaaaatagttcaggggtctatcatttaaaaaaatacagagtctatt

SEQ ID NO: 231802 - DNA, 2267 bp, Cannabis indica
ataattaaatgtaccactggttaggtaccttaataagtgtggtacgagaaaaatattagatacttgtttattggagtaaataagccaggtagcctattaactagccttaactcctgtgttgtccggagcatataatgtgtttcatgtctccatgctaagaaaatatgcatcagacttgacccatattctgaactatgacgatgttaaacttcagacatatttattatatgggaaaaacatcttgtccaggttttggactagaaaaaggaaatactatgaaatgagacaattgtactagttgagaaagtgctatagaaaaacagcacaatagaaacaataatttgagagttagaaccataaatattgggtaatatcttgaattatttaaatgaatttcgaggatgaaatttctataaggaggggatgattgtaatatcctaataagcctaatggtaaataattacggtttatatttgtactatgggttaatgaggtaattagtgggattatgatcttactaatctattttagtataaaatttaaatttgctagtgagtaaataagcgtaatttataaattacggagatttatatagcatgtgtgaaagtaatatgcgttatatgtggaataaaaatattttcaggttcggcgaccctaaaaacctgataagtggataaataagcgtaatttgttaattacggagatttatttcaaatacgtggatataatatgagttatttgtgaaataaaaatattttcaagttcggcaacctaggagacccgattggaggccaaaatgtcacaacatttttagttagaaatattgatgatattagtgggataagttgattttagaaatattgaggtagtttagggtacttgaagttggccaaataccctagagatagagatttcttagtggctatgaaataataagataactattaataataaagtgttatcaagttctcaacattggccctcctgccttaccgcacacccacgacttcatacaaaaggccccactgacccactgcatacttgctcctctgagctactttcacgaagtcaatgatctaaaaatcaccgacaaattttccctctagctcctgcttttgtcggctctcaaaactgtgtcacaagtccatctcccaaaatcaaccctgcatcctctaattactcactaacttttgacagacttgataacacgaagtcttactcttaagacttgaagtcatcccaatcctctatctcccatcatcatatgctctctgaaccattcggcttacagtgtcccatacaacaccagtgtccccataaacacaaaacatggccatacatgccgcaaactaccttagtcttgatctcaacctacgcccctgcatattgtctatctgcagattgcaacaatcatgcaagtcttcgcactgaacaacccatttgttgtagtgtttccctctagattcacacaccaaaactgaacaagtaccctcaagatatatctcgcaagctaatcgcatactcgcatacggtccctctattccaaatgccactttgatgaagatgttcagctaatgcctcagtctttctgactcttcgcccctggacatttctatgttgctgtagtaccttagtccttttgactttcaccttaggccaacattgccatggtgttatcttagtacctgagtcctatagactttcaccctagataacgggcactgcctgtgtcctgagtcttcttgactttacatactgaacaataatccatgtccatgatacctatcttgaagcttgtaatgaataacgagtttgttaagtgaaccgtgaggtctctcccccacttcatctatgggtgtcctcgacaacatgcccacacacgaatgcgtgaccaccaaactcttcatgggaaccatgtcttctaaaagtgcatcccgtaggatgtgactctcgagtcaactatctcatatagcacccctgtcgatttccatatgcatgcaatgttcgctcaacatcctacttattcacacttgcatcacgcctttctagctcccaagatgtactaagttccaatgatgcagccctctggcctccatgcaaactcaagcacccttcttgatcttcgcagacaaacatgacttcaaaatctcactagcacggctctctggcctccacacaaactctagcaccatctcaatgcttgcgctcgatcttcttagccctgctggcttcttagatgcattcattccacaactccacatctatat

SEQ ID NO: 231803 - DNA, 1135 bp, Cannabis indica
atcatcaaaacacgttcaatggatgctattcaggaaaaggacagagatgaacttgaaaatttgggaaaaatctgctctctagaggaaactgcggcaattttttagtgacaaagtgaaattagacaagatttctcagattggctaagcattgggaattgagctgcgcaggaagtaaatctaggtaagaaaatttctcttattctgtgatctgatattttgatgaattcaaaaaatagttttgtgagtatgtaaagtagaaacataaattagtttgaagtagggaatggtctctggtatgaaaattgaaccagaggatatattgttgaagaagttaattactgacaaccctaatagcgtgttatgtggttggagtgaatccctctattaatggatgtatttgtgagaagaatatggaagtaaatatttattatgccttcttatggaatttttgttatcatattttaaagcttggagcaatgagttaatgtacttgtaggaggattcatattctttgatagaaaacctcttattatgaaacaataaaaagggatgacttcactaaagaagatgttactttagttcctacctggattaaattgaagggtttagatattaaattttgcacaataatcactctttaagatagttggacagcttgggtcaccaacccaagtggaaaacatcaccaagcataggaatatattgacttactcttgattttgatcatgagatagagttagagttatagtatgaatagctatcacttgtttgtcataattcttctggttttgaacatgagactaatatatgctggaagaagaaacatattaagtagacttggctgcctaagaagagtaccacaaagagaacatgttttatatgccaatggtagtgatggcttttagaaagttattagagtgaaaaaggtggctgagaatgtttcaatagagactacagttactaatccatttgttgttcttgattcagagcaagtgcttggaggagtttctgggttcaatattagaggggaggggggatcagatccctcaacttccaatggatagaatcatttggtggaatgttagagggattaacaagcattataagcatcgtgaaatcaagcaattgattaatt

SEQ ID NO: 231804 - DNA, 822 bp, Cannabis indica
gtacatccttgtctcgttaaagacaatgtagtctgcgattcataaatatactctattgattttgcatttaatgagttattccatttaataattattgatataattatcaacgaattcattaattcatattccctgagattgacacgtgtcaccttctgaagtaccagctgaatttcaggtataacaattgccccttaaaaaaatccttttctatgaaagtgctttttaaatgattattaagggtatatttgtcataatccattttaaaaacatgcatgcctttgattttggcggttttgtggtttcaagggacatcattagcattaatgagccatcctttccatttctcttccattttcatccattggatcttctacattttgatctgacggttactaagttcaaagtataaaacgagaaaggatccatttttcatcatttttaccttttcaaaaaactcaagctttttgaaaaaatttcatcacagcttttggaaaccgtgcatgccctccttgtctttgacattcttcctgtgaatttactcagatttgctttttgacttcaggtgttcaaaaaactcatcgcgctgttcatcccgtctccgtttgcagaattctccaccactcgacttcatacagtaagtgtctaatccatctcctttttttaattttccttggttatgattatcttgcatcttgtcactccatttggtttggcgattcaggtttacgttttctgggtaacttttagggtttcggcataatttaggtttatcatattctttaagcctttggtttattaaatttcatctaggaattggga

SEQ ID NO: 231805 - DNA, 1118 bp, Cannabis indica
acccggtgtttccccttacggatcacgggactactgactgtcacagttgtgccggataggcaaccggttcaagcagctccaatagaacaagtgatttctcttgtttttgctctagtggtagctaacactggactagctctgcaaccacatagagattcactcttcaaaaggtttgtcaagtttcaacctccgatattgctaggtggtactgatattattaaggcagatcagtggatgagtaccatcacccatatcctagataatatgggattagttggaactgagcgggttaactgtgtcacttttatgtttcaagatcatgcccacacctagtgggatttagtaggtcagtcttgagacctcagtaccatgacttgggaagagtttaagaacttattagaagaaattttttacaatatcgccattagtaaaactcatataaaggattttgtgaaactagttcaaggtgataagacagttgctaagtatacgctagagtttgatcgtctgtctaagttttttggtgacttagtaccaatagatttcacccaaaaatagaaatatgttactgggttagatttcacaattagtcaagacttgaagattaccactgatcatgacactttgtataggaaagtgttggagagagcacttattgcctatgagacaaaacaacaaattaagaaataaattgctaaggatgccatcatggcatcaattcctagtgctggtggtaacgtaagtaaagggaatggtagtggcatttctgatcagaaaaaaagaatgatacttttggatcatctgggatgaataagagattttggggaaacagaggcaaccctcaaggtcgtggtgatacattcaagtcatacccgaaatgtcccatgtgtaagaaacaccatcagggtgttaggctaagacttgtttttagtgtggtatggtaggccactttaacagggactgtcctcaagctaagaagaggaacccaagaaaagtaacaaccataatctgggatgtgtgttcatggtaactcaggctgacgctgacgcttgtccatctgttgtgacatgccaaataactattaatggtttccattatacaatgttatttgattctgg

SEQ ID NO: 231806 - DNA, 1722 bp, Cannabis indica
atatatataggaaattaaccaaacatgagtggggtggactgcaacgtcgagctagttccaacaattgaatatggcaaagttaatctaacagtaatataagtccattaaaggagaagagaatgacatctaactctgaaaatttaacagagtatttatttacgtatcacaatttcagataattgcaccattaatggttccaaaaagtaaaacagcaaaatgatccaaatgcttatcgcacattaaaattatttaatctgtatcccaaacaggaatacgttagataactccgatctagactctacgcacgctcacagcggatacggcgagccaattgaatgtccttgggcatgatcgtcactctcttggcatggatggcacatagattggtgtcctcgaacaaacccaccaaaaaagcttctgcagcctcttgtagggcaagaacagcgtggctctgaaacctcaaatcagtctacaacaaatacaatattagtttaagcctgaaacaacaccacccaataacaacttcaaactgaactgataaataaggcgctggaatggcaatttccggatcaagagctcagtgctcttctggtacttcctaatttaactattaaccaagaaccgtttttaatcagacacacaataaccagaaacgaaatatcaacaattgggaaaaggggaaaaagagcaaaaagagaaaaagagatagaactgtatcagagtacaagttgtcaacacactgccagactgagataactgtaaaatcttcctacacaatttataatgtatcaacattcccagaaaacaatcaattcattcagcaaacataaagactcatcaattgtacatgaacaattattgtatacccatacttataaattcgaccaaagtcaaaaccatagaactgaaatgataaaaggaagccacagatctccatatcgaataaatgatgatttaaactccaagaaattataatagaagttcattcaattcaaatattcaccatttgaacctccacaattataatatgcgaaaaatccattaaactgctaaagccaattggagacattaaaacacacatgaattagggattaacagaagtataataactaaaatagacaagcaattcgcagagtaagtttcgaaagaaaattaccggagtgcaactgttcctggacgataacgatgaggcttcttgactccaccagtagtgggagttgatttccttacagcctacaagttttaaaaatgattgatcagaaattacaaacttgctaacaatggtgaataataatcctctatacgtagaaagaaagtctcccagagtatacacacaatgtacttagcaagatttttcctgggagcctttccaccagtagatttgcgggcagtttgcttggtacgagccatttcttcacagatcaagatacaaagaataagtagtctagcacaatatgtaaattagaatgaagaaaataagaaaccaaattcaatatgaaaaataacgttaagaagagatacggactcactttgaataagaataagaatgagacaaaattagaatataatgaggtatgtaaatgtgtgtctacagttatacatatatatattagtggatcattggcttggacgatttatatccgtatagaaaaggaaacatttttttcatatatatatatatatactaggtgaatgtacgtgccgagccacgtattgctagtt

SEQ ID NO: 231807 - DNA, 1800 bp, Cannabis indica
cctggtaggcacttggtgcgcagacttcatctgagacagcaagatatgtttagatttgggcttcaacaacccacaaaaatatgggagaaatatcagctaatcccatattcttgggagataattaatccttttatcatttattattaattatgtaaataatgctttacagttcctattttttagagatattggttgataatatcttataagctctcttgtataaagagcattagcctaaccctaattcttctaagttctatgtctctaaggctcactaaagctctcaaactccaagtttgaaagcctaagtcattcttcccttctctctcacacacgcaagcttcattctcacttgagatttgctaacttgattctcatattgtaatcttcagagagccactccagatttcacaatccttgttgatctgagttgtattttctctggtattaatacaactaaaagaggaaaaggtcattacccgctaactaaagaggccaaatctctataaaaatattctatctcttttactttgttattcttactatgtacatgtgataagcatcaataataaatatgactctgctatcagttaacgaaatttgatgtcaataataaatataaattagaaaccttatattagttaaaaaacatggtaaaaaaaattaatatatcgtgtaaaatttttaataaattttcttatcaatttttatattaagcacaaattttattttcttaaagaaaaacctaaatgactccaagtgccgttcattttagtatatatatttatatataagtgtagatctcataaaagtataatatttttaaaataaatattacactatccttattttatttaatactatatatctttgtggctatgtaacagaattctcggtttaacaattattttttaacgttttcttttcttttaataaaaactaacgggagaacatctccgttaacttttaaatctccaatttattttcatttataattttttaaatgaaatcatttgacgaataagaaaattgtttgattgacacttaaaaaaatgattgaaggaaattaataatcgattaatgttgagttcaaaaataatgaaaggaatttgaagaacgattgccgcttcaaaggaaatcgaagaacgattgtcccttttcttgaagcaataatcgcgaaactcaaaggaaggaagaattgaagccgcctagaatgagagtgattgtgaaattgaaggacaatatgaaatcgaagccaatatgaaatggcagattttgcaaatcggattgacagtcccccagtccccactcaggtttttcttacttattctcctttcctaataagcagaggggaagaagatgacgacgaagaaatagtgaatataattgaattagagttctgtttgatgtattggatttaattttggaacccaaattttgattttacaatgttgatgagagaaaggaaaaaagaagaagaaggatgtgcaggccgtcgataaggcctcggccagctacacttgtcgactttgctattggtaagctcacatgtgtttaagggtggcaccatctatcagaatcatttttcggagaaatgggcctattggaaaaaggattttaggtattcgattatgggtatttaaagagaaacagaagacactaccattgtcatccataagaattcaagtcttatttgattttagtataggagcgttgaatcgtcttattatacaaaattctttatccatgcccccagacaacaattcttcgagcttgccccacatcatgtgtacccagatg

SEQ ID NO: 231808 - DNA, 2550 bp, Cannabis indica
aaatattttgatttaataaataattgtgatgttttaattactacaaaaaataatcaagaacagagatggtagtacaataacatgaactaactaatcaagagaatgaaatgcaacatagaaattaaatcacaccaatttaacaagattcgacagttgcttggcaatggtaattgtctactcctcggatggaacaacctttggctttaatctttattgattcacgtttggtgtaacaatggtgatgatcaccaacaactatgaactcacaaaaagggtcgagttctatagcttttatttctatgcatgcaaagggaatttaggagaggaggaagaagaatttttgaaaattatttcaaactgtagaagaggttagtgtttaaaggcattgtccaagagtgttggaaagacagaattgtccccaactaattaacttaactgccgagattgaagctttgaggaatttacttgtcgaaactgaatactagctagacttaactaacaccacaaatccacatttagttgaagttagtgaagttaaactagtaaagaatagattgttcccagagcccctaagggcattagatgctggtgtcaatacttagcagccttaggaaatgcctgaagattttcacttcaaggtttccatgtttcaaagttgttctaaaatctatgtgttgaatttcatagtcacactcagcaattttggccattatagctctcataaaggcttgtttgaccactggtgagaaaatatgattgtagtctgctccctctctttacgtgaaccctttggaaactagtcttgccttgaatcttctatatttaacccctagaatgccctctttcactttcattatccacttgcaatctacaagcttctatacaggtggtcccttacccaagttttgttcttgatcagtgatggtatttcttcctgaattgctagaagccactttacaccatctctgatggttatggcttccttgtaggaggttggttctacagtgataatatcacctacaaaagacaatgcaaaccctgtgaagtttacgagtttagcaaatcccaattcgtctggagggtgtatctttcttctttccttatcgttggcaagttgatatgtctcaagttcaccttgagatgtaaaaagttcagtggatgtagattcatctaatcactcttatgaccaaaatgtgtcctggttgagttgagtctgagttttaacattattgcatgtaccttctgcatctattttcttcagcagcttcaagggaatttccttctcattgaagatgacctggttcaagacaccagagtttataaccttttaccccatcagggtagccaataaatcagcatttgattaccgttggttgtaacttgtcttgcttgatgtgaacataggcagagcacccaaatacctttatgtgaccacaattaggaagcctattagtccatttttcttgaggtgttttgaaatcaattgcagcagagggacacctattcaccaagtagcatgttgtcttgatagcttctccccaaaactatctttccaaaccagctccagtcagcatacaccacactctttcgatgagggttttattcattctctttaccaaactattttgttgggagtctttggagctatatgatgccttggtatatcttatttgacacaatattctttgaacatcccaaagcagtactcaaggccattgtttgttccgagtttcttgatcttattcccaatctattttttaatcagtttcttccaatgtataaaggtctcaaaagtttcatccttgcttttgagtaagactacccataccttcctagagtaatgatcaataatattcaataagtagcttgctccaccaagtgtctttactcttgatggcccccataggtcacaatgtttataattcagatgttgttttgatgtgtgcacaccagttgggaatttcactttgcaactttttccaaaggcacactcttcacaaaaatctagtttcacagacattttacctttcagaatcccttgcttctcaagttcagtgagtcctctctcactcacatggccaaacttttgatgccaaagtctagtttgaccagtcagtttattcctattacctccattctcaaaacagatggctagtgtggcaacatatatgtgtatataaaatatatatagtatatattaatgtgtatataatttatatatatatatatattgtatacagtgatatatattttgtattgtgcttatttgtagcttttttagttaatttcagtaattgataatatggtatactatttgtttttcagattaagaaatttttttagcactttggagaaggtggacacaaaagttcttttgtgaaatgtatgtgctcatttatttaactcacgatttgagaactttactcaaacgtatagtcagtcgcagtcgcctggtggttcgtcttctcagagttatgccgcccctccacaacagcaacaacaacctcctcagccacaaaagccgtcttcgcaacaacaattccaaaattt

SEQ ID NO: 231809 - DNA, 821 bp, Cannabis indica
aatttgacaaattatttatttttatctttttccttcatattttgcaggtggtatcatttcctattttggaggaattacaattgctggatctttatcatgtaaagatgatttgggcagatcaacttcaagaagtatcatatatgcagaatttcaaaaatttaactatttctagttgtcataagttaaagtatctgttttcttctgctgtggcaagaagtttcattcaacttagaaatctagcagtgggtgagtgtaagaatatggaagagaatattgtagtgataaaagaaggtggagaagaagaaggtagttccaatgacaccatttccttccctaaactacagtacattaagcttgatggtcttgaaaacctcaaaaggttcagtggcggaaagcatttggcagtggaatgtgaaggattagaacctttcttcaatcaaaaggtacgctagctttatattttatttagtttcaatatgtgtctgatgagatgcataccttgtttcaaaagtggtcaataacacaatatgttttagaaacctaattaatataagtgacaaaataaatatatattctttttaagttttttatgatgcatgattgttgttaataatttgaaagggaaacgaatcatcactaaacataaataaatctttatataatatctttatataaatctttatataagagtaaagtttgatattgattttttttttcaatacttcagggtatatatcctctacttaatttaaaatataatattgtttgctgaatatatatgcaaaaatttcacacaattatatattttttctcttttgtag

SEQ ID NO: 231810 - DNA, 1012 bp, Cannabis indica
acaccttcaaatactgctgtgcttccttttcagtctttccatgtttaaccagctcatgaaaacatgtggcatgttggttgtttatatgacctgtgaaagagaatccgtgaacggtaacgtcacatccataggctttctcacttaaaacctaatagtttacaaattctgagtgaaaactaaaataataaaaataagaattcagcctatcttggtaattagagtttgtctttgttgcttatcttaaaagtactaggagacacaatcattttgtctccaagaaagatatgcttgaaggacttctattgatgcacaacatattactcgtgcacgaaaagatggcggatatcttaactccttatcatggaagaattccttccatttagtaacatataccgaggttaaaaaggaaacaacaagagactgtattttgctgcagattcaatttccactagttagcacttcacaataatgacgagagcaaaggaaaaagggatctcaaagcgaacacatatccaatgataatattactcaatgctatgcataaacactaaaactactctcttgagctgaccctaatatttacttgcaaaaatgttatcatggttgtagtgaagtttatggttattatacctatcaatcatcattaaaatatgtgcacacacacaaatgcacatagatagaatatacaataagatatatttgcatttgaattacatgcacatatgcattgaaagaaacgtagcattattgggaggaatcttcttcttgttagcacatccaaacagactaagacaataacatatgcagctcagacaatgatagtgaattttgaaaactaagaaataaaaccttgcacgcctttgatagaaccgtgttgttttcttgagagcgaaactgcaatcaacaaaaaaatatgtaaattggaatgaaatacaataagcagaagtgaagagaatacgataatgatattaaacataaaacaaataggccgtacctgtactcatcactatat

SEQ ID NO: 231811 - DNA, 2383 bp, Cannabis indica
aatggttggccaatgtagttgttttttcgaaaaaagaatggaaagtggaggatttgtatcgatttcacagacctcaacaaggtgtgctccaaagattcattcccgctccctcacatcgacatgcttattgattctacggctaggcacgagctccttagcttcatggatgcattttatgggtacaaccagatccttatgcacccagatgatcaagagaagacatcattcatcaaagaacgagggaccttctgtaacaaggtcatgccgtttggactaaagaacgccggtgcaacatatcagagattggtaaatcaaatgttcgcagacatgctagggaagtcaatggaagtatatatcgatgacatgctcgtcaaatcgctagcagcagcagaccacctcaatcatctcgaatagtcattccaggtacttgaaaaatataatatgaaactcaaccctgccaagtgttcttttggtgtttccttaggtaaatttctaggatacttggtgacaaagcgaggagttgaagcaaacccagatcaaatacgctccatacaaaacattcaatcaccaaaatcaatcaaggacgtctaacacattagcgggaggatagcagcactcaaccgttttatttcaaaatcttttgaacgttgtcacttgttcttctcaacaccgagaaaatgaaggactttgagtggacaaaggagtgtgaagatgcacttagacaacttaaagaatatcttgcctcacctccgctcttagcgaaacctaaagatggagaagcactctacatatacctagcagtctctaaaacagcagtcagcgctgtgctaatcagagaagaggaaggaaggcaacaatctgtctactatgtctcaaagactcttatagatgcagaaacaagatacagccaacttgagaaactggcactagcacttatcacagcaggacgcaaactcagaccatattttcaatgccaccctattattgtgttgacacaatatcaacttggtagcatcctacacaagtcggagctttcaggaagactcaccaagtgtgtagtggaactcagtgaatacgacatcacattccaaccaaggaaagcaattaaatctcacgtataagctgacttttccagtgacatccaggtacaagggaaaaagagttgttgtgcttgaaagaacaatctaactctaagtggagattgtcagtagatggctccagcaacagcagaggatgtggcttaggcattgttctcacctcaccctaaggagatgtcattcaacgagcatcaagtgtgacttcaaggcaacgaataatgaaactgagtacgaaacgctccttgctgggctcgacctcgccaaagagatgaatttcaaagctcttgagatcacgttagattcccaactcatagtcaaccaattcaatggaacataccaggccaaggactcaaagatggtgacgtacttccaagctgttaaagaaagattgttgagctttactgaaatatcaattaatcaagtaccaaggatcaaaaatagtcatgcagatgcacttgcaaacctagggtcagcaattcaaacaaagagtggagtctcagttccagtcatctacatgcaatggccagcagtttggaagcctcgagaagaagtcaaggatgtgtcagagaacattagttggatgacacccataagttggtacctagctgatggcacactcccgcaagataggggtcaatctcaaaagatcaaagccaaagcagcaaggttcactctttatggcggcaagttgtacaaacggtcatattatgggcccttacttaggtgtctcaatctaacagaggctcattatgttcttacagaattacatgaaggcgagtgtggtaaccactcaggtttaagaagtctcagctatagagaacttactactggttactattggccaaccatgtgagccaattccctcaactttatgctgaaatgtgataaatgccaactgttctcccaagtttcacatatgccaccagaaaagcttctttcaactctagcaccatggcctttcatgaagtgggggatggacatagtagggaagatgtcgaccgctccaggacaacgagtctttaggctagcactaacagactattttaccaagtgggttgaggcagaaacattcgcaaaggtaagagatctcgaagttaagaatttttttggaaaaacataatatgtaggtttggagtgccaaaggagatagtcacagaaaatggctcgcaatttgtaagtttagagttccaaaacttttgcaaagaatggggaatccaactctcattcttgaccccaagatacccacaagccaacggtcaagcagaatcaacaaacaagattgttgt

SEQ ID NO: 231812 - DNA, 2128 bp, Cannabis indica
tggtaaaataaattctaacagaaagatttaaagtgaggcgaaggaccatgattagaagtgcccccaattttatcagaggttttgaggaagtcattaaagtctcccatcaatagccacggggtggtgccaacagtattaccgatgcgttgcaccataaaaaccagtaaaagaaaaagaatgattattttaaatcttgatgtaacagtaaaaatgacttatattaaaagaaagcaaggttacatcaatatcattagtctaaagaaaaagtaagccaccactaaggctgactctagagacttcaagaccactagggaacttaagcttatccataaacctatttacaacaccaatgaggagtttagtctccataataaacaaaagtgttggtttatattgcttcaccaacaaggagagatttcaaaatgatcgagtgctccccagatctcgagcattccaactaatgaaccttatgggtctgggcgggtgcgctaggcgtcacccacctcaatagtgctagcttcgtaaagagaatgagcaatgctgcgattgcgcttcaacatcttcctaaattcaacttcattaatgccggatggatgattggaagtaaacttcctatttgttcgagcttgaggaacactacgcgcaggctgtagagatgctcctactgtgaactgaagtggctgtgaaccagctaaatcactgagtgtggtggagaagacttgagaaatgggaacactatgccaatcgggaacagtaacagtaggaataggaggctcggtcgaaggtcaaagtttgatgagtggaaatgaaagcagagagtttctctgtagtggtgaccatgggaagtgaggcttgaatgggaatgacagcttcgttaacaggaggttgaccatgagcaagaaccatggaatcgggccaagcatttgggggattggagagaggctgctgagcaggagcaagtgtagttggaggagcagtataagagggacccataggaaagagacccgcagtatgcgtggttgacccgggtattgaaccttataggcggacgtaggagcattgaaattttccaaggaattgaagagtgaattatcagctcaagctagaggcatattagacaaagggacatgataagcaatgtaagggtggtacagaagaggcatcacatttggctaaaaactcactgcaatggttcactatatgatgagacaactacaatggttcactatatgactgagacaactgcaatagtggcaaaaattaggtagatttttgaagcgaaaatcaagccagacaggagatgtgagaccatggaattgaaagcgaaggccttttggaagtggttgagtacatcaatttcaattctgacccaaaggtagggaccccaagattccttcaaagaagtagtgtcaacttctatgaactgacccaaaatgacccaaagtttgtgggctagcgccttagaacggtgaagaaatggaatcccatagacttggatgcaaaagggggtagaggttaaaatgtcagcgagtgacaatagaacctgcttcgagaggggtcatgactataagtttgtagtcaaagtgccacggttggccaatcaagacacgccttcgatcaccaaagcaaccgaattaaacagtttaaaagtttggagttttttccacaatgttaatggaaaaatgttcaagccacatttggcgaaggcgtcttttgaaagcatcaacattgaaatggcgagtagtgagatgtttgacagtaagaaaggcagaaggctcctcctgagattcctcagaggcttccttaggctgttcagataaggaatgatgtaacaccctaactagcataggcgtattacgtgatttttaaacatactgtgcagctcgttgctaatcaacgaggtttatggaaatcgtgattaattaaaatttttgctttttaattaaacttataaaatatttatacaaaaataactcgggatcccgattacaaaacatttacaaaagttcactgactgtacaaaatacttgtcgcctagcgactaattacaaaacagccttgctgtcccgaggaatcgtacgctccaggcctaactgccccgacatgtaaaatcttcaccggctcgctc

SEQ ID NO: 231813 - DNA, 817 bp, Cannabis indica
aagaagtatgctcactgcaacgggaccaagttcgccagaatgttaagttggaaaactccggagggccagcggaaacaagatgtcaaggcaatcgacatcgcactattgttcagcagtcgggtatgtctctttactattctacaattttttttccctaaagaatgcttattttaaagttgaatttgtttgaaaatgttcattcgcgacatatttcgtgacatgcttgcgacactatgcgatatgcagatacgcttgtacctatacttgtcacgacattgtgctgacttttttgcgataatcataatttttgactttttttcacagtttttaattattgtgtgttttttttgttttgcagttggtggtaaagaagtgcttgtttccccagcccagtgaagaggcatacttcaagagtattaatgagggtaaagcccctctttgtttcgagatggatgtcgaacaaacggtggacaatgatggtacacaggagtctgtgtttgaaactcaagccaagaccataaacgaggccgtcacaaaggcaaatttagttccaccaccaccggcacctgaagtacacgagccatctacttcagccgctccgtctgctccaaccagtacaaccgtcaataatgacctcgcaaataggttggatagcattcagggccggctggataagcttgaggcccagcaggaagccgtcatgttggcacagacggggttagtaaatagccatatcagtatgaggcagtccttcacggagagtcagaaagatctgaaggacactctactggctaagatggaccagttgatggcaatg

SEQ ID NO: 231814 - DNA, 807 bp, Cannabis indica
aaagagaattttattagaaccaacaagacaaactacaacatatttggatgatcagccttacaaaacttggctaaccaatccgggaaagaatgagaaaaaaattgagtgtttttgtccaatagacaattcctagctaacatattagcacactcattattggttctttttacatgaatgatttttacatcttgaaaattggccagcacctttcggatttgatgcagcaggttgctttcagccgagtgatacggctccaaattgttgatttcttccaccagcaccttacaatccgattgaacttcaatctggctaatagcctcagctggaggatgcttcaacgcttccaggatcgcccaagtctctgccatcttggctgaacaaatgccctctttgtaaatctgaccagcagcaaggatttgtccatccttcttacgccagatatagccgaggcccataccagcagttttatccacgactgcggcatcacagttgacacaaatgcagctgttagcagggggaatccacttcttcatattggtggtggcatctgcctcttgctgcaataaatcacttccagttttaggcacatttgggtaagcagaaaaaatccagtttaaaagctgctgaccgttcatataaggaagttgctgccacttcctatttcggttttcccatatagcccacatcactttgatggtgtcttcaaaatcgttcctggtattcatttgttttatggccaccaacacatcaaacatggaacctgcctctagtctagagcagtttttgtaccaagaacagagtttccaa

SEQ ID NO: 231815 - DNA, 639 bp, Cannabis indica
tgaatgatttttacatcttgaaacttggccagcacattacggatttgatgcagcaggttgctttcagccgagtgatactgctccaatttgttgatttcttccaccagcaccttgcagtccgattgaacttcaatctggctaatagcctcagctggaggatgcttcagtgcttccaggatcgcccaagtctccgccatcttggctgaacatatgccatctttataaatctgaccagcagcaaggatttgtccatccttcttacgccagatatagccgagtcccataccagcaactttgtccacaactgctgcatcacagttgacacagatgcgtctgttagcagggggaatccacttcttcacatgggtggtgacatctgcctcttgctgcaataattcactttcagttttaggcacatttgggtaggcagaaaaaacccagtttaataattgctgaccgtgcatataaggaagttgctgccacttcctatttctgttttcccatatagcccacatcactttgatagtgtctttgaaatcgttcctggtattcgtctgttttatggccattaacacatcaaacatggaacctgcccctaatctagagcagtttttgtaccaagaacagagtttccaagtg

SEQ ID NO: 231816 - DNA, 490 bp, Cannabis indica
ccattgaatttgagattaatttttcattgtcctagtttatcatattatgtctagaaattcattgatattgcagagcgatttagttactagcctgtatttgttttttatgaacacaatttgtgatcatagtttcatctgaagtatagttattctagataacaatcatattatctttcaatatttttatacattaagcaattagttcgtaaaaattggtgacatttttcagctatgcagtagttaggaaggttgaaaaggttaccaactcgtcaacatctgagatcatagcatgccggtaagttgtccaatattctctcacaaaaccattttctttcttcattctcctcacgaatttataaatattataaatctttcagcaaattccaaagcacatttgagtttttcagattttggcttctttttgcatagtttatatagtttccacttggtattttttcagagccaccatttctatggttgcatacaatgg

SEQ ID NO: 231817 - DNA, 1220 bp, Cannabis indica
gtatgatcaaccactttccttttctgaagccccacatacgtatggagagcatcatgaaacccacgccaagcaaagattaaaacattcttaggcaaagaagtttcccaaaacccttgccaccatactgcgaaccaactcttagaaggggaatgatcaaattgatccaattgtgacgccacaaagtatccacttttcactgaataagtcccgtcagctgtatagtgccacatccaagaatccgctttcagaaatttactaattggtaaagaacaaatactctgttgatcagccacattaaacaactccctcaccatttgcatattccaaccactccttgacttgttaatcaaatcacgtaccaacaaatttgaattatctagagtagaacaataaggcctaaaactggttggtcgcggcagctaagggtccttaaaaactagtatcgtgtcacccattccaactcgcttacgcaatcctttaattaacagagaccttccccaaattatgctccgccaaacataactaggtgcctgcccaactgcatccaaaaccatagaaaatccatagattaaaatattacactcacaataccaccgataataacatactattaaacataagatcaacaaaccaaaagatggcgtaaatattgtaaccaactcccacctaaagaccacaagtattcaagcaaaacattaaaatgaaaaaaaccaacctccccacgaatttcagtcttctgaaaagagttaatatgaattgcactaatacacaactaagtcttctccttctccttaactctccttattaaaaaactgccaataatacatctatacttataataattgttggttccatcttaacacatatgggtcttttaatagcatataaaagtctacttattaacataacattacaaactgattctaagcatcgtaatgttttggtaggattgttatagtaggacaaaaaaactgactattatactccaagaacaaactgaatgcagtcctactaaaaccggcacaaaaatcccactcatacttacgtctaatccaactataagcaaatctataaacatccttctatgcgtcctacccataaaacatagccaaaaaatatatataataccatattataaaacaaaaaatataaaaccaaagtaagagcttaaggccacctacggtgcaaaagaaaaaaagatataacagtaaatatatact

SEQ ID NO: 231818 - DNA, 1688 bp, Cannabis indica
aagcaaccttagcatttggtgtctaacgaatcatacaaaaacaaattcttcaaaacacaacccaaaaccaaacttcttttttaaactaacaacataaaagagtctagggctttaccttagtcttcctttcaatccttcctcaaaaacaagctaaaacccttgctgaattgctgaagtttgctctaaaaatctgcttggttccttgattcctactaagccgagaagaagagaggcaaagggaggagagatgaacttaatttttgagtctatctcgattcttaaattaaaaatttcatcttaatccactaaggataataaaataaaaacttaaatggcaaatgtctgaaagcccttacttcattgctaagtaaactctaaatttaggagtaaaatagtcttaaccaattacctttaaaaaaaatctcaatattataactatacataaattttgtttcgctaattctaagatactaaactgtatctatgtgacactattggctaaaacgtcaattctactgttactcggcataaaatacaaaaatgccaaaatttaaaaataacttgcatagcacacctagaatctaataaaatctttataattgaaaaattatctcattaatgtctattttgacatagattttattttctactaatgtacgtataattataaataattattaaattactcatataatttccattatctaattatgcagtctagccatagcaaaaaaagataagtagtggtcaagttcaggaaaaaaggataagtagtggtcaagatttgcccataaatatctaagaaaaagtaaaacatgaaattatagagactgaaagcaatgcccacaaaaataatatagactgaaagcaatgttcgatgcatatacataagactgaaaaagcaacgttccatgcatacctatatataaaagtcatatatatacataataatgttccatgaatatagatcatattaccatccactaacaagttagaataataaaaaaagttaccttgtatttggttccataataatatctttgattttttttttattatttgactatacctaattgtacatctattactttctagaattttaaattgttgaaaattttatcattacaagaaaaaatatggaggattacaatgagatacataaaatatataaaaatatattacatcaagattacaaaataataaaagaagaataagaataaaaacactcaagaacacacaataaccttaatcaaggctcaagtaacctcatgtcttaggatgaatatattctgacaaaattttaaccatacaactagtagtttcaacttaatgtaacaattataatgatcattataatttatagaatattttttcactctcatatgaatatgaataattaccacaaaatccttagtacttattaccaattataaagtgtgcgcgcgttagtattaattaggtgatctggagagatttctgagctgttagaaaaactcctaacattcaaaaacacatacaattgatatgctgaaaagaaaaatagtaattagttataagttaccaattttttcagttttggtcaattcttctctaaactgtttcaaatcactagctcccaatcaattttaaactatttatacactttgtaaatgaataaatcaattctacaacagctacattatcaatag

SEQ ID NO: 231819 - DNA, 558 bp, Cannabis indica
ttctcaattaaaaaatttaaaagtgaacaattttatagaacatgatttgaaaaatatttcacttttctaatttaaaaagcataaaactaataaaaaaatattaccgaacgcaccataaacaaataataataaaataaaatatcacttcaaataaatacaatattttatcaaatattcttattttctcaacatcttctcttcatctttcaaaatagtgtcttgatgaaataacatttgtgaaattttttattagcaaaataactttacaaaaaatttattagcaaaataattttgtatggtcgtaaaaataaccatgaattacactatgcgaccataagcgaccataaacgaccattatggtcgcaaaaagaccatcatagtcgcataacgtaaactaagtgaggttattttataaattttaatatttcacattattagtttgcaaattttacttcaaaatacattgcaaaaactaagtgcatgtttgacatcataactaaaaaaactgtttttaattttaaaaacagaaaaaggtttttgaaaacaatttgacttttt

SEQ ID NO: 231820 - DNA, 1916 bp, Cannabis indica
ttgctgtcatgccttgctgagaatattctgtaacaccagcagcgttttttaatgatttaatagcattattgttgcgtctcgatgaagcgtgagcatgaaaaaattttgtattttggtctccactttgcatccaatccactcgagaacgttgttgccaataagtctcctcttgtgctaataaatcatcaagaatagtttctgaatgtttaagctcttccattgaaactatggttcggttggcactgtgatttaatgcagaaactttctgctgcatttttttgatatccttctgcatatttccatatttactggtgtgccaagcttgaagagaattggaacattgttccaaattagtcaaaaacagatcagccgctacagtagtagaagagaaatgccagttttgcttgataatggcagcagcttcagcatcttttagccataatttctcaaatctgaaacgagacttcctcctcacttgctgagtttgttgattgagtgtacgaacagtaaccgtaatagcccgatggtctgatctgaaaaagtctaagtgagtagtgatcataggttcaaatgtagttgcccacttgtcattaacgaaacaccagtcgagtctttccttaattgtatcagctttatgtggacttttaaaccaagtaaaaggatcaccatggacaggcagctcagagaaagaacaaaaatccaaaacctgtctaaattcatccatttgcatttcatttctcaatgcacccccttgcttattagcattcgaaagtatctcattaaaatcaccaatcacaatccacggtagcaatggtgcaacatcacgaagacgctttaaagttgtccaagaatgacatcgattagattgctcaggagaaccatagaaagcagtgaaatgcatagtaggaccatcaccataagccaaatagcaatcaaacaaagtagtattatagtgtaaaagtgttacattgacatcatctttccaaagaagtagtaaaccccctcctagacctaccctagggacttcaagtccattattgaaatgtaaagcttgacgaaaacgagaaattacattagaaataagtttagtttccataataaaaagtacatgaggagattgctctttaacaagcaaacgaagatgacggaatgcgctcgggttccccaacccccgcgcattccaactaacaattttcatggctgaaagcggggctgagaaccagcctccgctgaattgtccatgaaacctgactgatcttcttgtgattcagaaacaatctggtttggaccctctccagtagacaaggttggagagaacataggttgtgtcagtcccctgcatcgcttcaaagttttcctcagtgaaatattatcaggttgcctcttgaaaagtctgtttggggatgtattttctttgtcaacaacctgcctaaccgatgaacaaacaacagcatcagttgctgtacttgttgaattttgcaacagcttgaggttatgcgcattagatggcacatatgacagagtaggatttggaggataagttgcaatagtaccaacatcagggataaaaatatcagatagatcatcaacatcaaccaaatccgtgcgtgcttttgatgtattaagagacttagaagaaccctccatgtttggcattgcactagtttgcttgttgataattccatttaaaagtgctggagtaaacttgacaatagttgctggtgtagcactaaccgatggagaaggcagcatagtagttgtggcaggtttgttatgaaaaattgaaggtgatggtgaaactgaagcagttgcagcagagttagaatccatgattgagacgtggagaggttcgagagtagaagaattatttggtatttgttggatagcagacgattctccttgtaacaatggatgag

SEQ ID NO: 231821 - DNA, 1018 bp, Cannabis indica
gtttgtcgtggccgatttctaccgagcgatgggaagcgattttggattcaattcaagtttgagagattatcaatgctttgctatggatgtggtagatggggacatgaaaaagaggattgtgataaacaagtagtgatggaaaaggatgagaatgagctgctggttcgtaaatatggcccttggttgaaggaagatgatcctataccaaattgctttgtggcgttcaaacaaggccaggtgatggctagtgatatctcggaggagcaggaggaatcggagagggagattccattggtcaccaagcttggaaaagaagttcatttgatggagatgggtgatgggaggtccggcgatgctgaggtggtcggagaactgctagtggaatcgaccattcaagaagatgctgagaactcggggatcgtgggtgataggttggacaaaggtggttatgatttgggtacgtctgaaaaatcaaatggaccaaagctcaatgtgggccgggcctgtgaagtggagagtttaagcccaaataaattaagtgaaatgtcatttggccaagtgggccgtgatgctgggttacaaggaccacgttcaggtcatgtggggaatgctcaaaaggtttttgaacagtcgaatggaggctttgaggatagggattcagagattaaagaacgcaaaactcatggagaatgtggtgctgacgagattgacagagcaagaaggtattataacaaagggaagcatgttcttgaggatgttgagtcaattcatgaaattggtgcttttgcttatggtgtttcggaagctggggagggggctagcagaccgaatggggtccaaaggaagagagtgtcaattaaaaataaagctcggcgacaggctaaggtgaattcgggggtcgcgattgttgggtgtccatctgtggagagctcgaagatttaagcttcggccgaggagggggcgacgaatttggtgttcaatgccgagagggtaattcaacaagtttctgggatttcag

SEQ ID NO: 231822 - DNA, 660 bp, Cannabis indica
caagatctctcaagacaaaattgttgcacttcacaactcatatgacactagtagatcccattttgaagaactcaaatcaagtgaacacatcctagatgaattgctctctcaagaagaagaatattgacaacaacgatcaaggacttcatggcttaaatcgggtgattccaacactaaattctttcaccaaaaagctaatacaaggcataacaccaacacaatcaaagaacttctcgatgaccaaggcattttacataccacacagcagggaattggttcgattgttgagaattattttcaaaatatattctctactgctggttttgatgctgaagcagtacaacatgttttaaacacagtgacgtgcaccatatttgctgatattaacagatcgttactagcgccatacactcgtgaggatgtttttaatgctttatcttctatgggtgatgatagcagccctgggctagacggtatgttggtcatgttctacactaattattggcatatagtgggtgatttggtgtctcaaactgtccttgaagtgctgaacaatggtgcggatccttcttgcttcaatcaaactctaattactttgattcctaaagtcaagaagccgaattcaatgtcccagctacgccccatcagcctctgtaatgt

SEQ ID NO: 231823 - DNA, 937 bp, Cannabis indica
aaaagaaaaaaaattcaaatcgtgcaactagaataaaagaaacctacattataatgaagcaaacaacactgatgcttattctaaatcagaaaaaggacatttctgccctcagcttaccggggtttcaggcggagaatttttctcggatttagcagactttccctcttcatcatttcccatagtccattaccgacctggattgttgcaaatacaaaaatttcttgatagatgaatcacactattatacagatattttaaagcccaacctagcttcctacatcaaatggtacacatgtcaaattgtaaccagaaaaacaactcgaacaactttttctaaaagagcaagacccttttcttcttgatgttttcttaaatgaaagaggttatgaaaaaagaataaaacaaaagataacatgaccaaaacccctaaataaataaggtaattatcaaaatactactttacacaaaattagataaacaacttcacaaaatctagagaaaaataaaattagtctcttacctccttgaagaccaaatcaaccaacttcacagaaccagaaagcagaagctcacaaaggggatgcaaagataaggaagagagagagagagcttaacaaacctgatatcaaaaggatctttaactgagttctttcaattcaaaaaaaaaaaaaaaaaaacaacacatgcaacacaacttaccacacttgtcattgaatagttgacaggtgttatctcattaaaaattataagtaaataaataattaatatgagttatgaaaagcccacgcatgcaacaccttaccacacttgtcattgaataattaacaggtgttgtttaagttataggtaaataaataattaagaagggttatttttgtaaatagactatgaaaagacccaaattgaactattctcctttttataaaggtttatagat

SEQ ID NO: 231824 - DNA, 828 bp, Cannabis indica
agatgttgctattttgtagaaatagaagactcaaaacttatggcttcttgatgagctgaaattaaagttgtgaatttgtttgatgtgacttcatgaatcattgcacttgtgaaaaatagacaaatgatgaagatgacattatattcagataagcaacacccaacgaaccaggccaaatgttgacctgggcattagggccttctaacccgagctttgggattctatttttgatacttttaaggcttctaaggcttctaaacttgaggacagggtctctcccctatttttgacaatgtcggattccatggttgtattagatttgacattcgagcatttaaaagtagtgtcccaggttgattgtcaacttgggcactaggcacaatcctaggtgttaacctgggcgctgggccttgtttctagggactcgagtttgttggtttcctccctgagtttacttgaatctccattatctctaatgacagtgaagatgttcgaagcactttttgctgaactgatttggaaacagcccaggttgacaaaatgtcaacctgggctcagggcgcagtcctaagtgtcaacttgggcattgggtccctattctacccctttggaagttccgcttggtccccaaaactagttaattctcaatattttatgaagacaaagatgatgctcgaaataattctaggaaaactccattttttatggcccaatttgatagattgtcatctggatgcagtgccagctctaagtgtcaacctgggcgctggccctattttttccgcacaaacttgttatttttccctcggaaggacttgttctacattt

SEQ ID NO: 231825 - DNA, 1120 bp, Cannabis indica
gaaggggaatatatggggctatacatatactattgctgcaatagtattgcaaggttgacgttgtgttcaaatttgaactagctaagtagctagtgtaactttgatcaatatcttactattattattcatatagaataataatattttgtagaaaactagctatttttgtttgttatttattaccacaaaactgtcatatagcttcgggtttttttaggcatttagctttgattttgataaaattcgcaatcgaaaacatttcaagcgaaacgaaaggggtcttgcgaaccgaatgcatatggaacccctatagcttcggttacatggctttaattattttagaaaattaaaccacgtgcagcctaaatcaataaatagctctaatacatatatttaagaagataagaattacagtgagtttttgaattcattacaccaatgacgatatatattttttaaaacctttcaattttttttcaaaaatttttctctcataaacacaaaattataaggactgaataatgttttaaaaattttatgttaattaaaacattaattttggctggttataatttgatccgtttttctaataaaatatgtgagtatattgaaatattgttacaaaagaagttaacttaatacacgatgtatttagtacaatattatttagcatatgttccaatacaaaataataaaattgatacaaaatttaattttatattactgttcatttaatatttataaatatatataaataaaaattgtgatgaagatatgaattatgctatattatattgtgtgataatttgacatgtgttagaatttggtaaggtatgtgttaagatgtctaggttctatctcaaaactaattgacaataggaggattagtctatttattttatatataataatttaattccacacattaattagtaatgtgggactaattctaatacaccctttacgtttgggcctggaaaatatgggtataatggatgacttttaagagaccatagagctgaaacgtgacatttgaaagaatctcaaaggccaaatcgcaaaatttgtgggtgtacatattgagaaatttatgggttttagaaaaaaaaaaatacaaaga

SEQ ID NO: 231826 - DNA, 3510 bp, Cannabis indica
tagagatgttatgataaaattggttacattttttgtatttattcgtattagaaattgtcttaaagtttgttatattaaaaaataaaattattgaaaattgagctcaaggtcttatttttaccattttggaaattatatagggtccattttatcatttaacaaaacaaatggtccaattaataatttttacaaagcacatggtctaaaatggtatttatcatttgttaaaagataatatatcaatatattaaactaatttaaatatgatatatacatcaattaatttgaatattttaaggaaaaaaaaaattgtttacatggttaataatatttaagaaaagtaattagttgagttaggaggattggtttaatatgttataggacaccaatttttcacatgttatcttaatttactttcagacacaggtttccaccaccctattgcggctatttaactattgttaattaaccttgtatttttatgttttgagtgttgttagttagtgatattttttaaaaagttatttttttaattaatatgaggcatcatacttaattacacaaatatcggtatgatatcgaggagggtgatagacaccaattgtactttttagtaattctctaattttttagttaatttttgtgtccaaaattaaatattgtaatatattcttttttaattttattttatgactaattcttattgctactttaatttttaaatttttttgaatatgtatgttcaaaaaattttaaatttgtatgtaaaaaaactttaacactgcactatttggaacttttaaaatttatatgtatgatattataatcataacaaattatgctgctacaaagaaaaattgtaaaaaaaacattttacatatattttcgagctaagttgtaactaaaaattcattagtctatctaagggcaaattcaaccctagctgctttctagctacgttaattggtagattttattttttattttttttaattataatacttctaaattgatcaattaaaatagaaaagaaaaaaaaaaaaaaaagaagtaggtaatagtagtgatgctcgacagcagcagctctctaaataaatgtttatatttttgacaatatgagtctcatttttgtaacatggagttgcactaagacacaccaagtaatgacgtagtcacacgccaatttctgtctcatgtagtacttagtacgtactatatatgttatggacctcatcatcaattcttgaaatgtatatacctattattattattattattattattattattattattattattattaggacgacacgattatgttatggacctcatcatcaattcttgaaatgtatatacctattattattattattattattattattattattattattattgggacacgattttgtcctaatttactgaagtatttcgtgtatattaaatgagtttgtaataataggtctcaagatacgttattatttctaatttgaataatatagagtactttttattttattttgatattttttttatagataatttttgacatatgaaagaaactgtaaatatatgttataaatttttatttgatactaaattttaaaatttggcctccttgcattcaagtcttggctttgcccctgggcccatagcttgacaaaacatgttctgcaattaggcgatgagctcctagttcgaggaggttccagcgctggtggaagacgtgagcgtcgtaaattcatgagtaattctaatcattttgtaaaaaatatatatatattaaattttatatatttttaaaaaaatattactaacccagtagaattatccaagagtaatgctccaatattaatagttgttttttgaccagtttttctttttgaagtttcatatggaactgaccatagccagtctagactgtaaatcttttaattatagatttcaagattggagatcagccacagaatttgacttctctgatccagaaaaatgttggactgcatttattaaatgaaaacagtaagttttcgggtcaagtcagctctcactcttgcccctctttaatttggatcggaccgggacgggtcataattcatttttatctttattcatctatatatttagttctcatgaataaaaatataaaaataaaaataaaaatagcaataaaatagaatacaataaaaattaaaaatacattaaataaattaataaaaatattattaaattttttactcatcatattctattagaatgatcttttcttatattttaaaataaatttttaaaataaaatattcattctactaaattggtaaaaaagtcattctattaaatgacatttcaatacttttaaaaataacaaagcaaaagatttaataaaaattaatttatttctagttatttcattttatttattacctccaaccaaatactactttaagtcctatttgatccataggattattagtgattaatacacgttgtgccataaatatgggttatgtctgtcgttctgtaagaaaatacgggttgtgtcgtgtggtgtgccataaaaaaatacgagttgtgtcgtggcatgtcataaaaaaatatagatcgtattgtgttgtgctcatattattcgagcttgaattcgtgtcatgctttactcgagccgtcctatttttttatacaagctcaaattcgtactctacttttccacattttatatttacaattaatgaaatagttacagggtcggtgctgaacttcagtgggcctaagaaaaaataaaaataatttttttggacactcttttttttaaaaaaaaaagaaaatatatagtaatttttaaaatcaataaaaaaaattaagtgtatttaaaaataataataataataataagacccttaaactaggtgggccctacggaataattactaaagttatatattttttatagcttcgataatttttatataatttttcatcaaatttttacataaaaattatataaaaaattcattagaactattaaattttaaatatttactaattagtattcatattattattactactattaaatatgaggtttttcacatgtcacgctttcataatatatagattatttatgcttacgtgtcatactttctaggtttgtcatgtcttgttgtgcttaagttttatatttttcgtgtcttaccgtgcttaagcctataattttcgtgctatgttgtgtcaattcgtaatatcgtgatgtgtcgtgtttaagttcatatttttttcatatttagtcgtacttgtacctttttggctcatatcgatttcgtaccgtatcaaaaagtatgatccgtatttatagcactacataagataaagaatgggattggatagtacagattgtataggatatagccatgtttagaattatttttatgaggagaggtgtcccacttagaaaaaattgttagagattttataacaatggaagaaaattaaaatattacaactctattg

SEQ ID NO: 231827 - DNA, 1669 bp, Cannabis indica
ctcttatttttagagagagatgttctgaccttgtgagtagttttctaaacatgaaaaataagctagaggaactctccatttataagtgaaggggtccttgaaaataggaaaaaataattcaaaaatattaaaatatatatataaattggctaattttgaccgttaattttgaccgtagatgattatttaacggtcaaaattaacttctgagattgatagttaatttttcgagctcgggttgaggcagcagaactcgctcagggtaagctagagcttattttcgtaactttcttgtgggtaaaatttgaggtcaataatttcagaattatgattgaagtgtgagacataatttgatagagcattgaaataacttcgaaattcaagctgattcatatcaatcggattaatattgagtgagctatggctattttactgaaggatgtttatggcctagtgcccaggttgacatatgacgtcaacctggacgttgggcgagtgggaaaatgtcctgggatatatttttttatgtctgtgttttggaaaattggttaacaattctcagagatgttgctgttctgcagaaatgagacttgaaactcttcattttttagtggttttcccatgttagaaatgagaaatgcgaagttgtgaatttgacttcatggatcttagttattgtgaaaaactagaaggacggtcgaaactgaataagaatcaaataagcagaacccaacgcaccaggccatttgtcaacttggacgttgggtactcattttggagcttccgagatgtcattttgatacttccaaggctcttgaacttgaggacgaggtctcttgcatcattttgaccattccaaagagaattcttggatcaaatttagcatttaagtgatcgaaaccaacgtaccaggttgattgtcaacctgggcgctgggcccaacaccaggtcaacctgggtgctaggcccaacaccaggtcaacttgggtgttggacttagctttgaggccctcagtttgtggttttctactcgagtttgcttgaatcttcattatttctaatgaagaaaaaatgtccggaatacttttttcgagaatctgattagaaatggcccatgttgaaaatatgttaacctgggcgttgagtaccaacttcagccattaggaagttttgtttagtccccagaaatagttgaatcttaatttttgctgaaaaacaaagaatatgcccagaagcgttctaagaaaatatcatcggaatcagaccaagttcacaaaatgtcaacttgggtgctgggccaaccccgagtgtcaacctgagcactgggtcttacttctggcaccgaagaagtgttgtttcttccgtgaaagtacttatttctccgtttttgatgaagacgaagatgatgtaaaatttgaatcgtcgatctaatactttggaagtcgcccagattaacaaattgtcaacttgggcgttgggttcccaggcaccgggtgctctaaatgctcaaaaatgaacttcttctgaatctgatttcgatacctcaaatatgtatgtagtgtgtctagttcatgtcccaatacaaagtttgacccatttgcactaagatggtcccaaaaactgaaaccctaattagggatgtcaagttgggcgctgggtgaaaccttag

SEQ ID NO: 231828 - DNA, 833 bp, Cannabis indica
caaaagaagatctgactctattataaatataggagtagtttttaatttcccatttaggagcctccttgaaaatggaattgactactgccttggagtcactctcgacaataataaacttagatccatgatccatagcctcctctaaagccatgcaaacagccgccgcctcaccacacagagcgtcaaagtaatccaattttgctgaagtcacccaaatcaactcaccaaggtgattcttggcaactactgcaatgcacatgtgatctgatcctaatttgacgtcgtagttcagtttgagccagtcttgaggaggcgggcaccaggtaagagttcggcttggaggaggagactagaaaaaggatgaactataatctgcaaaatagtgagaaacagagtcaatacattgtatgatattatccattctgtggttatgtaccttatcattccgcactctccaaattgtgtccacaacagtggaggcaaataggaaaacctcatctgggtttacatcttggcgctgaaggttccagataaatttgacccaatcccagactctagtccccgtgttcaccagagggtagatttcccatggggatgagcgccacagctggtaagcgaagttgtagtgtaagaaaaggtgctcaggcgattcatcatccatttcacaaattgggcactgggtgtcctcaataaagagaaatttgttaagagctgatctagtcgggagcgcattagagagaatgctccaccacaaaattttgtgacgctccgaattcttgctgttccaaaggacatcacagtggggattcatcttgagggcttggacaatataa

SEQ ID NO: 231829 - DNA, 1889 bp, Cannabis indica
actaagcggtctttacaactagtgtaggattggtttaaaccaaccaagaattcaagaactctatattcttcctgatatccttgaattgttttcatagatccacaagtacatattggttgtgatcaatactcttggattagatcccaaagagatttgagtctagtgcagttgctggtaacactattggatccttgtgcaagagactgttttgttcgaatagctttaaaaactcgaggagtattcttttgattgaatccttcctcaagattcaaccagatctgtgtagcatcatccatgtacatgacacttccagctatttcattagagattgcatgaagaatccatgaaataacagtgctattgcaacgattccaaagctcaaaatcttcatcatcttcatccggaggaggaagttttccattgacaaacttgagttcttcttgcaataaatgcgaatgtcatagctctacgccatgaactatagttctcacaaccagtgagaatttttggaactaagctagctctaggatgatcactgttagacagatagtaagcatttcaagcttcatctgaataggatctgacattagtgtctagagtagagtatcagttggaattttcagatgagcttcgagtttgagctcctccacgagccatggaggtgaggaaagcaatggatcttactcagagacctgctctgataccatattagttgcgaaagagtgagacagaagaaggagaaatagagaaaattgaatgagaaataaagtattttcattagagaaaaaatggtacaagaacagagcattatagctcgggtatacaacgaaatcaattagttacactaattgtcataacagtctaacaaactaatcaaaactaactaactaactttaataacttcttcatttatacaattaactaaatcaatatcatccatacatattccacttctaccgaaatcaatgagaaatttattgtactatttgtattttttgtacattgaattcctacaattttgttttctcccaattatttattttctaattaattgataattaaaaaaaatactttttaacttttaatcatacaaagtattatgtatataaatagagaatagcacacgctaatcttatattaaaagtaagtattcttgatcagtattttttatctgttatatatataaactaatacaataggtattgtgatttttacctatcaatagaaatagtaatttgtagcctttgatttaatcaaatggctcaaattaacccttgaaaactacaccataattaatatatttttttattaataattaatcttgaatattattaattacaagttcaactaacaaactccaaacctaacttcaaacctatattttttttacttatttatcttatgactatttataatttttaattaattattttttttaatttaaaattcatatatttatttttaattaattttattttctacttaacacaataattgtagttagaaaagtaaaaaatatttaagttatttaatcctacaataatcaatacaactaataatataataatgtgtaagtggtaaaattattgtataagtaccatgaaatgagttcaatcctttcgaaagatatgaattctttttaatttaagattttgaattgatgtagtaatttgatttttttttttatttttttttcctaaactaatagttcatttttttttaatattttacttaatattggaacaattattatactataaaattttaaagtttataattattgtgtggaaatctaacttttattgttaatatatattgatagttgtattacataaagtataatagtgaacaataaaacaacacatgcaatataataataataataataa

SEQ ID NO: 231830 - DNA, 940 bp, Cannabis indica
ttcattataacactgttatagaaccgattctatttttgtgttatttatttttattaattatattacagaaccggttatatttcaattataaccggtttgagttatcagtttttattcatagaatcagttctatttttagttatatatgagatatctacttttggtgacttttctgacgacagtgactttttcggcgacattttcggtgacggtaattttctcggcgacaataacttttccggtaccgaagatttttccggcgccgttgactttttcggcgaaccttattattgttttacaaatatgaaatttctactttttttttacgaaaatatggtataaaaaagtccatacatatattaaaaataaaaaaacccataaccccttggtattatttatttatgctataaaaaaagtaaactataccctcaattatcatattaataaaaattcactttaattttatcttttaacaaaatagaagatccaatcggtaacttttacaaatcattggtccaaaatagtaattatcctaataataatagaaccaacataaagatgaaaatttggatgtaaaccaaaaatcatacttgtgctagctaaatatctagaaagcctaaacaaaagtggtaaaattctctagttgggccatttaatgattaagtgggcctgggcccaggcccaacttaggtgcaacaactgaacacgaacgaaagctttccatctccttcaccccttcagagaccattcttccgccaccgtctccgactccgacttctcctccatctcaagcgacggtcggtgatgactgaaagaagtacagcgctacaaggttttctcccatctcaatttagtaatcacttttctccttttctcttttactttactgttggaaaaatttctcaataaaagagagaataggaggattacaatcaaaata

SEQ ID NO: 231831 - DNA, 864 bp, Cannabis indica
agcaccacccttgtagactaacacataattccttgtcctctttaagtattttagaatatgcttaactgccatccaatgttcctttcctgagttggactgatacctactcacaattcccactgcatagcaaatgtatggtctagtgcatagcatagaatacacatacttccaactgctgaagtataaggaatttttctcatgtcttctatctcttggggatcagtaggggattgttccttagatagctgcaaaccatgtctagaaggcataattgtccctttggtgttggtcattgagaaacactctagcaccttatcaatgtaagctccttgcgagagagcaagtgtctattcttccggtctctaataatttggattccgagaatgtaattagcttcacccaagtctttcattttaaactgggtgttaagccattcctttacgtcagtcatcttcttgacattgttaccaatgactaagatgccatcaacataaaagaccaggaatactaccacttgcttatccttgagttggtaaacacaaggtttatctttattttggtgaaagtcgtaggttttgataatttcatcaaacattttattctaagggcgagaagcctgcttaagtccataaatggacctattcagcttgcaaactttctcttcttgtcctggaagtttataaccttctggttgctccatatagattttctcgtcaagtatcttaatggatttgagcatggaaactagactaaaaatatcctcgtagtccacaccttctctttgggtataaccctttgctataagtctagctttaaaagtttcgacttgtctatcagtacctcttttcttcttgtacacccatt

SEQ ID NO: 231832 - DNA, 1083 bp, Cannabis indica
caagcaaaacaaaaaaaacttccaaggtacaaccaaagaggcagctgctgtaagactacaacagccccaacacaccactaccaccctttaattacattcattaaatatacatttttgaaacaatccttaaagggccctttattcaaaatccttagcctaactatacctctcacaaccaaacttatatttctaggagtagaacatgtcatctcaaagatacatctgtttctattgttccaaatttcgtaaaacgctgctgccataacagcgtttactattctgttttggagatcatcatgcaagccacaacacctgctatatatctcagccaaagagctaggccaacaaaacactactacaaatataagaattcgcgatggtcctaaaaacaatttttttcagggaccgtcgctaaaaaattaagtaactatttaaaaccgtcaggaaaaatttagtattcccgacggtttaaaatcgtagtaaacaaaataggcgacgctttttaataaaatgagattttttaatggacccttataggcgacggtttaaaaccgtcacctatacgatatgcgagtctttaaaaccttcgcctataaggatccattaaaaaatcgtcaccttcttctcgccacatttcccacgtgcccacctactttttttctacttcccacatgcgcccacgtaattattctccattttccacatcctaaaataaaaatcttaactctaaaaaaccccacccacgcatccgcaccatcgccctcctctctcgctgtcttcctccctctctcgatctccctttctactcatctctctcgtccatggatctccacccacccctcctcccgtcagtctccctctactctacatcgcataagtcgaaccaccaccaccttttgtcggtgtccctctcatctccttctcatacgtcgcaccaccaccacctcccgtccgtctccctctctctctgagctcggtataaatacatttatttattgatatacttttttatttattatatatatttattttgttattgtataaatttaatgttttttttaaagttagttgttattgtaaaaa

SEQ ID NO: 231833 - DNA, 640 bp, Cannabis indica
aataatatttcgacacgtggtaactctaaaaagtaaatgactcagttaaaattaggactaatggacaaataaaaagcataacattgaggactattactgctattttttgagattggagattatctgtatctgaactttttgaagacttttaccacaaattttcttaatgtaaaaaaagtattactcataaaacttagcaactaataaacaagttgtgaaacgaagataacttattgataaactaacaatacaatcatttatacattttttttatataaaatagatatgaatatatatatggctcatatgatatatttagattcatacagttttgaactaggggtgttcatcaaaccgctcaaatcgtccgcaccataccgcaccgcataaaaaatgcagtttgaaattctttgcgatgcgatcgcggtttaaatttttcctaaaccgcgcggtgcggtgcggtttacggttttgaaatgttcatatgcggttcaaaccgcaccgcaccgcacattataaaaatactaatttttatatttatttaggtccaataatatgtgaatctccaactcaaagcccactaattattatattgttgaaacttaattttttttatttttattttaaagtcttatggtat

SEQ ID NO: 231834 - DNA, 985 bp, Cannabis indica
tgtttctcaggctcaaacacatgatactttacctggcactagtgagaacttacaatcctcgagcctgcaacattctgaacttaaccccactgctcttactcgaactgagtctataccagctgctgcaccatcaactcaagttgactcttctgctattgctcgatctgcacccacatcaactgctgcaccaccaactcaatccactcacaaaatgcagacaagatccaggtctggtattcacaaaccaaagacttactctatttctagtattccagatactcttgctcaagctttgcagaatatcaaatggaatcaagccatggcagaagaagttcttgctctagctagaaatgctacatggactgtaattcctcttcctccagggaagaaagctatagggtgcaaatgggtatatcgaattaaggagaatcctgatggctctgttagcagactcaaagccaggcttgttgccaaaggctttcatcaacagcctggatttgatttcacagagacttttagtcctgttgtgaaacctgtaacaattcgagctgttcttacattagctttgtctaatggatggtgtgttaggcaattggatgtgaacaatgcctttctaaatggcttgttgcatgaggaagtatacatgcaacaaccccctgggtttgagatcaatcctggaagcaatctggtttgcaaattgcaaaagcaatttatggtcttaagcaagctcctcgggcttggttgagaagctccaacaatgtcttcttaatcttggtttctcctcttccaaggcagatcactctatgttctttcaacatacatctcatcactcaacaataattcttgtgtatgttgatgatattttgatcactggtagtgatcctaatgtcatcacttcaattgtttccaagctcaatcaagaattttcactcaaagatctcggcaaattgagctatttccaaggaattgaagtgaatgacacacc

SEQ ID NO: 231835 - DNA, 1502 bp, Cannabis indica
gtaaaatatttccaacagattctccatgccattacttaggtgtgttacacaagaagaagctgcacgacttttgtctgaagtacacgatggattctatggcaaccacacagccggacaaagtctatccaagaaaattctaaggctaggatatttctggccgacgatgattgaagattcaaaggcctacgttaagaaatgtgacaaatgtcagagattttcaaagatacctcgtgcaccgcccaacaactaactcagatgcagagtcgttggcctttcgccatttggggaattgacttaatcggacaattgcctaaaggcaaaggtggagtaaatacacagtggttgcagtagattatttcactaaatggacagaagctgagccattggcagccatcacatccaagaaagtgcaagacttcatggtgacaaatataatatgtcggttcagattactgtacaagatagtctcagacaatggcaaacaatttgacagtcaatccttcactaatttctatgcaaaccatgggatcataaagagtttctccgcagtagcacatcccctagcaaacggtcaagtcgaagtagttaacaagacactcaaagacactttaaagaaacgacttgaagatgctaaaggaaactagtcggaagaactcccaaaagtattaaggtcttattgcacaactaaaaaaatagcgactggacagattccatttgccatggcatatggttatgaagctatgctgcccgtggaattagaacttccatcccacagaagattgacatatgaccaagattggtggctcatcaaacctaaaattgaagaaaagcgagctcaaacctaaaattggtggctcatcaacagaaggtagctcggtactttagcaagcaagtgaaagcccagaaattctttgagggagatatgatccttagaagggtattcttgaacaccaaagacagcacgaaaggtgtgctcagaccgaactgggagggaccacatcaagtggttaaaattctagaatcaagagcatacaaactgggtaagtacaacaaaaaaatgcaactcgttctggtaccaaggtactggaacgaggaacatttaagaaaatactaccaataaaagtaacaggtctgatgaccatttatttacgaaacgaaagaacatttactcttaagtaaatggcattctaggcggactacgcccaaaggtttgaatgaaatgacaaagtactcaggtcggatgacaacttctgaaagtacaatttctattttatgcaatttattttgtttaaattaagctaaagatcggatcagatcagtataatagcttttatgtaagttactatagtaataagtgtctttcgaccaataaatgaataaagatgcttatttaaatttaaattgtgtcaattctattagcaagttataaatttaccattaagtgcgtacaaaggtctgctcctacccatagacccaaacagacaaaaagcatacttgtgaaa

SEQ ID NO: 231836 - DNA, 1534 bp, Cannabis indica
tcatcagggtatctattcaatcatcaaagaagaaaaaattaactaaacttggcataataagctttaagatcacaatttgaaaattctaattaaaatcagagtagttacggtatcacagctgcatcagcaatatcaggatgggagtgaagtaaatgttctaattcagctggtggaacctgcaccaaacacatttattacttacattattagactacaaagactaaaatcaaaatcaaatctttattttattttttacattaattaaaatgttattatatttaaaaggttaattaagatttttgtcccttgaattttaatatgtaccaaatcatctttttaaacttttcaggtcgttaaaaatttcccctgaactattgagattgttgaatttaaagacttttgtctaattttattcaattttacttatatgacgattgtctatatactaaatcatgccccttaagatgttacaagagctcaaatcgagagtaacacaaaggattgagctattttggccaaagaaaatttcagaaatagatacacaatggttttatagtttgtgaataatgtaattgtataggaaagaagtaagtgttgagatgaacatatatagatgattatttagaccctaattgggcactattagattgtaaacaagtgttttgtgagccaatacatattctgattcaatatacaaaaaaaaaaaaaaaaattgtgcttcttaaattttcattcacgtcaaactttctttagtaaaattgaataaaaatgcttaaatttaacaatcttaatagttaacgacctgaaaaatttaaaaaacatgatttgatacgtgtcaaaatttaggaggcaaaaatcctaattaaacaatataaaatcaccaacctgataagccttatatttgatgagttcttttaatctgtcgacaatgtaaagatacccttcagaatcaaacatacaaagatcaccagtcttaagccatccttctgagtctaaagtctcagctgttgccttttcattaccaacataacctacatcaatgccaagttattgtttaaaatttctatatctaatttgataacaaaagctacattatgatatataatacgttacctttcataatgaagggacctctaatccaaagctcgcctctttgattaggaggcaatgggttagaagtatgaggatcaacaatcatggcttccatgttctctgctaaacgacccaccgaagcatacctctttgtctcttcatcacctatcattctcgtcactgaccctgcactctccgtcaaaccatacccctgtcataatattaccaaattatcattcaattattccaccaccaattttcagagataattttttacaatagtgttaattatcatttataatagtttagaaaattgataatatatatctatatactccagttaaaatttatgggttaatcctatattttattttcatcaattatatttaaagttagttatattaaaaaaaaattgtttaattatttttcattttagtgatat

SEQ ID NO: 231837 - DNA, 1694 bp, Cannabis indica
gatctttcccttaacagtcaaatctcaggccttttctctattcctagagtttaaaaagcttgttgaaaaacagtttgaactccccataaaaactgtccaattggactggagaggtgagtacatgatttttgctaagtttcttactcaacatggcatctcctttcaacatccttgtccccatgaccatgagcaaaatggtagggtcgagagaaagcatcgacaaatcacagaaactgggctcactttgcttgctgaatctggtcttgacttaacacactggtggctagcttttcaacattttgtatatgtcatcaacaggcttcctacacctgttattgatgatctctcaccatatgaatgtctatttcataaggagcctgactacagctttcttaagcctttcggatgttcttgctatcctcacttaagaccatatcaatctcacaaactcgagattcgatcagaaaggtgtacattcgtgggctattctatgcaacacaaaggatactttgtgcagaagtcaaacagggagaacatatattgctcgcaatgtaatctttaatgagcatgaatttctagaaaaaaatgcatcagcacaccaacaggtacaacaatcaccctccatcttatttcctacaacttcatttgttatcctcctctggaaaatattgtaactaactcaactgttcctgatgatgttgcacctactgttggtgttgttactgcaagaactcccagtactctgcccactgcacctgcaccaactgtaaccattcatgagccaaatgaacccaatgccccagctgcaaccataaatgaacccaatgcgcccaatgcttcagctgccccctccaccaatcctatctcccaggcaccaaattcattctcccacatcaccacacctaccattcttcccactcctacagagttatcagcccctccaccacccacaaattatcacccaatgacaacaagatccaaaaatggaatcactaaaccgaaagcatacctagccaccaattatcctttacctgaatccctcaccataactgaacctaaaacactcaagcaagccttagccgatcctaaatggtttaaagccatgcatgatgaatacatagctctcaagaaaaatggaacatggaccctggttccttatgattcctcaatgacattggttgacaacaaatgggtgcatcgggtaaaactcaattctgatggttcagtcaacaaactcaagtcaagacttgtagcaaagagctatctataaaccccagggattgacttcacagacacattcaatccggttgtcaaaccaccaacaattcgattgcttctcactattgctgtaacaaacaaatggccaatcaaccagctggatgtttcgaaggcttttttaaatggctcactccaagaaaccatgtatatgccccagccccctggttttgttgatgcagagaagcccacttatgtctgcaagcttcataaagcactatatggactaaagcaagcaccacgtgcctggaacgatacactgaaacaaaccttattccaaaaaggttttcctgcttctcgatctgactcatccctatttatccgagactctgcaagtgatttatttgtgcttctggtgtatgttgatgatataatcatcacagggccaaacaccacagttatcaacaatcttataaagg

SEQ ID NO: 231838 - DNA, 545 bp, Cannabis indica
tttgaataaatattaattaattaatcatgtttaatattggactatcacttataattacgtatgtctatacattttgtaaccaattctaaatccattaatttgttgagttattaggttttaataaaatcttaatataaatatatcttcatttgcatcaattattattccctcaaagtaaaattcaacaaataaatcactctcaactcctaataattctcctccaacaccatttcttgatccctagctcttcaccaaaccagctggtacgtattattatatatatacatgcatagacacaattacaaaggatgatcaaaacaattaattaatacatctaaaactgctacatgtgcttctgtgcttttgggtttgtaaattgtttctaatttttctcataatattatgaaattaattaattatatataactactgcatgcatgcatgccttatatctatatttatatgtacatgcaatattatgtatatacatttaataagcacacataattatattcacgtactttattaatatattgggttaattc

SEQ ID NO: 231839 - DNA, 1134 bp, Cannabis indica
gtaggtacatttccccttgcagggtcttagggactggtgtcatgaaagtgtcaagaaggacttggtggaggagttctgttggttctctcggtgttacaaagtcgttcaacacaggtggagggcccattggttggcacccatgagcttgagtccttttgggatcttgcttgaaggtgctttccctctgagtggtctccacacctggtgtttgcttagtgcctacttggttaccaggagtggtagtggaattccaagcattaagggtttccccttaagaactagtctccacgtgaccagttgatcgatggggagtctctctcaccaacttagaaagacccctgcggggagttgttttgtgattagagtattaagcttctctaatatgctaagataggttagctctccactattcctggtcaactcgttgactttcaatgttcctctacttatccatgaaccagtattgaaattgttcgtgttaattatcaatagaatgtcgtagctattattgtaagtcaaccacattttggatgagttgggcgactcgaggattggcctcctcagggccatcagtctctacgtgaggctccctaggtgggatctggtccttggtgccagtctcgggagcattcagtgaccttggaagaaaagctaaggagctagttccaaggcctgctcttggcacctggggcgtaggagtagtctcagttccaactccatcaactggcatgccccagttgattggccagttgttgggattcttctgtcaacacttgtagaacgtgttgcaaccatcttgctggtaactttcttacgttgtgactctcaatgaaagcaccaaaatgttgattcaaaaattttgactagacttttaagccacacctactcgctaggttggctagaatgaaatagttgttaagtaattgtaagagagacataggaaatttaatttatagtagttcattccatgtatcgcgattgtaatggacctacacctacttcgagtttttatttctcatgagatggtattatagaaataggctaagtgtcagaaggtccaatttctagagagagaaactagaaagagaagctttgaccttatgggtagttttgtgaatgtgagaaatgagctca

SEQ ID NO: 231840 - DNA, 936 bp, Cannabis indica
ttattatatatttatgatatatttttaattatatatgatatattattttttttggtacgaattatttatatttatttattattatatattttaattttaatttattattatatatttttatttaatttaagttttgttttaaaagaaaataaataaaatagtccagtccattcttaaaccaaacataggattactttcagcattatccaatcttgtccagtccagtccaatccttttcagtccaatcctacgtaccaaacggttagggtttatagtctttctcaaaccctttctctttctcagggttaccataacttgttctccaagttactcaaatctctctctaaatcggagaagaggaattctgatcagattggtttgataaacaatctttacttcattcgcaggtatgaatctgggtcgctgataatgaggatttgtttcggaacaatggctctttgattcgttgtatcttttcttcatttctgattgttttttgctatatataaattttttttggcttgatttgaggaatctaaggagtggacatgaaacgacgagtctatatttcgttgtaattatatagagatttctttttcccgactcataattatgtggtttctcttattcgatttctgttttcttttatttatttgttgaacagtaatggttagtactggtttctcttattcgatttctgttttcttttatttatttgttgaacagtaatggttagtactggtttctcaattatcccaatgccatgatataatattgcttagttcgtttcagaaatatactttgtatttcgaatggtactgtttatcttcgtctgaatatgatgtattcttaatttcaaaaaagtgtatatgaagatgtgtgtgcgtatgagcatagctttgtataattccatctattttgatttttttttttttt

SEQ ID NO: 231841 - DNA, 1362 bp, Cannabis indica
attgtaataagctcaatgctctaaatggcaaaggctttcaacacctcacctcccttcatcggttagatcttctttatttggaaaatctagagtgcttacctgctacagaattgccccagactcttactactttgtcaatagaaggatgtagtctgttaattcctaggtgcaaggaaggaacaggagaagattggcccaaaattcaacacataccaaacatacgaacccaagaaacagaacgtaagaagagagactttgaagacaggtaactattcatctcgacttgctattttttcaacttcaaatttacttcagcaaatatattttgatctatatattttttccacgtctcatttttattatttcagacatagtactgaaacttgtgtacttgcacttgtagaaataaataactttttttttttagaaaaattattcttttttactgattttctattttcaagaatactaatcaatatatttgcagtcttggatggattatttatggtgtgaggaggaatgatgatgatgattatgattgaatctcaaagatttgaaaagaaaaatgggataattccaactctcaacattggaattataacatataagtgagccttcttactttatttaatttctctctttgctgctattattgttgttatgacttatgattgagattatggccttgtttgatgattttcttatgcttttagctacttagacaacaataatgcagcttaattaattttgtcttttgattgaccaaccatgtttttgactactgaagtctcttactgctcataagaatctatacatgtaagtatttatacatatttttttcccttaggctaaggctacttttgacaatattcaacaacaactatctgaaattttcaatctttttacttgtgaagggttttgtaaaatttttcaactttcatggtagtatatctttcttatggaattgccttgaagccacaacaaacatggtaaagtcatgtttgttaattgttcaggtaatagcaactttcaagaacaataattagctagttttatctttctagtcttttttgtttttgaattggtccaataatatgatatccattttaatttgttactctaatttcaaccagttatggcgagtaatcctagacaaggcaatgagctcacgctttcagttatgtaccgttaagattatgtcaaagatcaagggttcatttggtattcgaaaccaatacagctgaattgagagaatttcgggttttgtatcgagattcgagagtgttggagggctgtacggagaactggtgtgtttgatcctagtctctcatgtgaggtttatgtaatttaatctattttgaa

SEQ ID NO: 231842 - DNA, 868 bp, Cannabis indica
tttctgcccccgtcaacggcgacccactgcccctcctaacttcccgggtgactccacttccagatctccctctcctctgccatcaaccatttaaggtatcacttttggccttttgggtttgaagtttgattctgttgtagatttatttattttttctcatgtaaaatctactttttgatttgtgtatgtcgttgttgggggtggcaatggaagctctcttttattttaaagattttaagacgattacaattcattcatctcttaaacactttgtttttaccgtgtgcgaaaagatattaattatctttatctgttattaattgtttcatgatcatataggaaagccataccaatagcatggtatttttgggcctatcttcctttgaaatgatatttggccaaagactttgcttctgttctttggtccactgctataggaatgtcatactatagcccactgtttagctaagttggcatttactttacaggacactagtatagtggccagggatttcctctgtatctgggcttgatgctattccaatttgtgtattctttaatcttatgagtttaatgaaatcttttcttcaaataaaatattaataaattaaatagaactttactgcaatgtttgcatgggagtgtgataaatcacaattgggtgaatcaccatgtgaatagtttgttgaatgctttgacagttgacacttgacacaatgacatctaggtttggttggcagacaaattaaggacttcaatctacatgtatctatataaattaaaaacgaagtacataataaaagtaatgataaatgtatgaaaggatatgctttgtggtgattctgttcattggtattgctcctctttc

SEQ ID NO: 231843 - DNA, 1706 bp, Cannabis indica
gtaatactattacacaaataggaagggggaatgaaattggcatttgagtgtgttttcgaagattggccttgtctcgaagaaggagtttcactaacattggtgctttcattgagagaatctcagagagagatttcagtgagagattgacactatgactgatgaagagcttgttgaattcgttagatccatgatgagttctatggaactgagtatggagcaacgtttcaaggctcaattaaaggaattagatgccatatttgaacgctactgcccatcgacagaggcactattggattcctcatctcaacccgattctacagaggtcgataaccacattgatgcccctgttgaatcagtgagaagcgagatggatttggatgatcctgaggaagctttagacattgctgtcgatatggatctcatccgagatggcagcaaagcacaaccaaagttgaatcgcagttcgccggaggtagaggaaaagctctctgctgctcgaatggagattggggattcaagaatctcgctaactcttgattgggcaatctgatcatcttgcgtacacatagaagaaggtgatgatagcggagtgtttgcggatcgtaaaatggagctacgtgagattgtgtttggtgttaatggtgattcaccaacgccgctgaaagatcggaggatgatctttgatcggggaggtcaatggatcttggatcgaagacgacgaacgaactttgacgaagatgaacggtcactggcggacgacgagaagctttgtcacgtcggatcgcagagaaccatcggagcaaagggcattgacttggccttcaatattactgtgagtgcagatgaagctccaattgagagagaatacaatacatggaggtcacacactcaacatgggcaaagggtggagtcggttgctgcaaagattgaagatgataccagtggctaccctaaagttgtctattagaggaatgggccaacaaataattgggctttcttttaaaaaagcaaaatgattgggctgcaattttagttttcttatatttgtacttgttcttagtttcatttcttttatttttaccaccttgaggacaaggtgattttgaagggttagggagtgttacatgaaaagttatagggactaattagcaattgttattattgcctagttagtataaataagtaatactattacacaaatagaaagggggaatgaaattggcatttgagtgtactttgggagattggccttgtcttgaagaaggcatttcactaatataaggtttcaagaatcacctatatgtttgtctcatttatttggattttgatttacacatataacacaattaagtcgttcacttcccaacattttaatcggaagataaaatatgaagaaaatatataataaaatatatttaagtaatattaattctcacgttatagaaaataatcttattagtttattagtttattatggtttcatttattagttttgagttagtgagattatttgtaataaaggataatctttaatcttcaaaatcatattgatatgataagaactttatttatattggctttgaccaatatgaaataacattgaagtcagtggcggaaccagacaaagacccgaggaggggccaaataggaaggtcaagcgaattgtatttctacctttttttttttagaaaataataataaaatta

SEQ ID NO: 231844 - DNA, 854 bp, Cannabis indica
gcttttaacttttcattatttaagaaattctcatgtatggaataattttaaagatgatgttatgagaatagcagaataaaggttacctgctccataatgtgtatatatatcaagcaacaaggatcaatcaaatgaataaaaaaataaaaaagcaatattggtactctaatcacttttatatttttctaaaatatgtaatcttaaataatgaacatcagttatttttaatttttttagatcatgtctatgagatattttccttataaataatgcaaacattcaccaaatttgcatacatttgtggttagaaatagttttaacactacttatgaaaattgtatacaagtctaaatgaatatatgtatgtgccgcgagatttcaaaataacaaaattacaccaaaagaataatgaataaaacaactaactattatagaagcatatatctcgtaatcttattagagttttaccttttctattacagcttaccaaatgaatttgttaaccgagcaatcaatatctatgctaaaatatcagtacgtacctaacctaatagctaccccaaactctcgagtgtaaatataatcaaagcttcccaaatgaatttaattattagccatacaatcaatacctatgccaataatctcatatgtaatactcagtgagagaaagaaattgtatcataatgaaattaaaataaaacatacctgttagtatttgctcaactacaatattgatcatcaattttctctgtaattgaatgtaagtgggtagtgaaagtgtataggtgagacagagtagtgaaagtatataagtgagaaagagtggtaacttccatttttcattaggcgctatt

SEQ ID NO: 231845 - DNA, 622 bp, Cannabis indica
tgggccggcccaccaaggagactcttcattttagaaggcctgagacatctaatttaattgtgaagacatttgtagagcccgtgagtgctcttagtgctcttggtgtgggccctaataataatattttaattgatggtaagctcgtgagtgctcttggtgtgagcccgtgtgatgcatatagtgaaagtggaccttgtgatgttaatggacagacctctatagtgaaagtgggttttaagacctccgcaattgtatatctgcaagttgacatgccagtttcccttaaacagtcttctagactgacggcttggaaggccaaggcccgtatggcggatctcttaattccgccaccgaatttgtttcaaattgatgatgtgggctcggcggtcggtgctaatgaggtgattttgacccctgtggaggaggacgttgttcctcctccgcaggagccatgagaggtgtggcttggaactgtagagggttagggcagacctctacagttctggaattaaaagccctcattcggtcgtgcgatcttgatttcatcttcattaccgaactaaaagtggaagctacaagtttggtacgtactcttaaatatctccatttttatcataatatt

SEQ ID NO: 231846 - DNA, 1923 bp, Cannabis indica
gatagatgttaccaggttctgggcgaggaagagatccattgataaatgcgatcttgttcatggcagtgagcgccatggcgattcctcgtttccagggttggtaattggtgtcgttgaggacagtggagacaagcaccaggccgggatgatcgccgttgctgaggtagaaagggttggagtgatcatcagcgaccgatcgagaagtaagggcttggttagtgttgtcgtcaacaatggtggaacgagcttggggaaatgggtttgtagtctgagatggaaccctaatttgtggattacgggtggaatttgcttgaggatttggagctggtataggatcggaagtgacctctgcagcttggttgtcgatcgacgatggaggagcgccatcttgggatctagttgaaggcctggccattgaagcggtgggcagtatgtcgtctgataccatatgagaagaaacaaagaaagaacagagaaaaccagagcaattgtattattacagttctatatctggtttactacagagagatgagcttaaatagctctgttcatacaaaggaaatcagttggagaattaaccaactattaacagaattattagctacacaatcaagattagcaacccaaaactaatcctaactaacttagtccacgtggtctaaaattttatcgtctggttccgccatcgataacaagtctcagaagagtatttgaaaactctgtaataaggtatgatgattttttttttttctgaatatacataatttacaaattacaatgatgtataaaaatatatgtataataaggcatgatgtaataaggtatgatgattcttttctgaatatatatatatatacaaaaattacaatacgtgctaaaatatatgtataataaaatttagtcaccagtattcatcattctgttttgtcgtaatgcatgctcaggtgaaaaaaattgttaattaattagctagctggttcaaatgattattattacaagaataaaaacatgtacaagggtattttatcaattattgcttcattatttattttctacattttgccgatgatagtaagtagtagagcagaaattgttgttgtctaatttattagacacttgttttaattatatcagccagaagtgcataatttattttattaattaatagcaaaataatcatataaatataggggttgcaataagtagttgtaatgaaaaagaaaaggaaaaaaatgcatatgtgtattattatcttttgggaatcaatgattggagagtgaagaatgaagaagaatcaattgggttttcttttcaaaagaagaaattattacctcaaattaaaaagaatccaaaaaggtacataagtacgtgaaacatgagctcaccacacaatatcccattcaatgaaaggaaaaaaaaataagcatgcatgtttaaaatggagcttaattatatataaatggtttgagagttgaaaaagagtacttagttgctacaagatattttagagtgaccaacgctactataggtagcatgttatgtgtaaattaatttagggtattcatcactatttatttgattataatatataggttataatgaagatatatatactacaaagtgtataacaatatttgtaattaaataacatgctatgtctgcaattattattccgccaatactaatcagtgtgtttggttttaaaaattcaattacatatcatagattcagatactttaaatggcttataacattaattcaataaggaaaactattttttttttttctgaaaaaaaaatcacgtggtgtatattttatccccactttttcggtcgcaattttagaaatcacgtgctagcaataaaggtcttataaggattggccctaggttaaaacgggctaggttcgtccctaagatccact

SEQ ID NO: 231847 - DNA, 934 bp, Cannabis indica
gtagtttcttgctgaattatttgaaattaaatgttgaattcttgctgatattattagggtaaaagcatgttctttgagttttgaatgttcttgttgcatgatgagtgaattgatgttaatcccttggaaattgagcttctatttattgtatgctttgttgttgagcttgggcagagattgtatggtatttctaggttggaatttcatgtttaaagtgatgttttcatggctggaatttatttgagctgttagagatgaagctcttgttcaagagcttaaagggccatggttatgcatgatctttgtgtcgtttgagcagtttaaagttttaagtttatggcttgaattaatgtttggagcatgaatttaaattccttgttgattgctagcaactatattggttaatttgtgggtttggttgagaaattgaagtgatttggttgggtttggtagctgaaaatcgtattgaagctgctggttttctggattctgcacccagatgccgagcacgcagcggcccgctcctctgagtggacctgggaatttttcccaggtgccgcggcatggtgcggcccgccctcgtgtttttgggcagttttgagttgatttttgaaagttcgtaacttttgatttcgaactccgatttgggagttctttatatcgttggaaagctcgttccgagctctgtatgtgttacgaaaattatgaacactacgcaagtttatgcagtcaagtagtaagctcacgcaagtgaggtcgaaccacagggaattggattaattactactaaattatacttatgattctatctggctaatcaatactttttatgaattcaataaaataattcagaaacttaaaatcacaaaagaatattaatcaagatgagaaaatagggagaagaatcctgttgtcagtttaccaatcgttaatg

SEQ ID NO: 231848 - DNA, 788 bp, Cannabis indica
gaaaagaaaaataaaatataagagtatacagattcgaaaaaaaaaattacctatctccggcatatggtggtgttcgccttagtaaaatggtggcggtggaagaggaagaagcagtaagtgttggaaacatttaaaaatgaaaaaaattggaaaaataaaaaaaaaaaataatggaaatcggttcgtggggatatatatagaaatttattaccagcagaaacccatcaataatactgggtcctgccagtgttaatattattggcaacggatatatatatccacgttggtaatgatccgtctctaattcattttaaatgcaccaagcaggaaaattctcacacttattatctgcccaacaatagtggttggcagtccgccggtattaacttttgcccgctgatattacatttattatttgtttatttattaatttttacacactaataccagcggctccaaaatccgccggtgatatccctattaataggggcagatttggcccaccgatattgggtccgcccctaattaacaaaattgttatagtgctaaagaatgtttatttttttctttccatgtttatgatatagatttaaaaaactaataataatgaaggacttaaacaatatgatttccttctctgtttcggagagattaaaagacaataatctaataaatttttacaaatttcactataaatttttttacttttagtcataacaaaatttgtgactaaaagtaaaaaagttgtgactaattataaatcatcatacctatgttgtgattaaaaa

SEQ ID NO: 231849 - DNA, 532 bp, Cannabis indica
tgttcttggaggaagacgcaaagcatgtgaggtatcctcatgtcgacccactagtgattacaatctagctcgccaacaaaaggacaaaaagggtgttggtggataacggaagttcagtaaatatcctttataaggatacactgaagaaaatgggactagaaagagcaaagttaaaaccttgcatggtaaacatatgcggatttataggcgacagtgtcgccagtcaaggaataattgaactcccattaactgtgggtgagatgcctttatccactaccataatgcaagactttctagttgtcgatctatcatcggcctacaacatactgctgggtcgaccagcgctaattgggctaggggtagttagttcaattaagcacctatccctgaaatttcagacaccgataggtgtaggagtggcgcgaggtgaccgacttctggctcgtgaatgctaccgcatagagctacagaatagaaaagctggtcatcaactaatggctgttttgactgaagaaggcgagaagcaggatga

SEQ ID NO: 231850 - DNA, 1941 bp, Cannabis indica
ttcataagtcacatcttcctgaagagggatagcctcatactcaatgacatgtgacggatctggagtatacttcctcaacataggcacatagaacacattatgaacatgtcccaactgtcatggtaagtttaatcggtaaatgatctccccaatcctctcgatgacctcaaaaggtccaaaataccttggggctagcttacccttcacctcaaatctcgttacgccacgcataggagtaactttcaagaagacataatcaacaacatcaaactcaactttccatcgatggagatcgacatagctgttctgacgactctggacaaccttaagtctttcttggattctcttaatcttttcagtggtactagtgataatctggggtccaatagtgacatgctcatctgaatctgcccaacacaatggtgatctgcatggtctcccatataaggcctcataaggagccatgcctatattggcttggtagctattgttgtatgtgaattccactagtgacaagtgttctccccaactacctccaaaaatcaaaacataagagcgaagcatgtcttctaaagtctatatagtcctctcagactgtccatctatctgtggatgatggccagtaatcaagtgaagttcagttcctaaggcttgttgcaaggccttccaaaaccttgatgtaaattgaggatctctatcaaaaacaatgctcgaagggactccatgtagtcgaactatgttgtctacataaagtcaagctagcatggtaagcttgtaatcctttctgattggaataaaatgggcagacttagtcaaacgatcaataatcacccacaaaacatctttcaaaggtgtcaatagaaatccaataataaagtccattgtaatcttgtcccacttccattctaggtataggcaaaggttgaagtaaacttgaaggtctctaatgctcagccttaacttgctgacaaactatagctacaaagctagccacatctcttttcataccttcccaccaatattgtctcttcaaatcttggtacatctttgtacttccacgatgtatagcaaacttgaatctatgggcctcagtcaaaatggactccttaagatcagggatatctgtaacaactagtcttcccatatggtataggtacccttccccattaactgtccacccatctagttgctcaccatcctggattcggttccaaataagtcttaacttttcatcttaccactaacgttgcttaacttgttgaagtagcattggtgtagccactatattagagatacaagctacatcttcccattcatagtattgcaagatataatcacccattgtgattgtcttattccagtcctcaagagccaaacatgccaaagtaccatgaggtttttctacttagtgtgttagctactacattagctttcctggggtggtactgcaaagtgaaatcatagtcctccatatactcaacccatcttttatgcctcaagttcaagtacctttgagtaaaaagatactttaagttcttatgatccgagtataactcaaactttacaccatacaaataacatctctaaattttcaagataaagattaccgcgacaagttctaggtcatgcgtagggtaattcttctcacgtggtttcaattgtcgagaagcataggcaactaccttaccatttttgcatgaggacacctcctaagccagtacctgaagcattagtgaataccacatatggttcctcactattaggaacagtgagaacaggcgccgaaattaatttttccttcaattctctgaaagctccctcacaactatcatcccacacaaactttacttcctttcttgtcaactttttcaaaggcatagcaatccgagagaattttttgacaaagcaacaatagtagcctgctaagccaagaaaacttcg

SEQ ID NO: 231851 - DNA, 809 bp, Cannabis indica
atgggactcaataagaaaccagcaattccggcttaagtgtctttattttggtttttgcaacatttcttgggttttagataaacattgtggaagcaatttacacattttgaataaccgtatatgaagaaaaaaaaaaaaatcaaacagtatttggggtgggtgtgtatgactgaactaatgtatattaaatacgcttatatcaaaaattgaaagaaaaaaaaaaaagctggagtgcaccaaaaaactctcttttttcacactatttattgaaagaggtagcttaaaaaattgacgcgacaattggttggagagacattaattgttgggctcgtgcctggtggttgttatggaaatattactagatcagatctctgacgggcataacaaagtaagacacaggatagggtgaagaaaaatgggtcagtactctccactgactgtgacacgcacacgaaaacagttaagaaacaagtaaagggtgtatctctgttttaaggtttatatataaactattctaacattccgtttcaacaaaaaaaaaaaactattctaacattaactatattttagatgtatatatcctactgtaaagcaagctagatatattgattatagggaaatttgaatttatatccatcttttatacctaaattaattttttaaactaataattataattattgaaaaaatataatcacttttcccgaaaccctaaaatacccctctctttatttttaaccatctctctcttcctcctttctctctcaaagcaaacccaaaaccaaactaagaaagcaccacccaaatcc

SEQ ID NO: 231852 - DNA, 1124 bp, Cannabis indica
ccacaagttcaagactgatgtattcacgaaccatatttatacttgtgcctacacgtattcaaaaacagagtttcatagagaatttgagaagattcaggcaatgaatgttgcagttgcattatatcatgaggaaattagatttgagaaaagggttcagttgtactttttaggggaatgttacaatgtaatgatgagtaattgggctggaagcttcaacaacacaactaaggactcaagaggatttcgaccacttcttctgttgaatttttgaggtttaaagtctagtagtggtttgctacgtgaaaagaaaaagttgataagtggacgaagaccctagcaccagaaatggaggatgacttgacattgtagtttgagaaatctcggtattcaaatgttgacacatgtggaccttacacgttgaatgttcaccctggaagatcagttgagaccggtgtcgtagtgcatttgcaagaacaaacttgcacttgcagcttgttctaaatcatgaagtttccttgtcctcgtacatatgctgcaactcagcaataaaatattatcatgtacgcactatgctcgccatattacaccacgtaatattggaagagcacatatgaaggcataattatgccagtttatgaagagaatgattgggaattgtctgatgacataaagtatatgatagttggagtgcctgttgagaagaaaccagtagggcaacccaagaagcaaaaggttagaagaattaagtcaaactgaattacttataatggtgaaaggattgtgataaaatgaacctgtagcaagtatggtggtaaggggcacaacagaatgtttgcacctacagaagttaaaaattcttgttgaatttttgtaatcgtattgttatgtattgtactattacgtatttttgttgaattcttgttggactttcttgaataatataatttgtggcatgagcatgttttcatttacttactgcaacatttcctatgaaataattcctagtctgatgcaggttcgatgccatttttggctttccaaccttatattctgtaagcccaagttcttgtctaacctatctttttcatatttagattgattttatcttgatttaagcttgaata

SEQ ID NO: 231853 - DNA, 1308 bp, Cannabis indica
cttctagggcgttaagttaaatcccacacactcctaattacttcaatacctatattatcaacttatcacaatattctccccaattatatcaattaaactcgttatgatatttttggcccctgatcgagtttccaaggtcgccaaaccagaaatttttttttattccacatatagctcacattacattcacacatgctacataaatctctgtaatttatacgcttatttactcacttatagcaaatttaaaatttatgttgaactagactagtatgatcataatcccacttattaatctaattaactgataagataaatataaatcctaattatttaccattaggcttatcgggatgttacaaccatcccctccttataagaattttgtccttgaaatttacctggataatttagggatatagctcctgcatctgcgactctaattcccaagtcacttcctcataaaataagttgtctgaagttcaatatcatcgtaactcaaattacgtgtcatatctgacacatacatcctcaacatagagatgtggaagacataatgaaccctggacaatgcgggtggtaaagccaatcattaggccacttggcttatccgctccaatatctaaaaaagattgatgaatctagagcttaatctttcatattttttttcaaatctacgcatccctttcataggtgacagtcaaacagatactgagtctcccacttgaaatttaatatccttacgctttaattcagtgaagccttttttgttacccaatgaggcgagtatatatcattcatcatgtccttttatcacctgtgttactccaatgaacaggtgtccaacatctttctcataccatacttattaaagtacctaaccaataatacatataatcatcacttttaggcaaacacttcgtcggtggaaaatattattctaagataatcttacctttatcaattctaatcacaacatatttctaatattctattaatcctcatttattgtataaattatctacactggtagatagcatattaactcggtatgtccaaccattactactcagtcgaaaccataagatcccacaatacatagttcataattgggtctttctattcctcctgtgggacctcctaaaccggtctactgatttcacttattaacaagttaagtattcgtttttgaaagatagtcaattagagcacttcttaattctacttattaacatatgcttatctcgataccttgtaaatatttacttattaacacatcctttcctctttgtaatctcaggaacgatt

SEQ ID NO: 231854 - DNA, 1144 bp, Cannabis indica
atataaaaattaataagagtcccataaactctaattagatttactattggtttattgatctcatttagttagatcactttatacaaatttagaatattagctcaaattaatttttttttttaatttataaacccatgtatttttttttttttacaaataaaaactcatgtattagattaggctcattaggattttttcccctgaactttgacatgtactaaatcatgctccttaaacttttaaggttgttaaaaattgaatgaaattaaacaaaagtacaataatgttattagattcataccaaccaacgagtagaacaatataacagaaaaattaactacaaatattttttgaattaattatgtgggaattggccctaggggcatttgggttttttgacctttattttctatatttgataaagatgacttttttggtaaaatgaaagaatttctggtttattctctccctctcacctgatctctatctctctctctctctctctctcacttaaaccctcttgatcttcaaacttgatttgggaagaaaagcttgattcttgacttgtttggagctttgttcttgtcgaatcttgagctttctcttggattgagtttgaggtaattttctttgggttttgatctttgtttattactgaaactaattatagaaaagcatgaataggtgttgttgatcttgagttgcatgaaaaaggagtttgatgttgatcttcttggatttgggtattgattccataactttgtgatgaatttttatggttgagctatggatgttattttagggagattattctgttagaatctaacttgatttggtattttgctactggaattggttgagtatattggcttgaagctcaagctcttgagcttgatatttattgtgagtttaagcatgttttgagttgtgtatgcactctgaaattaggggttttcatattgagaattttatgcatgagttgtgtattttgaccctctattatgtgttagcaactctacatgttaatttgtaagtttgcttgagattttgggatgaaaagattggagtttttgcttaattttcgtggttgagttgctcgttttttgggttttcaacccaggtgccgcggcatgggttgagcatg

SEQ ID NO: 231855 - DNA, 1410 bp, Cannabis indica
taaaaacctcatttatttggcttgatttgtaatcaaatcccatgattttagggataatagccataaatgtattttggtcagctttgtaattaactgccactatgcaattataaatagtggcagataagatcaaaaaggcggggacaaaaaaaagaaaaataggctcagaaatctaaataagattgactcgtggactatgtagaattttaactgcaaaactacgtaaaaattcggtgttcattttttttctatagtttttctgtgttgaatcatattcgtgaggctcaaatttggttaacaaaaatctgtgttaatagtttggtgctttcattgagagcctctgtgaaaaagctcagaaaaaaacctcctcacataaaagtgatggatgacaccactggtaatagtcctcaagaaggaatcaatcatcgtcccggaaaagaaccattaagtccttagggatctgctgaatcatcgcacgaacagaatgcaagccccaggaagacccagtattagggctcctcgctcgacggaccttggaagagcaacaatcggccactccctaatcagcgcttacgacccaaccaaatacataccgatcctggaattagaaaatcgccatcttaggcatcgattggaggaagcaaaccggcgtaaagccgagttcgagcgtgaaatagctgtcgtaaatgcaacgctgggagactgtacccaaaaacaacctgaccttgagaaaagagatttacgaggcaaacctcgtggctcacaagtcaagaggcaggagatgacccagggatatgctcaaagctctcaggggatgcaacctgaggaaactgagggaagactaggggtacagcctgggatacgtggaacatcggacaaaaattgccaacccactattcagtctcataagaatgaaactcttccaaacccttgtaggaagaaaaaagtgagtcaaaccttgagagaaagggcagggtccggccacaatcataaggagaggatctagagagcatacgaacctagaaaagcctgacctccgtcagcgactcgattcaagacaaaagaattcattccatttgcgaatgagcgagttggagaatgtccagagtacatcaaatcacaaaacccaggagaaaactggggcacgatgttgttggaaaacttgattcggaagcctcaggatcaatgaaaaaagatgattccaaagggctgcttaatgacaagaaatccaacatgtatatccctctttataccgaatacaccgagctcaatgaaactcaggaaaagatctacctcgcacacgtacaagaagtcatttttggtgagccaagacctatgaaacatgcgaggcgcaagagggatccaagtaagcagtgtgaataccatggtgatattggtcataccacagaa

SEQ ID NO: 231856 - DNA, 1677 bp, Cannabis indica
ttttttctactcttttattataaccatttagtcaactttaatgtccgaaaataaatgttggattatttttttaattttttttcaagacggtgtttgtttactataaaaattttatttttagtcacagcaaatttgttacttaaagtaaatatattttgactaatcatgatttgtttctatattatgactaaaatgttcgtggttaaatttattagtcataaagattatagtttatcgtgattaaatgtgtgtttagtgacaatatttgttgcgattaaaattaagttagtgacaacttatatctaaatactatattttaactataagtaaatttttgttgtgactaaaaattatatttaattttaattacaaaattaatgttataattaaaagattgtcatgaaagaaaattttttttagcgaagattcttgattagttgagttagtataatttattattcattttattttgtatatgacatgttcttttgtaaaaatgtgtatgcaacaaaaacactctaatagtataatatataagaaagtttttgaaagcaaattgttaacatctaagtgtatggtatcaacaaaatcaatataagtttgatacataaaaccaacacaacacattaaaatactttaaataacattaataatattcctttttctcaatattatcaccaccaaatttcatcatcctatttaaaataaatgttaccccaaagtcaaagttgtcatcaaattattgtctttggaaaaaacaaaagaatgggactccctcaccacatatggggtttcaagatttttttcattaatctaaaaattattgtaatttttcttgtttcatcatcttcttcttcattgcacccgttgattgcaaaatcaaaagaagaacaccgtaatttcactgccatatcgaattttcgaattgtaaatcgaagatttctgagtgattgtccagatttaagcccttaccaaaaaattaatgtgagttcatcaaatgttaagcttggagacgaagaatatgttagtgtgactattagtggtgttatggttccttctcaaaatgattgggtgggcatgatatccccttctcatgttgagtaagatatattaattaataataataataatatacaatatatgtaatattctaaatttattagctaccaaggatacttttagttggaaaaaataaaaaataaattaataaaaatagaagaatatgcataaataagttattatttttttcttcttgcattagaatgctccacaaaatttaaccctagaaatataaaaatgctttatttaatataaaattaattaattgtttaatgataaattaattgcagtgtgaatgcatgtcctacaagtataaaatattatgtacagactggtgacatttttactgaccttccccttctttgccattatcctgtcaaggtaattattattattaatataaactctcaacattttttaaaaacttactcttgtatgcaaatatttatatccatgttatatcatgtttcataactattattaaaaaaaacattattaatcatttaagaaacatcatctagtaatgttattaggtatcattatcaacaagaaatttacatgcacttaaattttattcttttaaaaaaatatttttacaattctttattttttttttta

SEQ ID NO: 231857 - DNA, 1568 bp, Cannabis indica
gctgtaataaattaaccttgcttggtcttcaggtatgcatgttggagaaaagagaagacttactgtacccccaccaatggggtatgtcttgtttttatttgcttttaacttagttctttttatgctgtgatgttttactctttggggtgcaacttttaattgttagtttccatggatttgcagttatgggagcgaaggagatggtaaaaatataccaccaaactcatggctggtttacgaagttacattggtcaaagttcattgattaaatcacctattaatggcttcaagaacagactattaaagtgagtgattggatgataatttttttgcaatgcctgagggacaatccccaaattttgttatagatatatgcctttttttttttgtaaatttgtttcacatgtatttcactttgttttttccaattcaaaaaaaaaaagttcaaatatgtagtattataggaaaaaaaaaattgtaaagtggtactttgtagtgatgacaattgacaacaaacatatataaacgataacagaaaagaaaactaaggtgcaaaaatgaaaagacgactggagctcagatgatgatataaggccgcagtaatatccattattgacagttttttttttaattgcatttaaacactctcaaatatcatttattttttgcagtcagtaaattttaatgcagttagtaaatttaatgtgttattttttttcagttaattattaatataaactgttaatatatatttttacatatatatatcacatttatattagtacaagtgaattattatttttaaaatataaaaattagtttaaaatttataatattttttttatttaattttaaaataaattttggaaataatttttaaataataatattaggtttacgtgtacaaaaatatatatataagtaatttatagtgatggggtgctgataggaaggaattgatcagcgatttaggatgccttcaatgtctgcaactcccagccacaacgatggattcatagatgaaatgggaaggcatggaatggaagagctcaatggcacgatggttaaccacttctcttctgtttcttgtaattatgtcttcactgatgcatcttgggtgaaggatactgctggtgtagctgctatttctgtggatatgtcatcaggacgctggttcgtttacgtgcaaaagatacgggcggagtcggctctggaagctgaatttttagcgataattcttgctctgaacagggcacgtgatgcagggtggaaggaagtgtgtgttatgtcggattcgaaaattgcagttcaggctttgacaaccaattctcttcctgactgaaaagtagctagtgtgttttatttatctttaaacttggcaaaaaagtttcggttatgttgtttttcatttattaagcgtagttgtaatgctttggctgatagtgtagctaagaatgctaggatttctagcgatttggtaattttgtatcaaggggagggcaatcccccggtgattcccattaattttcttaattaatgaactcatggttctttaaaaaaaaaaaaaa

SEQ ID NO: 231858 - DNA, 999 bp, Cannabis indica
ccaacataagagtttatccattgaagagagagggatcttccccccctccggtattgccctcttcttcttcatttacaatctccatttctgcttcttcttgctgttccaggtcagaatttaaagcttgaaaagtgttttccatccttaaaaccgctgacttagtgggctgcactttcccctttgaacctcttgaaacttgaagaaatccatcctcatctaatactggttttggcctatgatcttccttcagtatccacttcttttccactttagcactcttcttacaatcaatagtcgaatgccccaagccaaagcaattattacaagcaattggcttccattcatacttgatgcctacatgagtgttgttgccatactcattctcaaactctaacatatcaggaaaattttggtctatcctaacttcaataagaattctaggatagttcaacctttccctctctcttgtaacactatccaccataatcggctcacctacttgaccaactattttgaacaacgatctttgtccccaatatttcagatccaggtcttcaatctgaacccatataggaacctttttaacatcttctttcttgaaattcacattgggatcccatgccttcatgatgacaggtcttcgattgaaaaagatatatccaccctccaagatcagatctctttctgtcatagagtggaacctgatgataaaaactccctgtgataacaacttcaccctatctatcttatctttccaaactcttttaacaaatccctccagtacatgtaattgttttcattttattattacgatttttaaaataaaatttatttaccacttacatatttaatttgccacttggataatacattttcattttatttttcactttttaaatatttaaataaaaaaattaaataattaagtgtaataattttaaattaaaattataagtataataaaattttaattatgaaattatatgtgtataattttaa

SEQ ID NO: 231859 - DNA, 706 bp, Cannabis indica
cattcgagtcattctctccctcgttgccaccaataattgggatatccaacaagttgatattgacaatgctttcctcaatggtgttctcactgaagatgtatatatggaacaaccatttggttatgtcagccccacacaaccatcttatgtgtgcaagttacaaaaagctatttatggcctccgtcaagcccctcgggcttggtttgatcgacttaaaaatgtgctcttttctcttggtttttgcaattctgtctccgactcctcattgttctactacaaaaattctggtgctgagctatatcttcttgtctatgtcgacgatatattattaactgggaacaacactcacaaggtcaaaacaaagattacccaactccaatagtttttctcactcaaaactcttggctctgtcaattattttcttggtttcgaaatcactagaggggcgtatggtattcatctgtcacaaggaaaatacactactgatttactcaacaaaacacacatgctgctctctcatgagagtccaactcccatctcagtaagtgacaaactcagtgccacagacagcaagctattcgaacagcccacattctttagaagtgtcttggggggactacaatatttgacactcagccggcctgacatcgccttcaccgtcaataaattgagtcaattcatgcataactctacacaacatcactgg

SEQ ID NO: 231860 - DNA, 1354 bp, Cannabis indica
tattgtctaaacttttgggggcagttttaccccatgtggcttgcgataagatttctacagctcatggtttggcaaaacatgcgcttcggttagacgataagctatcctggttcgatgaggttccaccgccgattgtagtttgctgcatttttaatcatatgtgactcagttcaccacgtaaaaaaaaatgatgcatttcattaggcatctgccaaagaaaagctaaagagtttcattgagaattttgaaaatcattataaaatataatatagttaaaaaataaatcataaacaaagaatgtgacaaaaaaatttacctagttaagaattaacaagttctagtccagaagtcaatattattgtgagattggaaaaaattatttgatttacacaagtattttatcgagtatttgaacactagaaattacctaagtactcaaggaatgtgattcaaacccctttcatgaatgagttttcttatatttgtagagttagggttcttgtttgtaaaccttacccattgatgaggtatatatagataacatattgacttttgatccatgtggtgaagccggcccatgagacattgatcttcttctaacgtggatgtctcatcatgttaatagttatcaaaaacatgtcctacctttgtacataataaagatacataaatagttgattgacaattaatttgtttccatattctgaagatatgattcccaaatattatcctgggaataaagtcatgatattgcgggatttactaataaattgttgtgatacggagaaggatatctggatgcccattaattacccatctagaagctcgtctcgatgtttattcggagacatgttgtgcaaaaggtttatctcgtccagaagagtgacttgtccatcatctaaatggctttacttcgttaatagatccaatcaattatcttgattgggcctacggttgggcctgttgtagctaaattagaccatcttgaaattgcatgtggcctttaattagaaacacatacaatattactcccaaagcttttggaactcaaggggttttggaggcttgtatttttcctttcaactggcctgaggataggtgaatgcttaaattccaagtagacaatttctttttgacaacttctctctttatgaaatgaagcaacacatgacattatttctttggcttggggagattaatttaattaatagaacacatgcaccatggatttgcaaaatgatgcctaatcacagcaatgactgtctgagagagaatatcaccaagaaatgcataaaatacaaatctgacacctttttcagaccgttggacgcattctatgttgtcatagatataa

SEQ ID NO: 231861 - DNA, 2373 bp, Cannabis indica
tgaactaaggttaaaaaagtaatgtaatatgtaaagcctaaaaattattgacatttttatatagttatggttcgtttggtacgccgaataagggtcgtattgtattaaataataaattacactatgtttggattaaacaatgtattacaatatttacaaaggatttggggtcaacaccaatctctgatctggactcggactccggacccgaacccggactcggacctgaacccgtagtttgtgttggaatcgagtgtattaaaaatatattataactttacataatcaattaatacaagtcaataccaaatattgtcttatattaaatagtactaatataatacaatacattacaatacagcgtactaaacgaatccttatagatttatttagcaaaaaaaagacgtatttaaaatgaatagagaatagttttttttaatagaaattggttaattactggctaagggcatttgtatatatagatattgtttttatgttttatttataactagtaatgtgaccgtgctttcattatattattatttaaaaataaaataaaaataattaaattagtaatttttaatgcgacccatactcgacataaaaattaacaataatgcaataaaaagaaaacaaattaactctacttgctgatttgctagaaatttgtttttttaacgaacaacaatctcaaagttacccacaccgcattaacatccgataacatctaaataagatgtaaaaataatatggcaatgttagaaaataaagattaatttaaaataaaaacttcaaatatgaataaagattaataatcgaataaatatttcattaattaaatttggagttatggattgtaagccattaaatagaatattaactatttcttcttctagtctcttcactgaagttataggcaaaataacattttatattcattaaaagtagtttatattcacatgtggttgcaacaatttttaaattttgtactctacaaagaaccgttacttaattagttcttcaacttataaattaaagttttctttatcgagcattaaatttcatgtaaaataaattatatgtcacattcagtataatatgattgtcaaataaaaaataaggaaataataatataaaaaaattattatataattcattaagtgtaaaataactgacaaaaaattaaaaggaccaacaattttcttacaacctttttttttttgagggaaaatacttagttattattaaacaatcaagaatcgtttacaataaccgagtaaataggcggaggaataaactccaaccaagtacaagcctcatccagccctaatgcaaatttagctagtccatgtgctgcattgttagcagtacgtagacatgagaaacacttacattcaggaaaaaggataaaagactatgaacatcactaattaaatctgagaattctgaatttgaattgaagggagctttcaaagcattgaccaccataagagcatctgtctcaatatgtgtaattggtaattgttgttgtagagcccaattgagactatgaaaaagagctttggcttccatctcatgggatttaaaatttccaattatcggcatagcaagagcaccagtgacagaacctgaagcatcacgaagaactgcaccaacaccaatggtatttgaggagttctcggctgctgcatctgtgttgagcttgtagcaatcagcagcaggtggacgccaagataataaggcagcagtagcagcaggaggcttggaaggctgctgtgaaggacctgcaacatcagtagcagcaggtgcggttgctgcaacaactggtttgtgttgagccgcacggaaattctgcagaaaaactgttgcaaacacatccaaatcattcgcacgtctcgcattcttaccatgaaccactttgtttctctcaccccagattgcccatgatacaaaataattcttccatttcagctttgttgtaaattgaggaaagatacatcaagtaatccccatttttcattgaaatagccgctgaccaattaaaattgaaatggaaggatcgccaaacagccttagcatatttgcaaccgaaaagagcatgtcccgtggattcccatgcttgtttgcagatggaacaagtggaatcagtgatgatttttcgtcgaacgagcgatgtagcaacaggtaaagcatcatgaatgacacgccaagcaaagatcttaaccttttgagggatttggagtgaccagaaatgtttccaccactatacagccgaagtggagctggagctttggtcttcgttttccaacgaagtagcaaggtgataagcactttggactgtaaagtttcccgaggagtgatgatgccaaatca

SEQ ID NO: 231862 - DNA, 1151 bp, Cannabis indica
tctcaaaaacatcactaggtctatcaagttgattaagaactctcgatgacacataagattgagtggcacccgaatcaaataaaatagtataaaaaaaactgttgataagaagctgacctgtaaccactgaagggctggcgacagcatcagcctgagtgataacaaatacacaagcaggtgtaggtttggctttaggcttaggttcctctttcttcaactggggacaatctttcttgaggtgccccactgatccacactgaaagcaagctctccagttacaagtcccgggatgatgtttcttgcagtgtgggcactcaggataggaataagtctgacgtccccccttaccctggtttcctcgaaaccttttaattttccctgaactccccgaagatgggaaagttctcttcttttattcaaaagtggaatcaccactctcttttccagggccagaaatagggagagtagtggtcccaccaacaccaatagtctctcgagtttcttgtaagaacttgactgcccctttagctcgaagagctttgtcaaccatttcagcataagttgtagtgtcatttgttgtgataaccaagtcatgcttaatcttggcactcagccctgccaagtacttctccttcttactgaactctgttggtacaatcccataggctaatttagccaagcgatcaaacttggttgtgtattcagtcactgacataccttcgccttgtaccaactcaacaaactctttccgctttgcactgctgaccgcctcattgtaatatttagcattaaataaatcccagaattcctcccaggtcattctggcaacatccttggtgagggataccagctcttaccataccaaggcatcctcctagaattgaaatgtggcacatgccactctgtcatttccaaccactcccatgaaattcaatatcctttcaataacagtgaaccactgctctgccttcagtacatcaggacctcccagaaacactggaggtgcttgcttcctgaatctttcatataaaggctccatacggttaccagcaacgtgttgctcagctggcaccgtaggggctgcaggaaccgcagcaggaggctgcgggggaagctcaacaggagcatcccgctgcctaagtcttcgaatc

SEQ ID NO: 231863 - DNA, 1410 bp, Cannabis indica
aatatttaacaagacctcttttagcaattactatttataaataatttttttatttatatttaaatctttactataattattttaacaattaatccatttaattataatatttacaaaaattaaacttctttttatacaaattaaaattatcttcttataataaattttaaatgatatttaattattttgttacaattagatgaaatatgagatctcaagctagtcaatcgataacaaaatttatatatctatctatatatttatatatcgatataattttaattttctaacatctcctattttctccttttaaactttatatatacattcattgtctagtttatcattaatggttaatctattcggtaatttagtcttatctccctacctagatgatattcttattaaatcttttacagtttgaaagatttgtcaacatttcacttgaccataatttataaaagtttgaaatgatattactttgaatttatttattcatttaaagattattgagtattttttttctcacattatatgtctagacaaaatcttttctaagcacaatggatttaaaccatcactatcatattattttcttcatgctttatgctaactttaagatttactcaaatatatattgaaatacatataatcttattataaagacttattctcaatatagtgtacttgatttgattcaagatttgcaccttgtgagaaaaatttgttatttattttttaaatactacttattgacatattttgggataaagcttttgtgaagttgtggttgactttttccaagcagaacatatgcgtaatggcttcaattctcaaagaattttgtcagacaactcaatgcccagacaagtcttaaatgactttgcccaacaacaaactattctctctacaacactatgagaacaatctaaaaagaaagtgaccacttttgatagagttcaaatactcttttgaatatttgaaaaccaactccatgactatcacaaaatattttattggatgtttatgaacacaactaaaaaattatatgatcaattagaacaagcaataagttacaaaataacgccaaaatagagttgttatgtacctgatgacgacacgtcgtctgatgcacactataggcaggggcggacgtacttgtctccctatagtggccatggcccccctagcttttatatatatgcaatataaaatcttagttatagtatattgtaattaaactatttaagtgaaaaatataagtcaaactaaaatttgaaaattaaaatgaacactacacttcgcaataagatagaaaatgaatttttaagtgattgtttggtagtgtatattaaaaaaaaatgactaaaaagtttagcatatatttaattatagatgattttcgtgata

SEQ ID NO: 231864 - DNA, 2494 bp, Cannabis indica
aaggtgtcttgggctcgctcgctaagtgtttcctccagcaaccttgacagtaatcgccgctccgagttcgattccgactccaaggacttttctgactccattggtgtttacgagttcctgagtctgtgtagagccaatgatctgagggtgtccacgttctccgagctcaaatcggccaccagagggttcagtatggcattgttgtttggggagggaggttttggctgcgtttacggaggagttgttaaggtttcggggtcggatgttgagattgacgacaggacgacaacgaagatgcccttccctgtaagattgatgttgcgatcaaataattgaatcgtagtggcttccaggcatgtctttcctcattccttttctttttggcacgatatatatacaaatccatttatgtttgtattgtttcaggtctgtttcaagaatcttggatttgcagtagcttgtttacaaatctgaataatgtgttggaagtgttttatagtcataagaagaagttttataaaaataaaaaaaaaacgttcactaatttgcaattctagaactcatcatgttgttcaagtgttcaattaagaaggaacccattttgtacatgttcaaccgataaaagatagctattgaaatctttgatttgttgaaatggattttgttttagaatatcaatgttgcttttggaatgccattgtcaggtgcttgaagttatctaatgaaatttaccatgtatttgcattctagtgtccatggcataaagaacgtataaatgaagtgaattttttatgtgttgtgaagcatccaaatcttgtgaagctagttggatattgtgcgacttttggtctacaagccaaaaacacaatgagacaacctgttccacctttgtctttctctttgtacgttggtatttttattcttcaatgtttcacctttgtctcgcttccatggagacaacctgttcaaaaacacaattacatatctaaatgagacatgtcggagtcaaggtgcctcgatcttctgcccaaatgtctcactccatttctgtagccacgatccattattattaccaccgccatttgtttccgtaactgtgcgcattcatgaatgagacaccatttgtggtatggaaacatttttgaagctctaaaaattagagcaaattttggtagatcaggttaaggggtgtattgttcctttagctttttaataaacttgcagtcttgtagagatcctggtaaatgtttttcttgatatgatttgctctaggaattgattcttcatggagacttgcctaataatatgttagtttctttggtttacatggagacttgcttcacatgagacctacctagtaatatagtgagagttttctatttattgtaaatttgtattaaattttcttcagtagaaaagttaggttgcaaaagtctataatatttttagtgaaaatgaaaacaaataaaataaaaaaatagaaacaactagtattgtcatttatacgtgtgatattgaagcccaagattatgtcaaaagtattgaggaaattatgtcaaaagcccaacaatctccattggcttttcttttttcttcacagattttagtgccttatatctttggggcttgtattgtatatataaaaaaattgcaaatttcaacaaattcttagtgaaaagtaaattgatctaagctatatactttggagcaatagagttagctatcaattattcctctgaaacatttgtgcaatcaagaatctcctttctcgtaaaaaagaaaacaactcacattgaaaatgaaaaaaaaaaattaatcttaaaaataaaaataatttaacctcaaaaatagaaacaatttaaccttaaaatagaaattatagtttgtgaaatagaaacaattagcatttaacctcatatatgctaatagaaaaaaaaatatatatataaaaaaaatgtaaactaacattgaaattagaaacaatttaatctcaaaaattgaaacaatacaacctcaaaatagaaactataaaatctgaaatggaaacaactagcatttaacctcatttatgttaaatggaaacaactagcatttaatctcaaactggaaactataatttgtaaaatagaatcaactagcatttaatctcaaaaaaaaaaaaatcatttaactttgaaataaaaactatagtttgggaaatggaaacaactagcgtttaatgtcaaaaaatgaaaacaatttaatcacgaaggaaactatagtttgtaaaatagaaacaactagcatttaacttcatatatgtgaaatggaaacaactatcataaataagattacaataaaattgggtttcatttatggtcattaaatcccaataatagatctcaatgctcgtcctatacagcaaaaaagaaggttaatttgaaaaagaacaatcacaggcatgaaaggaagaaggttgaaaagactccgcacaaacatagtaaatcatcaaagc

SEQ ID NO: 231865 - DNA, 3752 bp, Cannabis indica
aaaaaaattaatattttatgtaaatttctccattatttactaaataaaaaattagcattgagttatttttttatgaacataattgtgctctaccaacataatttgcactgtttttttttttaacgggaatggatgatattattaattcaaatctgcaatcacaattgatttgagagtactaggaagggtactctctgaaaaactactatcagaccaataacaagagccacgggccaaacaatgggcagccttgttagcagatcgcttaacatgagaaacagttacattaaataaagaggacaataaaactttacaatcttttacaacgattccaaacattgaaggcatatcaatttgactttgcaaagcttgaacagcagtaaggcagtccgtctcgatcacaacatttgtcaagtttgagtcctttatccaactcaaggcttcttttatgctaattatttcagcgaaaggagcatttgagaagccattcgagtaggtagaaaaagccaaaatgacagccccattagagtcacgagcaatgaaacctgttccaaaagaattggtagcgtcaaatgtagctccatcgacattaattttggtcattccttcggctggtttggtccaggagtcgcagctgctgttgcaattggagttcaaatgtataggttcaaaccgcagactttgtgcagaaagccattgtccgagagtttggtgagctgtagaaactacatcagctgcagaactagcacgattattccaaatgagattgttgcgagctttccatatagaccaactgaccattaggatttctgctatataatctccaccatgccgagaccagtttgcaacaaaccagtcgaaaaaactggtgcaatttgaaggggagagagacacggctgatctgttccagcatgaaaccgagaatggacattcaataaacaggtggtaggtggtttcagggacatcattgcagaatacacaggtagcttctacaggtacatgtttaatccgaagttgaactcgagtggctagacaatcggttaaagctctccaagcaaaatgaagaacttttggtgggactttgattttccaaaactttttccagaaattagagccttcatcagttgcccaatggccttttgactcttgaatatgtctgtaagcactcttgacagagtaaaaaccaacagcctctttacaccagtaccaaacatcttcaacagcttgattgctaagaggaattccaagaattatttgagcttctcttggattgaagagatctgagattatgtcatgatcccattctctttggtcaattttcatgagctgattaaccttacaattagttaggctcggatgggaagaagtgatacacggctgagactcagttgggagccaaggagtgtgcaaaacatttgtggaagtacccgagccaattctgattcttgcacccattttgacaaggtcttgagactcaaaaatacttttccagatgaagcttgggttgcttccaagtgtagctgtgagaaaattaccatgagggtattaccgtgctttataaactctactcacaagggattggtcattgacaagaaggcgccagacttgttttccaagtaaggacaaattatagtcatgaagactacgaaaacccatactgccaacatccttctgctttgttaaacgcttccaactcatccaactaataccacgggtgttttgattggatgaattccaccaatacttagacatcatgctttccaaagaagagcaagtatctaagggcaaaagaaacaccgacattgcatagctagggagagcctgagcaacagttttcagtaagacctcacggccagctttggataaaatcttccttcccaactttgtattctcttttgcattttctctttgagaaaccccaatattacgttcttatttctgcccatggtgcaaggaagaccaaggtaagtagagttttctggggctatctccattcgaagtaacaaacagatgcgatctttaatcgtatcattagtattcgaactaaagaaaatagagcttttaccaaagtttacctgttgtctagaagttgtctcaaatagttgtaacaatctcatgacgttggaagcttctatttcagttgctctacagtagatgtagctatcatctgcaaacagcatgtgagatatgataggagccaggttagccactttgcaaccttttagttgaccgagtctttcaaatttggtaatcagcgatgacaagccttcggcacagataaaaaataagtaagacgacaaagggtctccttgacgaatgcctctatgagggatatttgggccaaggcttttaccactatgaaccacattgtattcaacagaggtgagagtttgtaaaattaactcaacaaagtaactagcaaaccccatgcgaagcatcatagcacgaataaagtcccactcaacacgatcatacgccttactcaaattgagtttcaatgccataaagccttctttgcctttgcgtttgcgcttcaaatagtgcataacttcaaaagctatcataatattatcaaaaataagtcggcctgggataaaagctgactgatgttcagatataatatgatgaagcacaatctttaaacggttagcaagtaccttagagatgaccttataaaggacattacaaagtgaaatgggacgcaaatcactcattgtacaaggctgttttttcttgggaattagcacaatgttgcttcggtttaacccagcaggtagagagcacgttgagaaaaattccttcacttgattgatcacatcacaaccaactattgaccaatatttctgataaaaaccaggggtcataccatctgggcaaggtgacttatccggatgcatatgaaacaaagcctttttcacttcttcatcagtaatcggggcaagcaaagattcattctcaacagtgttaatggaaggaacaatactcataacaacatcattaaaatcagtagaagatgaagtaaagagattctgaaaaaaataaacaataagagagtctaacctcgtgtcccaattaacccagaaccggtagcagattgaagactatgaatggtgttatgcttcttacgagacgtagccttggcgtgaaaaaaacttgctgttctgatcaccttcatggagccaaagttgtttggatctttgacgccaaaacacctctcgctggttcagaatttcagtgagcagattttgagcttctttatattttctgaccgactcaacatcacgccctctcttccacttttttatcttggcaattcgagttttgaagttgccagtatattcacgcccccatgtcgacaagttttccccacagatacttattttttgaagtatagagcagtcggtatgaagctcccagacctccttcaccacctggaagcagagaggttcacgcaaccatgcgttctcgaacctgaattgttgtgtagaaacaaacagatgctgaaccaaaggctgaagcaacaaagggcagtggtctgaagcagtgatttcgagattaaataattgagctgaatggaaaaaatctgaccaactatgagtgaccaactatgaatgaccaatgctctgtcaagtcggacttcgatccaattagtggttcctcttccacgttcccatgtataaggataaccaataagatcaagatcaattaaatttgcactggttttaatgttttgcttatggttgtttttttag

SEQ ID NO: 231866 - DNA, 877 bp, Cannabis indica
aatcacgtaatacgcctatgttagttagggtgttacagtcacacacacaacaaattagtatttttagtcacaatacttgttgtgactaaaaaatacttgttgtgactaaaattaaattaatgacaatttgtaactaaagactacattttagtcacaagtaacattttgttgtgactaaaaaattgtcactaaaaataacagttttttgttgtgcggaaggataatactgaggaaaatgacaaaatttcaatttaaggtttgcaaccactttccaacttaaaaagttgaattgagggtatggttttcaagggtgtgacatttggaggttgggagttaaacaattgcaataagtgtgaactagatagtactatgtaggactcaagtacaatcactgttccctccctaaaagacaattgatatacattaaagaagagaagtagggctcaatccattattgattgatcaatagtacacacgtgatccgtacaagtcattgtcagctttatacaaagtcttgtaaatttcaatggtccctacacaattcaatttcaaggtgtacattaagcaagtagggctcactccattattgatcactcctacaatgcacatgtttgatcatcattcttatttatataaagttaagtggtgttgttatatataccataggagtttactaaggttatttatactgttttcatatatataaatctcaatcatatgtaaattttctattttcgttataaatttaacatgctacaggcattaaatataaaaacccctataagctatctaaaccatacatgaactctcgtcctatatcgaaattcagttttatttcactatagcataattggtactcacttctcagatctcgcat

SEQ ID NO: 231867 - DNA, 962 bp, Cannabis indica
agtggggggttaagggagagaaaagtaagattcacttggcttcttgggacaaggtttgcctccctaaatcttttggcggccttgggttcaaaattggttctaattggaatagatctattcttaaaaagttcatttaggctatcatggataagcatgacattctttgggttaaatggataaatgacatctatttgaagggggctgacttttggaaatatgacttgaaggtagatgcaagttggtattggaagaaaatttgccaattaaagaagaaattttgcacgaatagtattgttgctgctgttcgtagaggtaagtttcttataactagactctataattggttaattcagcatgaaatagatgtgttctacaaagctgtctggtgtaatttatcccttcctaagcataagtttattttttggcaagtggttcatggccatctccttacaagagataaattcattagattccacatagagctagacacaactatctgccctgtttgttgtgaagaggaggagagtcattaacatctcttttttggctgtgtcgtttccaaggcagttgtgaaagaggtggtcgatggttggttttggggcttggccgattgagtataacaaatgggtttgttgggtgacagggaaggtttcaggtatcatcaacttgattctttctgctataatttatatgctgtggaagaacatgaacaatagtgtacataatagtagttgttttactatcttgaaaattataaatgatgtaaacatatagttaaatataggttgtatagcttaaaagataggaagcttattcaagtgtatagatatatctttagaaacattaaagattattggaggatcaatgaatatcacagataagtctttcttcttattttaattgctatattgaaactttggtttttaaatttagtttattttttataagttaaatgcttacct

SEQ ID NO: 231868 - DNA, 935 bp, Cannabis indica
accgacggcatagggtctcccaaaaatcctcaaaaattccccatttccaaccgacgggataggttttatttatatatatacctatggtttttaccaaaaaaccgcctctaaatgtcaatttcgaatcaggtgggtgttttcacaccctttagcttccctttttataaaatgggttaaaaaaggggaagctaaagacccatattgtagtactggcaggcagagcaaagtctaaagcaatcatcttcaacaacgggccatttgccttaaagtttgttgccaagagatttttaacacccatttttgaaggttttttcaacaatggtaatggggaagataaagaccaagtaatggccatttatggaacagaaaaaagtaggaaaaagcttggcaaaaatgttgttagatgatgaaggatggcaattaaggaagatagacaaaataatttttttttttatcaaaaatggttttgatcgttggacaagttttcaaacagaaagctacaatgaaaactgaaatgaaactgaaaaaaaaaatagaaaaaaatttgatagaaaaggaggaaaagtaaattgtgaaggtggtataatgacatcatgcatgtgtaagaggtattagtgtataaaactatatcagaagtaaaaatgtaggagtagctgtgtaaggatatataggtaatatttttgagtttttatttttattttttcatgtaaattttccattaaattaagatatcattcctcgttatttttttacataaatatatttatatttataataattttataataactgtaattatttttataaaataaaattagatattttcaacaaatttttatcaataaggataatttatttttcctgccttttcataacatttgcctttagaatttttcattcgctcgttacttttgtgcctatgaaatctctcaatt

SEQ ID NO: 231869 - DNA, 1098 bp, Cannabis indica
tgtgggacggaggttctaattctacaagcaacatagcttcataaccataagccatagcgaataatgtttgttcagttactatttgtaaacaattggctgtctgtttgccattgtctgagatgattttgtgctcatattcttcaccacaaagtccaatacttttttagatgtaattgttgccaaaggcttgacttccgtccactttgtaaaataatcaactgcaaccactgcataatgtaccccgcccttacctttgggcaattgtccgattaggtctattccccaaatagcaaaaggccaagtactcttcatctaagttagctcattgggcggtgcacgaggtatttttgaaaatctctgacatttgtcacatttctttacataggcctttgaatcttccatcatgattggctagaaatatccttgccttagtattttcttttatacgctttgccctgctgcgtggttaccacaaaatccatcatgtacttcagacaagagtcgtgcaacttcatctgttgttacacatctaagtgatggcatggagaatcctcttctatacattacaccatccacaatgatgtacagtacaactttcctcatcatctctcgagctttgtttctatcatttggaacttctccaatattgaggtaggctcctataggtgtcatccagtttggagttgtgactatcgtttcgatttctttctcacaattgatactgggttcttctaagaattgaataggaactagatgttgggctttgtgccctaaataaaactctatttcaatgtaatcttttctattcaattatcaataaagaaaaagatttcattttcattacttatttagtatgttatttggttcatgtgatcatttatatgtttatttgatttataaattcatccaaatccttatcacattgatattcttgtttattgtgtcgtcagcacagtggaaagtaatcaagattatgtgattaaatgtattcctatgatttatcagtacacaggatttaactgatatgataatctacaatgtagtttacttgcaccttggataagtgttatgtcctttccagggcattggttaatgtaa

SEQ ID NO: 231870 - DNA, 970 bp, Cannabis indica
aagtcaagattccataattgtagatcatgttctcagccatccacattattagattccaaaaacaaaagttgtaagaatcatcttctctaagaaactttaataagtgagtcaaagaaacaaataacacaaataagagttcatgattactcaggatttaagttgatctactattgatcatcgttgtgatatgaaataggtctttttagtaaacgacatatttgataaaaatagctttattcatatcggtctttgtcatatataatctttattatatacaacacctttattttgatgtcatactacatctgtattttgaatcaagattactcagactaaagaacgggcatcagtaaaccgtactagcaaccattaattaaggatttcataacttcaatatactatgactgttttattcatagctaagtggtcttacttctccgtacagctacaagtcaaaatctcatatatgaataaagaatttttagatattaaatataaattattcaataataaatattaataatttaacattcaagtatatatcaaaatgttcaactctttattaatgatcaaaaatgtctttacatgcgttttagggcataaaccctgccaattcgaactttgataactcgtttctgactcactatctttctgtattttgtaccatgaagacatggagcaaccaaattcaggaccctaaagctgaaaatacacgaatcagtacctcaaaagtcaacctgggtacctagggtttcacctagtgccgaagatgacatcctcatttagggtttcaatttttaggatcgtcttagtgaaaatgggtcaaatgcattgggacataaactataagtgtcatgaacatatttgaggcatcagaatcagatttaaagaaagttcatttttaagcacctagagcacctagtgcctaggcaccaagcgcccaagttgacaatttgtcaatctaggccac

SEQ ID NO: 231871 - DNA, 651 bp, Cannabis indica
tagacaaagtgatgaaggtatttttgttgtttttttttagttttttgggggtttttttttcattgtttagtgttagttattttttaagagtgttttcactactttatgtcttttactcatttcaatttatttatttttcaatcctattatgtgaatcttattatatacacgatttttatattttttaacggttgtttttttattgttctggattgttttttgcatgcatttagggtaagaggaaatctttaaagatgaagcttccctttgatgattagttggaagttcctactgggaaaagagttattgaggtatatttttttaagtgattttgtttattatgttctattcatatttttttttatgttgttttagttaatttttcattttattattctaagattggtatcataaatatttactttctaagtattaccattccaaaattattattattgggaattatagggtaattagtgatatcttaaatattttgaccaagtcccaattagagttattttccaaaactatttttagtcattttctttgtatccctgagtattcaatccaccttcaactgcttcacggactattattgagggaagttcaacaaccaaatgagatggaattttaggctagcgtttctgggaa

SEQ ID NO: 231872 - DNA, 3747 bp, Cannabis indica
atttttgtaaaaaaattaattttgattttaggagggtttaattaaagttgtggcatgggttagttttaagaggtgtgagtgatgtggcatatatatttatgacatggcacgacacctgacacattacaatgcaaaaaatggggaggtacctacggaagttccagagtagtgacggaaggtatttttaccgcaaaaaataggacttaggtatttatctgctactcggcataaaacttaagtatttatgccgcaaattactctaaatattaagtcattatccacatgttattttcttattggaatatttaaattattcttttacataaaactttttaatgacttggaccaatcagaaatcggcacgtggcaatttacttaacacttaacaatcaaatacttagttttagaattataacttatgtattattaccgtcaaaaattaaacttaggtatttatttacaaatgagagttaaacttagatatttatgccgcaaaaaactctttttatatagttctttaaaatacattatttgatggactatagtttttaccttttttcacatcttctcttctttatattaaagaaaactagttttaaaggagctattgctcatggtgatagagcatcaccaatgcaagccacagccactctaaaagtggctcaaaataacatatttgactttgtcccacacccttagtaagttgtgacactgacacataaaacaatttccatacatactttttcccctaaggaagattgaaaagggtggattttattcaatagtccacccacacagttttaaatagaagcttgatctctttttatgtttacacatagataataaggctattacttagttttcacataatttatttatttattttgagaagatagttttcacattattatacattccaacataattgtccaaactatggttttttcaataaatttaaatgaaaaatggttgttgatttttaataaaagttgccttacaatttactgatattcttctttgtgaggcttcccatggacttagccttgtctctaagaacaaacttttgcacctttccagtagaagtttttggcaaatcttgaaaaacaacagttcgtggagccatgtaatgaggcaaacgacttctacaaaagttaataatctcatcaccactcacattacaaccactcttcacattaacaaacgcacaaggtgtctctccccagtggtcatcaggtcttgctacaaccgcggcctcaaaaaccgctggatggctataaagtacagattcaacctcaattgtgcttatattttcacccccagaaatgatgatatctttggaccgatcctttagctcgacatagccatctggatgtttcactcctaagtccccagttcgaaaccaaccaccatcaaaagcctcttgtgttgctttgacatttttcaaatatccattcatgacagtgtttcctctaaacataacctcacctattatctttgcattagctggtacactcttcagtgttacaggatctttcacatctagttcttcaatgccaagatgttgaacaccctgtcgtgactttagttttgcctgtgcatctctaggcaaagaatcccattcgggtttccaagtacaaacagttccagggccatatgtttcagtcaaaccataagaatgagtcacattgaaccccatttcttccatcttaaaaagtagtgacgggggcggtggagcagcaccggtcatgatcgataccttggatggaagtggtttccgctctgtggctgatgcatttatgatcatattcaaaacagtaggtgctcctcccatgtgggttactttgtgcttagctatagagtcaaaaattccctttgcagtgacattccttaggcagacgtttgtaccgccttgagcagcgattccccaggggagacaccaaccattgcagtggaacatgggaacacaccacaaatagacaaccattgagtgcatttcattcagaagaacccctgccaatgaattgagatatgcacctctgtggctgtaaatgacacccttggggctagatgttgtgcctgaagtatagttgagtgagatgggatcccattcatcttttggtattatgacctcaaaatcaagattccccgttgatagtagttgctcgtattctaacttcacagaagcggaaatggcattgctgctactactaatgtcagtggatagttgatcatcatcacactctggaattaagactagaaggggtggcttggaacctttttttgataacatgtcaatggctccctgagcaatatggaggaattggtaatcaacaaagaagactttggcctccgaatgtcttaataatactgacaccattgcagaatcatggcgtatgttaagtgtacagagaatggctcctgccattggtactccaaaatgcagctcatacattgctggaatattaggagccagaacagcaacctgctcaagtgaataacaattatcaagaaccatataaggatagagtttgcactttgcaggaactaaaagtgtgtgtgaacagctcaaaccttcaacctcaaacctcacaagaatgtaaggcacgatacatttttaaattctatacgattgcttttcgatgaagaactcttatatgtcctttcaatatagagagttcaattaagaattaatcttgaattgcatttctagtgctgatcatttcagcaattggaagttaaagtctagtgtattatattaaaatccattggtgctacaaagtactacaaaccattctatccatctggccaagcgaaaaagtgaaaaacttgatgaattcaaacattttgatttcatgaatcatgaatggtaagcaaacaatcaatcaaaatcaagtaagtattaaacatcaaaagcgaactatacaatccacacaaaactagttttagtagtagactgcagtctaacccaattaaatagtattggattgaatatgagaaagagaaacaataataataaacgagtttgtataatttttttttgtcaatatacatacatatagatttgagacggaattatctaaatttcttgactaaattatttatttgattaaattttattcaatgctacttttccaaaggcaaagtaaccatgaattattctggtcgattgatcaccttaatcctaaattctaaccttttacaattctaaacaacaacaacaactgtagaaaaacaagagaaaatcaaaaacctgtaatcaatttaattgtcaaacaaaaactgatccagaatcaaaagttggaaagtgattaatgattagttagaataaaaatctctcaccacatgtcctgaagatattcccaaatgagaaatagcagaggccagtcttttgcatctttcaaaggtttgggaccaagtgtattgcacatttccgtagaccaccgaaggtctgtcactgtaaactatggcagaacgcttcaagaagctgatcggcgatagaggaacatagttggcagagcaccgaatcgcaccctccatagtcgattgcaacagtgtttgtttaattaggtactagttagatatagatatctttttacacccacttcctcctcttatatataaaaataattaattattgtattgctatatgagctatcatattaggtagggtagccaacctccaatccaatccaattgaaccgaaccaattcaatttaattataaaaagttagatatccaattacaatt

SEQ ID NO: 231873 - DNA, 941 bp, Cannabis indica
aaaatcgtttcactgcgattatacaaatcaaaatcacagctcgaaaccttctctccaaaaaatatctccattaaagaacaaaaaaaagtttctgttacaaaaatcacacctagtcgatgaacaaaaaattagaaccgacgaagcagccagtcaatctacattacgacagatcaaccaaacagtcgacacaacaaatgcgatcaaaaatctaaagttaagcaaagtttacctttcgcatagtaatcgacatcatgtccatcttcatcgtcttcctctgcctttactagtcaaaccaccaaaagttaccaaaacaggttattataaaaataaaaatacataactgattattatacaaaaatacttcattaattaggtgagaaaatcaattttttatacatatacttgtcaataaaaaaaattacttacaatattcaaaattgtttataacaaatgttacaaatctatactcaatagctataatcaactattcattaacacaattatacatatataatcataattatatatttaattcaagaaaaaatatgcatttgttcataactgttgaacagttcttctattcactttacatattatttagcctcataatttttttcatttgcattggttgttaacagtttgatatggaagatccaagaacagttatgatattttataatggacaatcggtggacaaaacaaactacaagattatgaagtgacatggatattgataccatcaagttgttcttgcaacatacttgcacaaacaatatgttctactttgggtttggacagaaataaacaaaacattgatgttcgattcaaaataaaatcaggaatacaacccatgaagattgtagatgacaatggatgcaaattttatgaataaatcaaaaaaaaaaaaaagatgatgatgagaccaaataccctatgatggt

SEQ ID NO: 231874 - DNA, 899 bp, Cannabis indica
cttactgatcaaggcgatccaattgtgacaaatccaaacatgcaaactattcgaaacacgagtggaccaccagggacaaaccccaaacaagttaatacacaaccacctacggtaggccattgagtgacttcctctctggctgggttcacaccaagcgtacaagagattgggaacaccagtacgacttctgatcaaacactcctagcaccgaggtcctgtccattaatattacttaaaggctagttggatatgacattgaacttcagaatctgtgagaagcacttgggctcatgcaagggcataacaacactctgcatcatgattaggaagatctctaagcaaccattaaccttgcattcaatgaggaaagatgtcaactcatagaggagggaccaagagatggaaattataagggcacaacagacaaccattgacgatcgttctaggtatgcagctagacatatcgcacagactcgtagtggttagccacaatccaaggccacaggttcaaactatactaatacggaggtctcaggccaacctcttagccaaacaggtcaaatgccaagaccacctggcgcttcagtgttcgatcagctaaggcatcgtgcacgacctcaaaaccaatttgaattgtaaaaagggactggatggacaaaacgttccaccgaccgtccagctagatacccgcacccaagatcagttcaagagatcctaatgtaacataggtcagtcaacaggctgaacaagttcatccacttgtgcaagcataactggatcaacttaaaagcatggtacaaggtctgatcggcccaaaactcacagatcttgaacttgactaggcatgtcgatcacccttctcatctaaaatcgaagtccttgacctacccccgaagttt

SEQ ID NO: 231875 - DNA, 1443 bp, Cannabis indica
tggctgatcccaaccaaaacgatgaaagtcgtcctgatgagactacgcatcgttcttaaaaagaaccaatgggctctcagagaccacccacttttggaacaacacgttcaagaagaaattatggtggtaatcaaacctagaaggaaggaacgaagaaaccaatactactacaggatatgtaccctgaactgaggatgcttatgatcccacaaggtatgtaccattagtggaattggaaaatcgataacttcgacaatgcttggctgagtctaaccaatgaagcactaagttggaaagaatacacagaatcaacctgatcctggattaagaaggccgcaaggtagacctcaaggttcaagaactaggaggcatgaagcaaattaaggaaatctccaaaacacctaggaggagcaatctgaaggaactagggatgttccagtagatgaacatcagaataaccaagaacatcgtcgagaagtggctcaaagatcccaaggatttacgaatcagggaaatgagcgtaatgatgtgccagagggttctcgtaggaatgaaaacataaggcaaccccagaatagggaacaagaaatccctcataataatgagagaaatcctgggactcaacctagaacaagtgggttaccatcgagacacccctagcgtccttctcgatctgagaaggaggaggcatacacatacctaaacagagggcatgtatctaaccttttcagaaagagaaggcctatgcaagacgaagcaagttctagctcgggatactcaaggtcttaagggcaaaatcgatcaggaaggcaaacgtgagaaggaagcaaacttcagtgttatgctgatcaagaaagcatgagtaatacaagaagttatcaacctcggaaatgacatgggaaaggctccagctcggtttcagagttattgttgctatcccagcgagacgccctagcgagatgcaccttgtagcgtatctgaatccatgtcaccattgacccagtaaaagcggataaatcacagctacatgattttcaaataataaaaactgtatttatttacgtggtgcgtaattaaagtccacaattttgaggaaatgttatggtgggattcatatctgattgtaattaactgcttccctatgttattataaataggggcagaatgtactgaaaaaaggacaaaaaatccttgagagaaaagaacatgagtttgtatccgaataatctaaataagattgactcgtggactatgtagaattttaactataaaaccatgtaaaaagcttcatgttttgttttcttctttattttctataatttctgtgcaaattaatcatgaaataggctttattatcgtaacaaaaatctgcattaacaattagggtatttatcaaatttttttttttaatattatttcaaataatttattataaaataataa

SEQ ID NO: 231876 - DNA, 1819 bp, Cannabis indica
gagataagagtgagggggaataatggtattagtaatattggggggtactccaagagtcccgagggagggcttttgaggcgccaaggtggatgtgacatgtggatggtgaaatgcgagtgtggggcccgggatgatgacggagagcggatggtggcctgcgacatctgtgaggtgtggcagcacactcgctgcatcgggatcgacgatgccgagaacgtgccaccactatttgtgtgctcttcatgttgtgactcccttgtgccgcccagagttgctcatcgtgaggaggcagcatccggaaaaatggagtattgtgaggatttgttgctgccgacccattcatttgatcaatacggcttggccataggatactgattaattggagctgtgtcattgcaccattaagttctttcttttgcttaatttcctttttcttttcttctcacaatgtgcaattttgcagaagaacatttcacttcgtaaagtaataagcttccgtaaattttgaaactaaacaaagtctactatcactcactcaccacatctatctctataaatatatacatatattactacattagttggtacccatttggagttctttcaaaaacaataaataatcacaacatgtcgaattttattttcaataattaccatttttttgcaaattgaattttttattctactaacttgtacctctttagtataggacgtattttatttaatgttatcgtggaagagtaatatggtaaatggtagtcgataaataaatagatataaattaaatacatatcactctttttacataataattaaaaaactaaaattaatataaattattataaaaaagaaaaaatagtttattctattattcataacgtaacactactacaaaattaattttttttcgataattttaaataatcggataaagtatttccatcaatccctataaccgtcgcgtattcgattgtcccgaaacggacgaaatataagacagttaaaaactgttagcataaactttttatgacagtgtaaaacaatcgcgtatattgtgcattatagggcacggtttaaaaccgtcacctatactatatgacacattttaaattttagtataggcgatgattttataccgtgcactatagtattaaaggcgacagttttaaaccatacttaatttatagtattattatcccaagtgttggtcgaatgacgtggtaggttcctttaaatgacacatatctccaccacaagacctgggcagataaaagagacttatgaatcaactgcccagaatgttttcaagctggcagaaatatcagacaagctaaatgcaattttccgtacagcttcaagacgtgcagacctagttagaggaaaatagtacaaatcttgcacaagctagccaaaggataattcgtgtcataaatacaattaatagcagtttttgtttaaatatataattaatacacagtcaaaaaggaatcccaattatatttccattattttaggaagatgagttggttccttaaattagtaggatgacagcttgaggagtttgaatcaaattttgaacatcttttataaattgtaaattagctttactgaaaagggacatgaaatcattgtctttgagtgagccgatatgctgctcaatttcctgtaaaacttttgagaaggaataatcgttttgcttctcttctcacaagttaaatactataatcaggggagtaggctattgttgggattttatgtcctaaataaaacccattacaatctaatctgatttgttatcaataaaagattagaagtcatt

SEQ ID NO: 231877 - DNA, 1593 bp, Cannabis indica
gcaagtcttggttattatcacctctctgattttgatcggtcttgacatacttttgtaaatgcgggttatttttcctgataaggaatttaatttcccgtttcagattgttacattcattggtgtcgtggtcatagtctccatgaaatcgacaaaacttggtcatgtctctcttgctgacatcttttttcatgggcgcaggcttcttgtacggggccaatgactgagtgggcatgtaaacactttctatatctacagtcaagatggtaaatgcagtgtacttggcttgattctcccgaggggtttgttaggtttggccagttaactttcccttcttcccattcccctgcctattgttgttgctggaacatttaccatttgaacttgaattgctcgggtattgggggagttgggcggatgttctagtggaaggagctttaggcttgctaggtttttgctcaccttctactcactgaatagcctcttcaagtttgatgaagccttcagcacggtcgagaaagtcgctcatcgagtctaccagaccgttcttccttatgtccttccaaagctcaccagggacttcaatgccccccagtattgcggagaacttttcatcttcagttacttgtgaaaccttagttgcctccgtcatgaatctgctaatgtaggctcggagaggctcgcctggtctttgcttgacttcgaccaggtctcctaggtgcagcgaaagttggcgagaggaggagaattgtgcatggaatcctgaggagaaagcttttcgtgagttaaactttccaggtgccagcttgaaataccattgttgggcgtcttccgagagggtagcaggaaaaattctacaacatacgtctcctcatattccctgcagatccattttgcatctcgaaatacttgaggtgggaaagagggtcttcttttccattgtacatcttccaagttggcattttaaacttgtggggcaacgccaggagattgatctcgggggagaaaggggttccgcacgctcggtccaactcaagatcattatttctctgatcggccatgccttggaacatactctttagttcatttagatgtgcttgcatagctagactaacttgttcgacattttagccaatctgagctacgtcagtatctttctgggcgggaatttgagcacgggttccgggctgcacgtttggcgtgcaagctgatcgtctactcctcttctccaattagatcgcttcttagataatgagtggttcccaacctgtcgaacacgtacggaagcgcttggctttctcaatgattgattggtttggttaatgtgctgactggcaccatttgttgggttttatgccctaaataaaactcatttcaatataataagatttacttattaatatagatcagaaataacatttaatgttgcatggttcacatgatttatttcatgattatatgtacataatgtatgaattcatctgaaacccttttcacatacttgatcctgtttattgtgccgtcaacacattggaaagtaaacatgactatgtgaataaagtttcctagatttatcagacatagggttttaccgtt

SEQ ID NO: 231878 - DNA, 682 bp, Cannabis indica
tttgttggctctttatttaaaataaacatgaatcataaaattaaaaagagaaaaaaactagatttttctttacaatatgatgtcaattgttataaaaacatttttaagcgttcttgactctttattaactggttgtgtattattttttcaaatgcatgtacttattttttgtatttgcaaatagggtgaacatggtgaaatccactgagatgaatgcattgcaagttcaatatgctgataagggaactgtagaaggttttgctcaagatgttgcaggaccaagtgtagctgctagacacaactatgagacaagaaaaaaattacattttggggaacaaggtgaaacagaggagggtgagacactatcatcacctaccgatgatagtgatttagagtggaaaacaggaaggcattacagtgaagaagatgatgatacagatgaagatgagggtgattatgtagatagtgatgttgaccttgacattggagaatattatgatagtgatgaagcaggtcatagaaacccacacacttcaagaagagataattttcttgaccctaacagcaacattccaaatccagaaactgatgaggtgtatatcaatggaaaaattgttttgagacagtttctaagatttagtgaccatagacaatttgcacaggtaatgagagactatgcagt

SEQ ID NO: 231879 - DNA, 715 bp, Cannabis indica
gtattcttacactccgtgagtcaatgagattctgaaagaaaagtgactaacttcataagcagtataaggtttgtctagtcacaccataactaaacgtatttgattacaacctatcacataatacattcttaatcaatttatcaacattgcaatcacaaaatcccagtacttcataaagtacccttaccactcgctaaccacgagctatgtatgtcactatcgttacccgatatagcaaacaataagtaaaaaacctatccgcggtttcagaattaattactcctaacagtaatgacaatttcttttactcgatcataattgagtcacaacgataataatcatttcataccatttccctcgatcataatcgagtcacaacgatgataatcgtttcatattatttccctcgatcataatcgagtcacaacgatgataatcatttcatatataccccttgatcataatcgactcacaacaatgataatcgtttcctattttccctcgatcataattgagcacaacgatgataatcgtttcataccattttcctcgatcataatcgagactgtaacaatcacaatgttaactatatacggtgctcaatactttcttacctcaagtccaaagtcaagtatgttggccgacctatgtggaacgatgcttgataatttttggtcccatcctcacgacaaaggtaaatcaataagggtctatt

SEQ ID NO: 231880 - DNA, 652 bp, Cannabis indica
tctgttcgatcctcctttcttcctatagccttgaacctcaacagtaagggattgggaatctagtgactttttcttgccactctttgattccttgtcccgggtgacggcttcttctaacttgataaagccatcaactctatctaagaagcctttcatggtctacaccgctttgagatgaaggtcagaccgcagaggactcatctccttgagttcgactataagtgccattactcttgcgtcctcattaatacttttggtcttagcagttgcctctaagaaccgttggatgtagtgcttgagagactcgtcttcctactgcttgacatccacaaaatcattgggttcaatctggcgttgacaagaaagagcaaattggttgccaaaagcatccactagatctttccatgagttgattgatctagaggacagctaaaggtaccacgctgagctaagtctgttagtgtgacagggaagattcaacacttaacattgtctctcacaccttgtagatcggtctggactttactttaaaaatagtggatttgagattattgatcttactttttgccgtattggtgtcaggaagggttctggaacttcgaagggataagaagagcttcgattcgttcaaagagtggtgtgcaccgctttc

SEQ ID NO: 231881 - DNA, 921 bp, Cannabis indica
tccaagcttgttttgctaataaagcttgattgaattgttcaaaagagcgaaaacccatgcctccttccattttggatttacaaatcaatttctaattgcgccagtggattttagagcctgatttcgttcgtccccaccaaaagttggacatcattgattctagttgattgcacatagtgaccggtagacggaaacaactcatagcataagttggtattgactgaaccacgactttaagcaaaatttctttccctcctgccgaaaagattttttcattccaactattcatcaatttccaaatcttgtcttttacatcactgaacatgagttgtttatcacgtccagagtaagccggtaaacccagatacttttcatgacaatcgcgaatcgacattgagagcgttcgatggaaaaaaacttgtgctgccagtgtagtatttggtgaaaatgacattaccgatttttcagcatttaaagattgaccagatgcccggtggtaggtgtcgaagactcgctgaatagcaagacatgattcttcattagcatagcgaaaaagaaaactgtcatcggcgaaaagtaagtgagatatgggttcagatctcctagtgagtttgtagccatgaagatgacccatgtgttgttcatgttgcagcaaacgagaaaaaccttctgaacagattaaaaaaaaggtatggtgagagggggcaaccttctctcagccctctagtaggaaaacccattgtgtcaccattcaattggaaagtgaagctgttcgttgtcagacaacccatgagaagtgaaatccattgactgcagaaacccattttttccaatacccgctgaacataacaccactcaactcgatcaaatgccttgcacatgtccaacttcatagcagcaacccccttacgccccgtcgtt

SEQ ID NO: 231882 - DNA, 646 bp, Cannabis indica
agaacaacataaacaagatcaaaatgaaactaaaagatacaaacttgaaatcataaaccagaaaaataacagcagtagcaataaaacaatagaacacaaaggattacaagtttcaatcacaagtgaaatcacttggatctaatccttaggatgaactaccttgaggctttgcctttattacttgaagtaactcagaggattacaatggtggacaccaaaaaattgaacacaatggagtcttgctcctacaccagaagtcactcgagagacatgagttgaaaactctcatgctctttacaaagatgtactctcagctcacacccctcaatctctccttgaaagaattacaaaatggcctttatataaagaccgaataaaaaagtagaagaactaactaactcaaccggttttactaactaacataacagtaaaaactgtccaactaacatcacttgcaccccacatgaatatttcttgcaattaaaacctaaagggaatatttgattattaaaataataataataaaaaaaatagaaatgagtccgtcaaaaaggagagcaaattaaggagatattggctctacctccaccacttttaagttaagtgggttttatcaaaaataataataataataataataaaaaaa

SEQ ID NO: 231883 - DNA, 1024 bp, Cannabis indica
gtaatataatctaggcaaaaccgatccatcaataatagtttccttcatgaatgaaggattaacattctccaatgtttagtagtttcaggcagagcctgaacttctcaccaatgacagctttggtaaacatatcaacagggttttcatgagtgtttatcttcttcactttgaccaatttgctagcaataatgtctctaatgaagtgtagtttgatgtcaatatgttttgacttctcatgatacataggattcttcatgagatgaatggcactttggttgtcacaatgaatgaacaggttatcagattttatcccaatttctgatgttaaaccctttagccagatgtcttctttcacagcctcagtagcagccatgtactcggcttcagtggaggacaaagcaacaaccttctgtagatttgctttccaactaacacagcctccaaacacagtgaaaacaaacccagataatgaccttcgagtgtccagattcccagcatcatcagcatcaacaaaaccagtaacagagtcaccatagttgctgtcatttccaagaaccagacctgtcttaagtgtgcctttaagatatctcagtattgttcttcaccagggtcactaataaatctgctcacaacactcatgctatgagcaagatcaggtcttgtacacaccatagcatacattaagcatccaactccattagcatagggtatgccttccatatgtttcctctcaacatctgtctttggtgattgatcttgagacagtttgaagtgttgagctaagggggtggttacaggtttggcatctttcatgccaagtttgtcaattaccttcttgagatagactgatagtgtgaggtctatttctctttatttcaatgccttgtattttcttggttggccccaagtctttcatttcgaattcaacactaagttgagattttaaactttcaatctgacttctttcttttcctactatcaggatatcatcaacatacaaaagtaggtaaatgccattgtggaa

SEQ ID NO: 231884 - DNA, 1272 bp, Cannabis indica
catagtgagtaagacggtggtaaccaaactcgaaggagagaaagagatccaggtttagatgttgataatactctgtgacagaaaggaacaagagttagagatatgagcggatggagtcattatattccactgcaaccaatgtaaggttttctaaaattcttatatgtttaatttcattattttagagatatttatatttaggatgttaatcaatatacttgttagtaaatttagatcctggtaaaatattcccaacaagatcaaggtatttaaggagttataggaaaaataatgtgtgtagggaggcttatcatgggttaagaatgaagagggaaattaagctcaatggggtgactaggggataaaaatatatattggttaattcgaaaagctcaaagatccaaagatggcctaaatcatatccttaattaagtgttctctaggattttgcctcaaatgaaacattaaacaattctagagacttaagctctcttaagaatctaactcgttctaggaattcaaaatagatttggtcatgctatgcacatgatattgggaaaaacactttcatcacaaattttatcacttcaagaacacttatgaacacaattagccaattacacaacaaaaggcaataaaaaaaatgaatggatatatttttttttttttaaaaaaatactaattaatcattgagcacattgttaagagcacactaagcaaatgaaatttcctcactcctacaaaaatatgacaaaatcaacaaaatgactcaaaaataaaaagtaagatgggtgactcaattaatatcataactaagcaatcaacaccccacactttgagaggtgcagtacctactcaacacaaaaaaaaaaaaaaaaaacaaagagtaataacaccaacaagaacaatagttacaaccaccaacccaatacataaaaataaatataaagaaaaataattaaatgaaagtaaattggagagtggagttgagaaatgcttagtcaatattaggctgaatcaggcttgagatactttttcaaaatagcctcatcaaactcaaattacaaccaacaagatgcttgttggatcttgatgtagcaactaccataacaaatactcatagaaatttccttcccaagcaacaaaagggatccctaatagtcaccaaggctaaaaactaaccaactctcacaatgcacagagcacctgacaaaatatatcattctaacttgaaaatacaaatcagtattgtgaacttttggaaaggtgaga

SEQ ID NO: 231885 - DNA, 1187 bp, Cannabis indica
catgaatggtttattccgaagattgctgataatttttctcgcctcgaccaacttcgtgtgggcatggatatgatcttctcatctggaaggatgccattgatggcatattctcggtcaagcttgattattggggatcacattaagccgagacttactgataaaggaggtcatttggagtagactttggaaagctccaatgcatgaaaggatcatgttgtttctgtgaaagattggaaggacatacttccttgtggaggaagatttcaggctctttacggaaatgaggtgaggggtgccttgtattatattgaagaggactcctttcctcatctgttctttcggtgtccgatagctcgtgattgctggtttagtagccaatggggcttgagaagtgagcttccgtactttaattcctctcttgagattattcagaggatgtttttcaccaaccaagaagttgactcgaatggtgggagcacaagcttgtttttccaatttgctgccttactttcttataatctgtggttggctcggaatagagtgtttcatgagggagtggtggaggccccaaatgttactcttcaaaaggtgaggaatggagttttagagtttcgtcatacgatgtctgctgagtcattgtaacagattgaggttggtggtagtagggtaagatgatctcccgcccctggctccagtgacttcaatgtgtttgttgatgctgcggttcatggtggggaggcctttcttgctgttttagttttgggtagaaaatatgttttcgttttgaggctctttcagttaaagttaggttgtcttcccctctcgagacaaagccctttgctctttgccatgctcttgcctgcgctgtagccgtgggtgaaggtccacaaatttctactctgactgccgcgaattggtgttggctattgatgctaggaaaacacatgttaaaacacttactaatgtttttctatctttgtttgagttgttagatgattgcttttgtaataatatttttggattcctaaagttcgaacattgcaacttgtaaaaccagtgaacttatctatgcaattctaggaggacacaattagaagaattgaatcacaatactttgcaaaagttggcaagtcttgatttgaagcatagtatttagggaaaaaaacaaaaaaatacaaaaaaggaaa

SEQ ID NO: 231886 - DNA, 637 bp, Cannabis indica
tgcaaaattccataatgttgataatttgttattacaaatcatttcttgttgttaagtttgattaaaataacatatgtcatcaccattagcttaaaacaagttttaatcaatgattattagaaaataaattaaaatatattttacatattaaatattaaatatttcaaaattatatagtaaaattaaaatttaagaaaaaagaaattatactttttaatcttgaaatcaagaaaaaaaataattagtaaagaaaattaaatcaatcttaattttaagaataaaattaagattgggggttggggtggtggactccatgcgtgagttggggtttggttagggggtttcgatcttgacagtctagtatggcgattgtggagtttgggtcgagtttctaggcatagggcagtagaaatgaacatatggtctgtggtggctaatgggtgggactttgtttgggtcgcggtggagggtttttgtgttggttgtaatgtcctacaagtttagacgtgttactgtattttttattttagtaactatccttagtggaaattatgtaattaagagattaaaaagattagtgatataagcactagtgatataatttccaaattaccgaaattttattgaattctaggtg

SEQ ID NO: 231887 - DNA, 771 bp, Cannabis indica
ttcatgagtgattctaatcactttatcaaaaaaaaatatatgcatgtaatagttgtttggttaatattaaaatatatatcaagtattaggtaggtgtgcgtgtgtgtatgtgtcaatatgacatttaaagaatattatctatatatatttattaagtagtgatatatgattaaaatagatagtgaggaatcaaattagttagtttaaaatttaaaatttaaaatgtgttagcataatttttattgtgatggttagtcttatacggttaggagtatatatatactattattattcagttagtatacgagtaaataaatatagatagaaaccctagcagccttatatctatcgtatccttttttttttctaaaagtattacattttttatatcaccaaatagataattctaatcttgaagctttagagtcaacaatcagccacttgtatctgaacaccattatttcacgtcttctgaattgagcaataatttctttaggtattaacgataatgtaagctaaattcgtattttttttttaattttcattttcagagaatagcctttcataaaactaccatatctctctcctcatatgtctgtttttaatgatctaggtactgttctaaagataatttaaagatatacattttttgtgtagagatttttctgattcttcctgtgtcaaaaattcatatttttatgctagtggttgaattatagtttttccagtattttcttccaatattgcctcagtaaaagtgtgatatctctc

SEQ ID NO: 231888 - DNA, 1298 bp, Cannabis indica
aacaggctccaagggcttggtttaacttaagatagtcccttctacactatggctttcacagttcaagggctaatgcatctctcttcataaggttcaagaacggtcataccacttatgtgttagtttatgttgatgctattcttatcactggtagtgacacagctaaaatctctctattgatcactcaattgaacaatctatttgcacttaaagatcttagtgacatagctacttccaaggcatccaagtgacaccaacagaacatggtctccatctctctcaaaccaaatacatcatagatgtgatatgcaaggtaaaactacaattttccaatagcctaactactctcatgattggaggggagaaactgtccagctttgggagtgatccagttaaagatcctcaactttatcaaagcccggttggtgctctgcagtatgaaacactaaccagaccagaaatcttaaatgcagtcaacaaagtctgccagtttatgcactcacctctcaaataacactagaaaactatgaaaagaatactaagatatctgaaaggtactcttgactatggccttgacatgtctcactcaccttctctggacttagaaggcttctgtgatgcagactaagcatcaaatgttgatgaaagattatccaccacatgtttctatgtttaccttggttctaatctaatctgctggtcctcgaaaaagtagcacacaaagtctcgatctagcaccgaggcagagtatcgaagcctagccagcctgactgctgaaatcacttggatacatgccctcattggtgagttaaaagtccagatccctcaaactccaacgatctggtgtgacaacctcagcacagtgttgatgtctgctaacctaattaattttgcatgctcgaacaaagcacatcaagcttgacttatactttgtcacggataaggttctagccaagacacttgtggtgaagcattctctctcaaccctaagtttgaggggggatgttaagagtatatgttagttatttctgttagtagttagaatcggttaggagggtagtttggtcattatatttttagctctatcattatacttatataagttgtatctttcacttggtcaatcaatgataatctatttatgtcaattcaatctttcttaacaacaccgacataataaagtcttaataaaattgtatttctcaaaataaaaacactaaattagatacaaggccaagattagtggccaaaggctttaaccaaagggaaggtattgacttcaatgacattttctctcc

SEQ ID NO: 231889 - DNA, 1402 bp, Cannabis indica
caaatgatgcaacaattaaaatcagatatgtaacgtgacaagcatgtaagatattaagaagaaaaactacttactgtttgaagttagggtttggggcgatagaaagctcttcggcctgtgaatctttgaatgtagtgaggatctctttgagaatgtgaagtcggagaaaacttgcagaaaaaatgttaaggatagggatggcatacaaattctcaggcaaactcgatgctgtttcttagcaaagaagcttaagagtttctcaaaatttctaaaatggaggaaataatgaaaggtggttccttttttttactttatacccttgaaatcagtttcgtcagatcagagagatctttgatcctatggacaaaattcaaagtagaagtggaaaagatggtcatttaatgctgatgtacctcgaaactgcaaaaccgccaaaatcagaggacatgcattttttcaaaaggaattatgacaaatataccctttgtaatcattaaaaagcactttttaaggggcaattgttatacccgaaattcggctagcacatccgagaaaaacacgtgtcaagctgggaagaatacaaagtaaggcatgtaattataattacatttgaggtggaataactcgttaaaaacataattgacagagtatatttagaactctgttgactaaatagtcttatgcaagataaagatatacaaaccgttgccttgcacatcaacgagaaaccatgtaactttaggtgtataagacaaggcattaacctcgattacgtggatgagatatactgactgtgaagacacttagcgtataatatgcggtatacaatctaattataacagacgggtgaaccaaagcaagtgattgtgaggcgtccacctcgccatatgaagacatgcacacgaaaaagatcacctcgtcactaaaaactgcgattgtcagatagggtgttatgttcccagagtaaaagcgacgagatttacattatcaaccttgaaaagaaatagggaaagctccagctcgctatcaaggttaccgctgctttatttccagcgagacgtcccagaacgatacggtttacaatgtatttaatacacgttttattttgacccagtaaaagcggactagtaatcacatctgtgtgatattcaaataataatcgcatttattttacgtaatatgtaatcagactctataatttcaggggataatcgttgtaaaaatatcaatcaactcagtaattaactgcctactatgtgattataaatagaggcaagatagactaagaaaggggcgaaaaaattcataagaaaaaaggccctgaaaaaccgtcaaaaatctaataaaatagactcgtggagtaggcagaattttaacatcaaaaccacgtaaaaaacctttg

SEQ ID NO: 231890 - DNA, 773 bp, Cannabis indica
ccggagcatgctagtttagttttttgctcgttcattgcgtctttgtggtctagtttggattcggaatgtgctcaatcgtggtaggtctgggtctttagcggaattgctttgtttatcttttttgaggtgcttgaccagaataattttgctttgttagctatgttatggtggtggttgtggtatgataggaattttgttttatttgggaaaaagcaatctagattggaagtgattgatgtgttagctaaggaagctttagaggagtttcatggtgtgggggtgatttctgggggtcgggttttgggtgcttcggcggctagtgaggatgggttgggtgtcggggttggtggtgttgggcaggggatgccgaggaggggttgtggtgaggcgtggaggggtcgttggtgcccacccgtggtgggcgagtttgtgctgtgcgtggatgcggcagtcactccggggaggggatttgcggggtttgggggggttttctgaggtagtgagggggtggtgttggcggcttgggttgtgggcgctattgggggctttcaagtgacggtggcggagctcctggctatccgtgtgggtcttctgtgggctacaagattgggattttctttggtgcgggtggagacgtactcttctgtttgtgagttcttggattaattgttcagataatattcttatgtttataccaattgttgaggagattatttctcttttagctgctattggtggtggttcttgttatgccattttgcgtgatgcaaatg

SEQ ID NO: 231891 - DNA, 665 bp, Cannabis indica
ctctatatatatgtaagggaagaatttaggtattcaatgtattgagtagtcactctttcaaatgataaggccctgatactccaaactcaagaacacaataaatcagtagccaaacagtaggaaatgaattatattgtttaagacgagaaaagccaattacaagctatgggagcccttaggcccttttgatgcaaagagtgactactcaatacataatacattgcatacctcaattcttcccttacttaccgatatatagaacctattctcactcacaaacccaccctcaaaaccaaatgactcaaatatcctgtttatttagtatattctagctcaccttactaattctaaggcctacacaatcagatctaaccattatatcctagctccattctcttccatgtctcttgaatatcccagagcattggcagcagtaaattcctatcagaagtctgcctatgtcggacatgacacaaggacccttactactacatcaatgccctggggactactatataaggggctctccactacacttgttgatgctttgaacagtgacttgtatattgttaaagatgagcttttgaaccaatgattgggtcctttttttcttttctttgaatacttgcaccatcaatagaagagaggagagggccctctaaaag

SEQ ID NO: 231892 - DNA, 1087 bp, Cannabis indica
atacctagtgggatcataggcatcctaactttaggggtacataaccaacatcagtatttgtttcctcattcctaatttttgggttttgatcatgattaccttggctccttcttcaacgtgttgttgatggagtgggtggcctttgtgaacccattagttctttcccaggacgacaattagtcttttcaggatgactattattgttttgattatcatcagccatggacaaagtttttgttggctaggagggatttttttgaatttttatcacgtaggctctcaatgaaagcaccaaactggtaacgtagatttttgttaacgaataatgagccttgttttgtaataaattaaacacagatatatataagaaaattgaaaagaagaataatagtaataatgacaccaagtattttacgtagttttgcagttaaatctgcatagtcaacgagtctatcttattcaagatatttctggatacaaaattacagtttgtgatcttttctttcaaagatttttcctcccttttttttttgtaaaatctgcccctatttataggaacataggttggcaactatttacattaaatttgaattacataactattttcacgaaatgtgggctttgatcacgttccatttaaacacgtgtagataatactagaaaaccacataaccgttatcactcctatcttctaggcgatcgattctgacatggataggagcatctcgctaaaggcatctcgctttgtacatagatggccaataatgatttggtttattcatatgcctttcagtaatggcatgagcaccagtttactgagcaaacgtaagaactgctctttgaccatagggccttgcagactggaaaatcatgtcctccatgtttccaagttgttacacttagttattataatgtgaattatacggtaagtgttccaataactgatttgtctcgtcagtatttccttatatgtagcaaggtggatgtctcactatacattacgtgtagtttccttgtgatcatacttttcgaggcaagatggtctctcttcaatacaggaatttatagtttgtgtatccttgtctcg

SEQ ID NO: 231893 - DNA, 2410 bp, Cannabis indica
ccataaggaagatgagaattttcaaaggcactagcagcaatcaatgaatccgtctcaattttaaaaactgaggtttgtctctcctttgccatccgcagtgccaaagtaatcctgagaagttcaccctccaacacacccctgactttagtccagccgaagtaaaccagagactctcccacctctgaatcattagtctggattgctacaaaaccaacaacatcatcagagatggaagcatcaaccttgcagcaccaaggcacattcggatcactgaaacctagcccagcattccccatttgatgagactccattctatgtttgtcacctagttcaaactagattgtctttgagataaaatcccgtgttcggtgtataattttcctaaaaattacccccatatcatattcttgtcctttaaacacacgatcgttacgccaattccaaattgattcacacagaaccacaatcatcacctgcaagttcagctcattcagattacaccaccatattccaaactctatcagattgtccttgttgcactcttgaatcctaatgccaatccagaaccataatgcccacatgcagttacattgacaaaaccagtgaaaagccatctccacttcaaaatggaaaaattcacagaattgttgatcagcctgcagaaaaccgaggttgcttctagtagggagtaagtcactgagtaacctctagcagaagtgcttcagtctgggacgcatctcggtccgtcaagatacgagagatgattttatagccaaaattgcagaggctcatgggtctaaactgatctaatgtagcagcattagcagtattaggaatcagacttataaatgtctcattcactctctcctacattcgcccagttagaaaaaattgatgaaacatcaaacgaaccaaatctcctacaatgtcccaatactttcgaaagaaaatacatggaaattcgtcaggtgtcggagctttgaggggatgcaacttaaacaccacatccttgatctcaccttcatcagggacacgacagatttcttcattttcactttctgtgactttttcagtgaaaagggactccaaatcagcgtctatgtgagggttcgaaaagcagaacatggcctgaaaacagtcctgaaagtacttcccaatatcgccccttcctcttatccactgcccctcgccgtccctgaccgcaccaatgtagtttcgccttctcctggtcagagtgcacgcgtggaagaatttcgaaatttccatcaccaaactgaagccagttctcacgagacttttgtcgccaaatcctacccattttttcctccatgtcaaggatttccatttggatttctgcttccttagccaccatagaatgagtgatagacatcttttgcacactctccaattggtttcgaaggtgtctcagatttttatcacagaagtcgaaaacgttctggttccatagcttcaactctttcttagttctccagagttttctaggaagccccatttccctctgattaacaaactcaaccttccaggcactgtgaatgacccttctgcaatcttcacttgaattccagacctcaagaaatcggaaggggtaatttagtttcaaagtgtcaccccaattgtccaataaaataggagcatatgatccgagcgaataatatgatagttctgcacccgggaatttgagaaagcaatgcaccaaactccatcaacaataaatctatcaagtcttttccgaatacgattaggtgccagcctcgaattctgccaagtgaaaatgccaccatcactacccaggtcaatcccaccacacttaacaaaaaatttctcaaaaattccccttccctagcatcatagtctctgcctcctatcttttctgtatgatcaagagtaacattaagatcacccacaagagcccaaggatcattacactcactcactatctctgtgagccaactccagaatccccttttagaggcaccgtagggggtgccataaacacaaaacattttccattccgcgaatcccatattagcttgtaaagacactaagaaaacaatttcatacgtatcaacaacattacacatcacacctattctccaggcaatacaaaatccctctgcaaagccattggtcgggatgcaccaatgattcacgaaccccgagcgattcatcacagtacccatagcctctatagtaactttagtctcggaaagaaaaagaaaattcgaatttgaatcgtagataagaccccagagggtcctctctgccgtggatcgtcttaatccacggtagttccaagttaggaacctcatgaggacagtgggggcatgcttccggccgcctcctcgctgcttccaaaatattgaatgctgctgtaatatcccagaaaata

SEQ ID NO: 231894 - DNA, 6512 bp, Cannabis indica
ctcaaatatgtccgtagtatgtctagttgatgtcgcaatgcaagttttggccattttgcactaagatggtctcgaaaactaaaaccctagttgaggaatctcaacttgggcactgggtggaaaccctaggtgcctaggttggctttcgtgttacagattcgtgtaatttcagctcttggaccttggattaggttgctccatgtcttcatggtacagaatactgaaatatagtgggttggattcaagttattgaagttcaaaattccatcctggagatctcagagtcaacttaggcgcagggcgagggtcccgtctaggttgactactatgactcaggtatactcaattccgtgacatcatccttcatgccacgtgtcaaacattgatgtccacgtcaccaaagaaagtttttgggttaacattatgccttgtaattttgaatttgaacttggaattattattaattgtgtttatgttatgagttgagtacttttgagcatgggagtggaatttcaggtcatttctatgtatgttgttattgtggtagtttgaagagttgagcatgaggaattttagttttgtgttcttaagcttgtatgatttagagtatttgaatcttgttggtttaaagtgtttgagcatgtattttattgcttgagatgcccaaaaatactttggtttggtgtagaaatttattgcttaagtattggtaagtttggggttgtgatggcctaagtttggattaggcaaaatcaggtttttgggcattttctaggttttgaacatagtggtcgcgatcagacttcagatggtcggactaggctcaagaccagaacaggagttagccccttgccaggccttagtcgcgaccagccttgaattggttgtaatgataattggtcgcgaccacatggcgacaatagtacaatttttgtgattttgtttagtgcataacttttgaccccatacttcgatttggacattctttatatcgttagaaagctcgttttgagctttattatatggtccagtgttagagtcttatgtgtggatatttatgaatgtaattttttgggtattaaccctagtttataaaacctacaaattatgactaggaataccggtgcttggttaaaatcacgagtgaatcaagatttttctacattcattgaaaatctagtaagacagcaaactaagcaaataaaatatagcgcagtggcacagttatataatattcgactgttattgtgaaatcgtgacctagggttattgttctaagtgtgtattattattattattattattattatgcaataatttattaattgaatatctgagtagaattatgcaggtaaggtataactaggttagagtcggtaattataaccgagataaaccctagtaaggcctcaaatgtaaagagacattgagcgtaacacgtaggtctatgtcacattacattgacctcaaatgtaaagagacattattatttatgaaataatgtgatatatagtgtggtgggacagtatatacgcagtgatgtactgtatgaagtataattattataattgttcatactgtattattttctatgggccttggctcacgggtgctctattatgcaaacaatcgtaaagtagtgtcgagtcagccatgagattgagggctatgaggatgaattgtacatgtttcgaccaagctagaccatgagggttgggtccaatagggaattgtatagaaattctattttgccgcttagttcgacctatacaaaataacttgtaatattttgaaaataaatttaacgggatcctagttatgcaaccttaaattattttagtttaaagtaaaacatgtgtgtttattgcaagttatttatttaattaagtttattatttatttcaaatcacttgatttatagatcccgattaacgggattagtagattataatcatgacacgtgacgttcctctaagtaggacggtgagtcccctatttagaactgcccctccttagttctgactgtttcgcgcgaactcactcttctcatttcttcatgtttttccttttccgttctgctcctctttgttatccaagctttaatctgctgttcaagctattccttttaataaaacaatgcgtgttattcccgccacatcattttattagttttatccaaaaaaaaaaggtaaaattacttttatatcccattgataattttggtcacttacataaaagtaatgtttcatgccacatgaatgagataactaaaaaaacgacacatagacaggggttggttttgtagttgccagcgtggcaagaaaaggcaaccctacggctaataccacacagccattcattgagaagaaacgcacaccataagtattacataaaacacaagtagttttagttttactactactactactagtagttggtgttattgacttttcatttttctgaacaaataataaaacccatttaaaatctatttctatattctattcaacgataagaagagtccaatttccttggtgcaaatagggttaatttaggaagtcaagcaaaaaataaaataaaaaaactaaatggttagtatttgaaggattttgtttccctagagaaagaggaaaagaaaaaagagggtgttgttgttcttcattcatacgtttaatttcccagtatccaaaactaacacaaatttttattacacacaatacacaaacgccctttctctttgttatcctaaaaccaaatctcttttaattttctctccaagtcgctccaaatacacaaaaccctaaccgctgtaatcttaatcctaatccctttccctctctcacctcattctcattcctttcccccttctctctctctgtgccgtttttctatattcttctctcaaacgtttcggctatcccaaacatttttattttccttttcgaaagtttaaccgcaaacgcattggtttcgattcagggcacagagattatcgggacgatttcgtttcttcgccataatcgttaatcgaaccaggtagggttagttctccgcctctttttccctattgagtcaatttacttgtgttgtaagtctttggcggtgtttttgttttcgttgctcaaaccctatgtcctctggaagtgaatagaggcgcatgtttgggttctagggtttccatattagtggattatttttcttctcttattttttaatataaatttggacttcactctctgatttctctggatgcttagggttttaatttgattaaaccagtttctaggagtgaattgttattcgagaatattgggtagtcctttgcctaatttgcttggcatatctgactggggttttctatttttatgttgggcatatatgagagtgtcgtgagttgctagttatcatccccaaatccatctttctttgaagatggaggtgtagtgggttccttttctctccattttttccctttctgttattgtcgcctctattgtatcttgttcttccattgcctttattctcatcttctgggtaaatacatcgtgaaatttgtatttggtcgtcaagtgcatgtatgtggaggaagaacacttgttactgagaagtaccatccaatgtattatttgattaatttgaagtgattgcaatacaagttggctcacatagggataggaaaaaccttggtggtgcttggagttgagggttactttgtttgaaggataacgtgttttggtttccgggttagcaactgtgggaacattggttgttcattgattgttttgcctgagataaataaaccgtaagtatcccgtattagttaatttgtgtgcaattgaatgagtgtgttgctagttggctttgtactgtgaagcaaaggttgaagtcataattcagttattgtttgtcgaatcataccaatttgggaaagggttgaggttgtgaaattggcgagagcgtttctgttgtagtatctgatcatgttcagtgctccttatggaaagaagtgaacccgcgttagctccacaatggttgagaaataccggaagtgttactgggggtggcaattcagcccaccactttgcgtcttcttctcactctggtacactcttttttcttcttcagagtccatgttacatctaatactttgtggtttattggtgattgtggtaatgtatgattaattttgttttctcttacatttgttatgtagatgtttcttctttggctcctcatgcaagaagtagaacttctaagatcttaagtgaacttgaaactcgttcctcttttcttgaccggtcttcctcatctaactcgcgaaggagttcaagtaatggctctgctaagcatgcctatagtagttttaacagaagtcaccgtgataaagaccgtgaaaaagaaaaagataggtttggagaccattgggatcgggattcctctgaccccttaggaaatatttttaacagggttgagaaggacacacttcggcgttctcagtctttggtttcaaggaaaccaggtgagcaattgtctcgaagggtttctactgacttgaaaatctctagtaatagtaaccatagcaatggcaatggcacactttctgggggtcttggttctagcatccaaaaggctgtctttgaaaaggactttccctcactaggaactgaagaaaggcaaggtctccctgatattggaagagtttcctctcctggttttactacagctgttcagagtttgcctgttgctaattcttctttggttggtggagagggatggacctcagctcttatagaggcgccaccaaagaacggaagcagtggctcaggatcttttaccgtgcaacaatctgttgcagcagttacttcagggtctggtgctccaactgcaatggccggtcttaatatggctgaagctttggcacaggctccatctcgaactcgtgctgcaccacaggtaattgagatagtcatatatgcctttatctaacaatttcatagctggtccgagtttttttccttgaaaaaacattgtactcattaataatctaactattattataatattgattgtttatttggctttctagttgtctgtcaagacacaaaggctcgaggaattggctataaaacaatcaaggcaattaataccagtgacaccttccttgcctaaaacattagtaagttgtttgcatttgataactgtgatagcttgtttatatatgtcttacttaattgttgaatattgtttgttactatttctttttgttgttgttgggtattgtgttaaaattttgtaacattatagtattatgccattctgttatcctgggctggggtttaaaaacaataaccaaagtgcgattaaagttgctactttttgtggcctcttgtttattctattaacaaaatttcctggtgattatttttatttttgaaaccaaaccttaggtttgtaaatatgtaaaattgagtagcttctggctttcatgactaggttctggctttcacgagtaggtcttcttatatttctcctagtaatgacccaagagatttgttgaattcaagtttatgagctttttttgttgcagttatcattcaagagcatctgttttttagatttcctttttttttttctttttttgccgaaagtttattattgctgttgttattctcaattcatgacctgtaagcacgaatatctaataatttttgcttttgcttttgcttttgtttttgtttagtgggattaactgttgatcatagagtatagtgcattttgaacaatgttagtgaacatatttatgtttacatgctcgtagccttgtacggttgcctaatttgtttctataaactactctaggatggctccagtagttgttacttactagtaagaaagaacttgtttgtacttctagttggagaaattacaatagagagtcaagacatagttttctttttctgtcataaacttgtgtgtttttataatatcttgctagcatattattaactaacttactcatcaattgttggtacgagaaatatatgtcaaattcttcagttcatttaattgtgtcctttttgtgttttgttttttgtttgttagccccttcatattttacatattataccaaaacaacttaaaacagaagaatgtgtgaacagtttatgtcatcgtattgtaccatagatgctgtaacttgctagttaaacaaataatttgtcttttttttttactttgataaatgtctggatagtttttttcttctttttgttggggttttatacctgcatgttaccttcagcatttggggtatcattcttgaggtgtgagagcaagtatttctttcttatcatttgattctcttgtaatttgagatgtgtactcccctggattacttgggaggcaagattggaatgtatcttgaggttaattgtttgttagatggttgtcttgcagactactgttttgttgttcattgttagaggtatggtagcagcactctctctctctct

SEQ ID NO: 231895 - DNA, 896 bp, Cannabis indica
gattacattgaaatggagtcttatttagggcataaaaaccaacagctcacactaagcagggtgctatattacccttgcttccgtacttcaagacaattgcagattactaccacctctgcccgacccagttcactcctaagggcatcaagtacctatctgccttgttcatcctctatgcctcacaaggatggggtgagacatctacgcatgataccaactggctctttgatttgaaagcgagtcctaacaagagtaggttgggatatttctacttttcctagattgaggagaagtggttgataggcactctacactccgaggttagcaagatagggaactttgtggaggagtactactttgcctagggaatggacactgtccacactcagttccaggagatactgtcgtactgccgccctcccttcacattggggctcaagaagagggcacaaagaattcttgaactgccagaagctgctcgaaacatctttcttctggccaccgaggccaattttgtcaagtacaaactcttcccaatatactttgtgtcgagggccatgaagaagatgaaaaggcaaagtttgactaggacaaagtaaccaagcaggagagaccaagcaaaaggcggaagaaggttcctccgaatgaccaagcacaagttgagcgtgctatcaggatttgggaacctgatagacctttctagctccacccaagtggaaggaaaaggaaaggtcgtcctgacagagaaagaacaagaagactctttagacgatgaggctccttccttacttgttcgggagaatgctcttgctcatgtgcagggtattttaacttgtagttttttgttccatgacatgctttacattatatttgcccttaactttcttgtcttattt

SEQ ID NO: 231896 - DNA, 1135 bp, Cannabis indica
tgcttaaaacgagtaatacaaccagaatttaactttgtttccataagaaacaacagtggggagtttgctcacgaacaagcaaacacaaggcggaatgcactcggattccccaggccccgtgcattccaacttacgatattcatgatgattggcgggattgccgagcaatcaccgctgaatgatcctccataccagcaaaatcagcaccagaatctgaaacttgcaggtgagcagatgcttcaactgaggagggagaagcactttggacatttgtagcacgacatcgtttgagagtttttcgaagagaaagattatcaaactgtctcttaaaggtcttgttgggatgtgtattctcctgatcaataaaatcatccatgtcatccaaaggggaagaaggctgatgagaggtaatggttgtagcgatagccttgccagccctttttgaagagaaatccatagtaatattttggcactttgttacgtgatgaagagtggtagttggagggtatgtggcaaaggtatgatttgtagatgatgtgccaatgtcaggagtataaacatctttaagatgaacaacagcagaatcattggagacaggtagagtgtcaatagcaggccttgtagtgtttgcaccagtaataggaatattatgtattgcagcagtaggcacatgtgtagtcacaactacaggcattggggaattggtgatggatgcggtcggattagttatttgagtaagaacagaggaggcaatgagagtttggttactctgatctgtgttagaggattccccatataagagtggatgcggatgagatagaggtctgttgtttaactgtgggagagtagcagtaagggtagatcgagccaaacgtgtcaagagaggccaagcacttcctttagagaaatccgatctgtaccgatcataactagaagtaggcaaaggagcacccttgagagttggtctgtaagccagttcagactcaatcccattatccatattttcaagatgcacaacacacttgttaaaaacatgtccaattcgtccacactccatacagtagtccggaagacgttcataacggaattccacccaaaattcatctttaatattgggaagagaaatcattttccc

SEQ ID NO: 231897 - DNA, 1673 bp, Cannabis indica
aaagaagatcaaagaacttgaggattctctcaagtccctccagactgatcatgacaaaaaacttaaggaaatggaggctaaaatcaaagacagggtcaacaacattggcaggaggaccatctaccaaagctggtcgactaaccttgatttgtattttagcttcttgggtgataatgtcgatgccatgcttgccttttgcgagaagacaaggaaagatgaattgggcgaggaagaagaggttgaagtggtactagaagatccatccaagtctcctacaatgtaggcttggtttttaagttgcatttatatatatatatatttatttaggaaaatggtcatatggctgagacaatgagcccattgcaacacttttgtgaagaaaaatttgcattgttggatggccaacttttctttttttcttattttttatttattgcctcgtatttctgcattcgaacttaacatatttacttgcgtttttactcgcaatttaaacaattatattttgatcaaatctaaaatactttaagcctttccagtgctcttattttcctttgatattgtttaagtagttagtaatctactatgtgcgcgagcaattattatctgctacgctttcgatttgtaagtagttatcaattctgcttcgcgtaaacaattatgatctgtttttaaacaaacataaacatacttttaataattcatctcgtaaatcactttgtatatttttgattgcatgtatgaatagttaagccttctattcacaccttaggttaagtatttttttcaaggcatcttggtgcctcgttttaatacattcctataaaatgtgagtcgttaatatttagcttcgcatgtagcttaaggttgttttatgagttaaatctcatttacaactgctacttttgactttccttttttacgagaaaggttctttaatatcaattatttgataaaaactttaaaattttaaagtggagtggatttgcaatatatcatgaatttccagatagactacggttaatcatacacacatatatatgcccctcaagtaattttaaagaataaaactttgtaattacttgaatagtgctttagctttattaataattgaatttcaaaattacatcagaaagagagattacaacattagtttactggtagtagggttgtaaatgctcaacattctagtggttccttattagtgagccgttaagccgggctaatttataaaccctggttcccactattacctcgatcacataaggcccttcccagtttgggttaaatactcctacagatgcatctctcgtgtttgcaaatactcgccttagcaccaagtcactaacgttaaagagccttttcttcactttcttgttgaaatatcttgtcactcggtgttggtatgctgcattagtaatttgcgacttagtacgtttttcctcaagtagatccaaggataatttcaagagttctcggttttcttctagattatagaaatctcgtatgtgggtcgcaatattgacttctactggcagcattgcctccgagccaaatgccagtgacaataaagtatgccatgttgttattttcttagttgttctgtgagcccaaagtacttgtagtagttcatcaacccatcaaccttttgtagcgtccaacttctttttgat

SEQ ID NO: 231898 - DNA, 1031 bp, Cannabis indica
attaaaattaaaacaaacaaaaatcattaaaaaaaaaaaaaccctaatctcctccaccctttcttctgcctccctctactttattctctttgcagctcacggttgccataccagacaagccacacgctgtcgctggcggaccccaaacccccttctctaaccacctcgcactctatctctctcccgttttaatctctctcacactctctttcccccattcgctctttctctttctcatgagctgtccaccccaacttcggtcgagatttttctggccacacgatggtgtgataaatgccatcttcaaacttgggaccacccgaaactcccaaccctatatcttagtccttattctgttgtcttttcatcgttgtgagttcctcatcgaagatcaggtcttcgtgtcattcaagacatttttttaagcaagtttagacttcaacatgagatcttgtcggagacactcatgtttaggtctgatcgacccaccttcgtacccagtacaggaaaataattttgctcttgtgctacccttgattagggtttatgccctaaaaagcctatgaagacatttctgtttatgaataagagttgaacatttttatatatgcttgaatgttaaattactaatatttgatattcaataatttatatatatataaatgttaacccggaaattgatctcggtgatgtggacatcaatattttacacgtggtaagaatctcagagttgagtagtcccaagtcatagcagtcgacctgagaggggtccctagccctatgctcaggttgacttctgggaactccaaaatgggtgtttagattttgccaagttgtttccaactcactatctttcagtattatgtaccataacaacatgaagcatccaaattcaaggatcaggagctgaaaaatacacgaaacaacaccatagaaattaacccgggcacctagggtttcacctagcgtccaagttgacaaccaaagtagggtttcagttttcgatgttgtcttagtaaaaatgggtcaaa

SEQ ID NO: 231899 - DNA, 1067 bp, Cannabis indica
ggaacagaatactttaatcgcatcttgggaaatttttttaaaagaaaaaggtattttacatcaatccacatgcctgatactcccgaacaaaatagaatagtagaaagaaagaataaacacttgttagaagtagctcgtgccatgatgtttccaaaatatttatggggggacgctgttcttactgcatcttatttgataaatagaatgcctactaaagttttacattacactactcctttgaaatgtttcaaaaaattctttcctacttctagaattaattcagatttaccattgaagatttttgggagtactgtttttgttcatcttccaaaaaggtctagatctaagttagatcctagagctgaaaaatgtattttcttaggctatcctccaaataaaaaaggatataaatgttttaatcctatctctaaacgcatctatattactatggatgtatcttttgctgaaaatagtccttatttctcaaagaattttgttcagggggagaattcagtggtacaaaatttttgggaacttgttgaacctttacctaagactattcttgatgtttctcttgagaaaactcaacctacatctattgaatccgaatctgatcttggtttatcagaaacagaaatgctacgattgattaaaaatcgtaatgttcttgagcctgtggtttattcaaggaagaacatctgggaaagaagtagagaccatccaatcatccctgcacaagaccaaatggaagccccgaacaatggttcttcaagtaccccaggtaattcttcttctattcctagttcttctctgtctccaagtaatattttgtcttcacaatctgtttcaagccctacatctgaaactctagatcttcctattgctcttagaaaaggaactcgtgcttgtacaaagcatccaattgccaaatacatctcgtacaatcacctatcagataactatagagcatttattactaatatttctgaacctggtgtgcctagaagtatacaggaggcactagatgaaccgagatggaagttggcagtggatgaagagatggatgc

SEQ ID NO: 231900 - DNA, 1165 bp, Cannabis indica
atccttggacttatggttcatattagataaaaactattttatcagactcgcttccacttttctaactctgatatggaccataaaaacaccaagctactctgaggcgagcttaacgatgaagtatcccatcgttttgggctgagctccaagatcaaattctctgtgttcatatatacttctgtctgtttctctttaactctaactctcatctctttgtactattgtgcgtatgattgtgttcttgatattgtgtgtgttttgatttctatttcgtgtgtgtgtgcaatttgtgagatcgttttttcaaaccctaggattttctctgcagggagaagacaacgaatattcgagagttttgtcttgaattgaactgagttatttaactcatattagggtttttgtttatgctattaggctggactgagttcagtttggactctatgtttttatttttgccaattttttgttgtggtcgcataacttgaattgcaaaaatactgtaattttgtttttgtattaattatgtaatcttagaattaggagctgcagattctaacatatatattgttaaattttacaaacttaatatgaggtttatgtattttaatttaacaaataaatttaaaatagctatattactactcataattttttacccttatacgatgttgaatacaacattcaagtttttttagagcagtctaaaaagattaggtaaaatacttctttagctaaatatatacctaaaacatgtaatataaattggttcattatcaaataagctaaaatacatatgcactattgtaaagcaaaatccttgctatgtagctaaggtattgatgtgagtgaaacattttttaatagatttttattcatttctctctctatatttcacatcacaaatataaatatatatttatttatataatatttaatgtagagaaaaagaaaataaagaagtgtaatgtatatgtgtgagttaaaattaaaaaaaaaagttttaataaaatatattaaagattagaataaagaaactaacgagcttgttatatatttattttaagtttcttatattttataacaaaattttatggtccatccacaggtgtgtcaatcttttatactttagacatttacataactttaattttaatttttttatatc

SEQ ID NO: 231901 - DNA, 966 bp, Cannabis indica
tcaacgagtcttttgctgatatattagactagacgatgagcattgttttcttctcttatcagcacgacgcttacagcatattcggtgacaactaagtatattcctaattcttcttcgtctagggattttgagaatatgggaagttttgcaagtagtctttttaattctttgaaagcattctcgcattcctctgtccattccaactttttattacctcggaggatgttgaagaaaggaacacacttgtctgttgacttcgaaactaatctactgagtgcatctttccgaccagttaagctttggacttcctttgtctttgttggcaatttcatatctaggagggcttttattttctctgaattagcttcttctccctgagcattgataaaaaaccaagaaacttacccgagctgaccccaaaagaacattttaagggattgagtttcatgttgtattttctgagatttttgaagcattcatctagatcctttatgttccccccagcattcctggatttgacgagcatatcatccacatatacctccatattttgttcgatctggtctttaaacattttatttacgagtctctggtagttccaacattctacaaaccgaatggcatacccttgtaatagtacagacccatatctattcggaaacttgtatgttcttggtctagtggatgcattctgatttggttataccccgaataggaatccatgaagctcaggatttcatgcccgaccattgcatccacgagctgattaattcttggaagtagaaaatagtccttggggcacgccttattgagatcggtaaaatcaatacatactcgccattattttttaggcttgggtactagtatggggttagctacccaagccgggtagaaagcttcaatgatgaactcattttcacgcagtctctctacctcttctttcagtgcttgcgctcgttctttgtc

SEQ ID NO: 231902 - DNA, 1952 bp, Cannabis indica
aacttttctgtctactctgagcagcgagcatccacactctaattttatcaccaacttcacttgtcctctgaacaactttgggacccaagaactttctctgacctacttcattacagtgaataggtgatctactttttcttccataaagtagttcataaggagccatcccattgttgccttataggtgttgttgtacgataaatcaatcaggggaaggtactttacccatgatccttcaaagtctaatacacttatccatagcatgtcctctaaaatatgaatcgtcctttcggactgaccatcagtctgaggatggaatgctatactacccatggctcgatgtaagctctcctagaatcttgatgtgaactttggatccatatcagaaatgatagactttgggacaccgtgaagatgaactatttctccgacatatagttctgcatactggtcaatggataaaatcgtcttaacaggtaaaaagtacactgactttgtaaacctgtcaactatgacccacacggagtcgtactatcccgtagccctaggtaatccaagtacgaagtccatggtaatgtcttcccatttccatttcgaaaggttcaatggctccagaaaacctgcaggactctgatgttcagccttcacttgttgacaggttcaacactttgcaacgtattttgctttatcgttcttcattccaggccactagtacatggacttaaggtcttgatacatttttgttgtccacagataaatagaataagaagttgtgtgagactcattcataatttctctcttaatatcatcatctatgggaacacaaacaccgttcgtaaactgtatcaccccattactatcaactatgaattcattagattttcaagctaaaatcttgtctcgggactttactaaatttggatcttgatattgtgcttctttaattctttccaggagagtagactataaagtaatgttatttatgcatcccataacaaactcaatgttagctcaggtcattttctctgccagttgcttggagatttgtttcattgtattcatctagttttaacctttcctacttagggcatcaactacaacattggccttcctaggatgataaaggatttcatagtcataatcctttactagcttaagccaacacctttttctcatgttcaggtctttctgtgtaaagaagtattttagacttttatgattggtgtaaatctcacatttatcgccataaaggtaatgccaccaaatctttatcgaaaatactactgctgtgagctctagatcgtgagtagagtacctctactcgtactcttttaatttccgagaagcataagctattacctttccagtttacataactacacagcctagacccaaaaagcttctagccttagtagctaatttttgttttgaccaatcccaaaaagcttcgatttaggctggatcgaccatgatgccatctttattaactatgtgccctaagaaagagacatgtgataactagaactcacacttcttaaatttagcatagagcttatgatcccgtaataactgatgtagtaatctgagatgtaattcatgttcataggtcatccacttagcattggataaaaaagataaaaaaaaaaggtgttgaaataaacatttttttattttatttttcaatcaaacaaaagaaaaggtttaaattcgttcgtttttttatcgacatgagtcttttatatcgaaaaaaattacaactcttcaaaccttattctatgatatttacatgagattcctctttcttattcttaaaaaagtccccgagaaggcttagttcatccataatttatgttttgtctttcgtttctttttctatttatttcgtagaaatatatcgatgactgttgggtttatgccctaaataaaaatctttacaatctgattagtaatca

SEQ ID NO: 231903 - DNA, 3084 bp, Cannabis indica
gattacaatgtatgaatcagtgtctggcagaacttaagtgttgtgttggacagcctagggtgctatgcaacctaggcttgggcgtgtgagagagtgaggaagagagagagagagagagtctaacacttggagaatttgagatttctagcttagaggaggcttaggcaacttaggctttcagctaaaggttaaggcccttatatgggaggcctaaaccctaggtttacaacttaaatcccttcaaaattggatagttagctagatatttacataagaccaaaattccctaaaagtctagatacttcttagcctgtttgttgggcttttggggcccaattcgtagcccattcttgttgtgcacgtgtaggagagtcttgtaggacctacagtgctatccttggctggccaggctgactgaccatgatgctgtttcctggcatggctagccatagagccggccagagatggttggctagctctcgagagcaagctggactctcacttgatctccgtttgagtgtcagggtcttcgttggctcggatactgacttggcctaccttttagtgagttgtactaccatgtggcacatgttctgtccacgtaagcatgccacgtcatgatgacaaaaattggaataacaaaataaataattaactaaccttacattcaatcaaaatgttgctgccacttgtgaaacttcattcagttaatcaaccagattttcaacccaaacactctaacaactaattcaagtgtacgtaatctattgtagcttaatactcacacaagtgaggtcgatccatagagaattgatattgaataccactaaattagatttatgtttccatttggtaaaatcgataataatattgagtaattaaataataaaaattaaaagatagtaaaataacaataaaaaagatgtaattaactatggatgaataattaggaatataaatcctgttgtttcagttacacaattgttaatgtaaattattaattctctccctttaagtgatcactgattatacaaataaccctaactctactctaatcattaaggtcctaaatcatatattatctacttgcatctctgaagtaaattaacgtataacttgcatcaattacataatctaaaagttacatagactatgtaaatactctcgttttacatctaaacctatgtatatttttctagagcattcctattattcacttctcagatttcatatttggatcataaatcacaataaagatggacaatctaaatcatgtagtttaaaacaaataagaacaaatcacacaatctaggaaagaaaaactaataattatgttaactaaattggagaaatatcaactaacattcatcatatccctaaattgagaatttagttcataaaactcatgttcacatccacaataaaaattgaaacaaaaattaacataaagaaaaaataaaaagagaataagaaagaactagttggtgatctggctctaagtcgccacaactgcttcctttacttccttcataagttctagatgtctatttctcagtatttagcttctaaaatacgaaacacttatataagaaataatttagatatcttagaatggaaaaattataaatctgtctagaaatccggtgtttagcccatagttttgactacataatacttagttgtgatcataggctaatctcaaaaaacatggtctcttccaagctcctataattgcgaccacataattcgtcgcgactatagtccaacttccaacttcatgagatttttcttccagtttgcccctacttttcaccagttggtagagtttgagctttaataccttaagaataagagaaatcaaggataaaaccattccaaaagataacattataaaagaaaacaacttcaaaattgattcaaaacacttatgctaaaaatagcctaacatctatctaattcatttaattgacaaacatctgcaagtttcgtaacaagttccaaatccatagtcagtatcactttttcactccagtcaacacaaccaatttgtcccaattgaccccaccccaatcgacaccaccagccaagcaccccaatcgacatctactatcaacacacaacaacaccaaccacggtaaactgcacggccaacccttctcatagccctaaaccaccacactcgaacctcaaagcaaccccacatgtaccttaagaacccaatcttagcccaagaaactccctctcaccaccacgaaagcactcacaaccacaaaccacctgacccgaccatagtcacaccccatggccatcctcgcaccaccacaaaaacactcacaactacaaaaccccaacgaccactcttctgataccccaattgaaccccaaccccaatctcccactcaacaactccaactccaccgctcatgtaaagaccgcttagtttaatttagaaattaccagttaattatgtttaattattgaaaattatttatagatatttaaataattatttatgctgttattattgaattctgaaatgcattttatgtcatatagtgaatttcataattttgcatttccggtacccggtaacatggaactcggtgtttgactcagtaaaatcacaacttagtatgttagtattgtgggacagttatttagacattgggaatgtcggaattggtcgggaatctagaatttcccaaaatacccctttagtgccctttatgttattttagtgtggaggggcaaaatggtctttttgccccaatgatattttttcctttagtggacttattattattatgatgtgtgtattattttaattgtgttggctgaagtaataagggaattatgtttatttcatgttttagtcaaaaagtttctaagttgagaaaaaatcaaagttaaaggaaaatctttttctctcaaaatcaagatcttttttgtgttctaatcaagctaggttagctcctaatcttttcctctttaagtttgttgaaaattatgaaaagatgagtgttgcatgtatggtttttgatgttattgctgctgttagttgttgttgttgtttccttgattaaa

SEQ ID NO: 231904 - DNA, 878 bp, Cannabis indica
taaacaactgctaatttccaaattaactaagcggactttacaaaaaatattaaaatccgcttcatattttttttttaaaaaaaataaaataaaataaatgaaagtacaatgattgccggagttttctttagtgtcgaaaaagtcattgaagtttactgctggtgccaaaaaagtcgatcaagacgcttttggtgcctaaaaagtcaccggagttcctactgaaagcggaaaagttaccagattggcatcatcgccagaaaaatcaccagaaaaattgtccgagtcatcactatcactggagtttgatgctggagtcatcagcaaagttagacgttggaatctgactaataaaaaatcagttacgtttatctactagtaaaaaatatgaacaatgaaactaatttctaaaaataatataaaaagcataatatttaaacacagaagtgagttatttagtacaaccaactaagaaattgaatatgcataagacacccaaaaccaatttcaaaaatttttatatatatacaaaagataattcttacaacttggatcaatttactgttttttcttcacgatatgggagaagtttcttcttagagtcagcacttaaaatttttagcaacatcttccattatatttttattggaagaattatattccatctcaagaaaaagacgaaaaataaatcaaaattagtttcatcatataacaataatgaacattatgaaattaaacaaaaactaagttttgtcacacaataataataaagattatgaaaacaaaacaagaatgatatacaataaaaataatttaaaccagtttcatgaatcaaccaaatggaaaaaagcacaaaaaaatactcacaaatataatcaaaa

SEQ ID NO: 231905 - DNA, 1022 bp, Cannabis indica
acacagaagctgcagcccactacgacagatgcctttgcatctcacatctctggtaacaattctaaacacttatggattgtagacagtggtgcttcacaccacatttgctgtgatttatctcttttttctaatgtgcacaaacaccccatagctaatactgttacattacccaatggctccattattaaggtctctacatcaggtgatatcaatttctcacccaattttcaaatatcagatgtattatatgtcccctcttttcaattcaacctttttagtgtgtccagttttctcaatcacactcctaacagtatgatttttactaaatctctttgcacattacagggcacaatgaacaagaagattgggactgctgaaaggattggcaatctctattttctgctgcaatctaaccgatcccccagcaattctccttcttttcaatgtaatcaatacaatacctcttgtaatagtgtcccttcatggcactctagacttggacatccttccatgttcacaaccaagttgcttaataaacaattacattctgcacataatgatgtttccccatgctccatttgtcacctagctaaacaaaaacgattaccctttcaatctcacaataatattgctgatttttgttttgatttaattcatttagacatatggggccctttccatgttcatagtatagaaggttataaatatttcttgacaattgtggatgaccatagcagatatacttgggtttatatgttaaaatccaaatctgatgtgcaaattctcccacaattctataaccttgtctttactcaatttaataaaaacatcaaagcagttcgatgtgataatgctaaagaactcaatatcaattccttttatattcaaaaaggaattaaactttacaactcatgtgttgagagacctcaacaaaattctgtcgttgagagaaaacatcaacacatcttaaatgtggcccgagccttggcttttcaatcatctatagccttggtatattggcc

SEQ ID NO: 231906 - DNA, 1865 bp, Cannabis indica
tatatttgagacatctatttttgtaatttttttagtgaattttttagttacaatgattttcttggtgactttttcggtgacgatgatttttttggagactttttcggtaacaataatttttctagtgattttttcagcaccgaagacttttccagggctagtgacttttccgacaaaatttaatttccactttttataaaaatatggcataaaaaagcccatataaatataaaaatatatatatatataaccccgtggtattatttatttatgccataaaaaagtaaactcttatcattttttcatatattgtataatttctacttttttataatatttattaaagtaaaaaaaaacttaaaaaaaattaaagaatcgtgttaaaaacacgctacaatagatgcttctttctttattttaaagttttcttaaaatttactatttatgtcttaatcggattagtccggtaaattcagtttaattaggcaggttgactttattttcaatgtggtcaatatatagattggacaggttatatgccccctcaacttaaatcttgatctgccactaggtattttttttttataatgattgtatatagattgcaaattgatatatacatgtttttctttttgaattagtccgaacaatatctctttcaccacacattcgtgtggtgtagtagtaagggttgtttttagtgatgttttttttgtttgtgtcaagagttcgaaatccaccccaatctctcttgagtgagattaaagaactacttgatccttgttggaggtggtgccatctgagtgataggaacacttaaagtgactatcaataacccaattaaagtaagctgatgtataaaacccttataattgacacgtgatccccaaattatgagaatgactaaaaggatagagaataaatttgtaccacataatccccttctttttagattaataaaaaagaaagaacgggacctcttccttatattatgtatgttcatgggtaatacaataagattttcacaaaattataaaaatacggtttcatggaattttaaatatttttacgtattttttttattttatttacagaaaatacggtcttttatgttgtactcttgttaatttattgttgattttatgttatttgaatgttattttttgttgttgttttgatgttacttttatgtaattttcttgttattttcgtgttgtttctattaaaaaaaacgacaataaaagatcatcatatagaaaaaacgacaataaaagatcatcatatctgaaaaacgacaatagtaatgaaaacgagaaacaaacgacacgattcactaaaacgacatcaataaaacgtaaaacgacaattaatgacggcatccgacgtgaaaacgacaataattaagaaacgaccatagtttaacaagacaacaatagggtggaccactggagcccaacaagtggcccattaattttgatggggttcctccaaaacctggcccatttccataaaaagaattcttctcacattcctccctcaaaatagtcaaaataaataaataaataaaaataaaataagaaactaagtagggcctacacacgtaaccaaaaattaatgataatgattaattaatatgacttattatacaaattaatgagaaaaacaacaataacaaaaaattcgaatgaaaaaaatacataattcttgagtaaaaatgcaaagaaaaaaaagaataacagatttttttttcttaagtgagtttaaaataaagaaggcgtgacactagagaaaaacgacaataaagttccatcaggaaaaacgacacaaataatttaaaatgataataacgttccctcagaacaaaa

SEQ ID NO: 231907 - DNA, 1316 bp, Cannabis indica
ctgcctcatcaggtcttccttaaaaccctatgactgctaatcccaatattcgtgttctagccacaacttttatatccacgaatctgacagatgtggccaaccctaccaacccagcaagaacaacaaacttgaccaccacgacttgtcaggttgacactgctgatacggttggtcccaatggccaacctctatcgcctagtgtaaatccaccattggcaccttgtactgagggtttggccaacgtggaacaacccctgggaaccgcaactaactctagttcccagtattatgctggggaaccagggccaggaatcggtgagccagccattggcgagcctcacgtggatttaggagaagatctcaaattggccagacttagagaggttgtttgccaagtcgactaaattgaagaaccatgtgtttgttggctgcgatgcattcacacaacaaagacacaaatttttaagatggatgggtgacgaggagtacgtcctccaatctcattaggtagaggtagaccgttgtaatagataagttagtgacctgatcaggcagttcaataaaagatcttagggaaaggtcaagatctgattaaagatcctctccaaggtagactagttgatagattgggaaaggtttatagacaaatagtccaacaacgttctttaggaactaggacggacctccatacagatttagtggtgggagtagccaaactctggcaaccagtgacttggggggtcgactaaggaattcaggcacaacaacacccccacttggccagtgtttggcatgccagccccttagtggtgcacccctactggccaacaaggtgaacttcctccctgaaacatttgggagcaagtcgtccaaagaccaatctttaatcgactaggtcaaggaatgggtggaaacacccaagacaataacaactggagaagtgaatacaatcacttcagatagttagatccaccaaactcaaacaattggtgtgatctaccccctgtcaataaagaggcatcacaagctaatcaagcgagaacgagcgcctagacattgcccaacattgggctatccggccatgaaaaatttcccaaagaagggctagccagccatggccagttacattacccagggctggctagccaaagccagctgccaagcctagggctggctagccttgaacataccctctcccagtgtatggccggctaggtcctagctaatttaaggctgcaacccaatcaagaaaggccaatcaactaggctcctactgttgagttttgtgccctaaataaaacccattacaatctgat

SEQ ID NO: 231908 - DNA, 868 bp, Cannabis indica
tcaggaagatgtcttagtgtggtggaaactagtatctttcacccgtgatgctacaattataacttgggatgggtttcaagatctcttcaaagccaaatattataatgaggcggtatatagtaccaagagaagagaatttactcagatggtttaggaagaatccatgtcagtgactaagtacacaaccaagtttgatagacttgctaggttggtctctaggaaaatgctaattgatttcagtaagaaaaagaaatacttggcgggacttactgccaagatcaggcatgatctgatgattattgccaatgacactactacctatgctcatatggtagagaaggaaccccgagggactcacgatgtttacggggttgttgctccttctacttttagttttggtaggggtagtggtgactcatcttatgataaaaagagaaaatctccatcaacatgtggtggtttaagtatgaattagaggttttgagggaactagagtcaaggtggccgtctgggtggtcttgaaggtcgttacagctatttggaatgcctaagttgtaagaagcaccatccaggcaggtcatgtttttagtatggtctaatggggcattacaagagggattttccttagctagagaaagaagagcccaagaaagaggtaaaacccattctagctcggttgtttaccattacttaagtcgatactgaggctagcctatcaatattaggggtgttcatccaatccaatatgcactattttactcctagtgcatttgatccgcactaagtataaatttcatattataatccaatccaatccatataataactcaaatccaacccaatttgcaaaagtgggatttggatcagc

SEQ ID NO: 231909 - DNA, 959 bp, Cannabis indica
taatagttatggtaattttggctcgagaagcaacttcagtggtggatccaatagtgtcttcaacagaggacaatctcaaaatcaagtaccttcttatggccgaggcaataccaactttagaggaggttcaaattccaactcagttcgaggtggaaaatttcctgcttcctcaaacaaacctcaatgccaaatatgctttcgcattggccatatagctcaggattgctattacaggtttgataaaaccttttccccacaacaaactgggtctgcatcaacctccacttctattcccaatgctcaaaccctctcactgcctcagatcgtgcacatgaccccaactggtctccagattcgggtgccactaatcattgcacaccagaagctcagaatgttctcaacagcagtgattatgaggggccagaccgcatgtatattggtgatggaacaggttttcctattgcacacattggtcatacttacatttcatcaaacactttcccttctaaaccattactgctcaaaaacttacttcatgttcctgaactaaccaaaaatttggtcagtgtttcaaagtttgctagagataactgtgtgttttttgtaatttcaccctgacctttgttttgtgaaggaccaggtgagtcgagcaactttgcttatggggagatacaagaatggcctatattcatttgactccaatgatctccagctactgtcatcacctcaacaattaaaccagtcatctcattccacttcatttcagcatcaaaagtctaccaatttagtgtcttcacagtcttctacacatgtagatccaaataatacctactgtaccaactgtaataatgccaagctatctgactttgtatatctggcacaatagattaggacgacccatctcgaacaagttgtaaaacgaagttcgtcaatgcctgtaatctgtccattaataaaac

SEQ ID NO: 231910 - DNA, 2728 bp, Cannabis indica
attaaatatatttattttattattgtataaatttaatgtgtattaaagttagttgtgattgtaataaaattaattagttatttttattttaatttaggtaaaattataaaactaatgcaggaaaaaagataggggaaaatatatattttttctcttttttttatattcctgacagtttaaaaccatcgggaagtccacattagcgacggtttttaatcgtcacctattttgcccattttgcgacgatcttataggcaacggttatagaaactgacggaaatactttaaacgactatttaaaaacatcagaaaaaattatttttgtagtaatgctccttccccatctctccccaagtaaccatcactcttcccttctctcttatctattagcctatcttggtcttggccttgtctttggccatggccgaatggccctgggtgcgtgcatcgtcactccattgtcaaattttggagtcggtctctctaacttcttggattaatcgtcgactaatttttaggttagctttgctaatataaaaatgtaacggtcaccttcaaataacatataccaatattaatatcattgatatattaataattaatgttgtgcaagttatagtcttgtcttttgacatgttgtgaattttatcctttggcttagtatctttatttttccattattgttggctggttgtttctgtttgtttcttttgacatggcatctagtctagtaagttgcaaagtgattcagacacaaagatcactctcgattttgaagaatttggtgggctatcattggacgtggaggaggatgaagaagaatatgacgttcgttggtgtcttgtcagacatttcttaaatgctagtatcattgatgttcaagctatgcaacacatgatggcttttctatggaagccagggaagggattatatgtgaaagagttggcacaaaatcgtttcttgttccagttctaccatgaaattgatatcaaaagagttataagcggaagtccatggacgttcgaacggaagcagcttatttttgaaagattgaaagtcagagataacccaaggtcgatccttctaaaatgattggatttgttggttcagatccatgatttacaacacggagtccgaacagagcgtatgttgtagatgataggaaactatattggtaagtttatcgagtccgatgagaacaatttctccggtgttttgcgtgagtattttaagatccgagttaccattaatcttgatcaccctttgaaatgtcgaatgaagatttgtcgtctggatagttcagactggttctgggtgaatttcaagtatgaacatgctccaacattcttttttatctgtggtcctataggccatgcttataaatcatgtcaaaaaatatttgaaattcttgaagaagaaatcattaaaccttaaagagattttatgagagccacggttcaaagacataacaatttaatcgattcacaatggcttcgatcaggcagaatagatagagttgattgtcatgagggtgctcaatcttaccccactggaaaaaatggatacccaaccaccgttgctggtacatagggcgttaatgggtagttaatgttaagtaatgagaggaatcatagaaagggagttgattgtgggattcatgagccaatcatggtgcgaaaattgggtccagattttgaggagaatattggggggaatttagatattaatatggtcaaccgcgttaatgtggaaatacaaggaggttttaatgaggatttgacaatatttgaattaaaaagaaaaagactcaattcggttgggcctgggagtttgggctcacatattaatggtattactgtaaatgaagatgatatggtaacaaaaaacttgtttggggggcaggtttggatgcacagactcgccaagaattatgagtactatgagttggaactgccaggggcttgggaaccctcgggctttatagttccttaaggatcttgtgtaccaaaagaatcctaagtttatttttctttgtgaaactttgtgtggaaaagctactttagagagagtccgtttgtcattgggctatgaggatctgtttgtggttgaggcccgtgggcatagtggtgggcttgccatgttatggaaaaatagtgaagaaggggagattattgatttttctaaaaaaacacatcaatattctcacgcacgttcctaatacgcctacttagacttattgaaatttatggtgaagctaatagaagttaaagagagaacacttgggttcttatccgtcagctttcagaagatgttcgttggccttgtgtgttcatcaaggatcttatgtaaacattgatacaagtggacaagtgaattctacgagaggaataaaattatcaaaagcttctcgtcagtatctaggcctcaggcaaatggacaagtgaaagccgttaataaaaccctaaaggatactataaagaagaagctagacactgccaaaggcagatgggttgacgagctacctcgggtgctatgggcccttgaaactaccgagaagacagctacgggacacactcctttctcgctagcatttagctcgaaagcaatgctgtctgttgaagtgaacatatcgactcacataagagagttttataatcaagaagaaaaccaagaacttttaaaattgttcttggatctacttgaggaaaaacgaactgagtcgcaaatc

SEQ ID NO: 231911 - DNA, 657 bp, Cannabis indica
ccgaacatgtgtcacccatccgagcaaacccagtggccgagtaagtccatgtatgagcaaatagttctcatgtggacttagggggcaaatattatcccaatttctgcacatggtgatgtggcatttaataagagtgacacgtggagagcatttccaaagtttggacgagtgattttccttcgacggtttgtctagagagttttatgtgaacctaattaagtttaaactttcaacatgtattatccggacagagcctgtatgcgactatctgaacagatcctcaccatccagtgaaaccaaatcctccgagcaaaatgacgcgattgaaacagatcttcaaggatattttctgtaaatcctccctcatttatagttcaatcgaatccctaatttagtgggattaacacacattaacagaaagataatagaaaactaacttagtttcctatttattcctaattgtctcagaacacttatatcatgtattttttcctataaattgtggaatcactttattatttagagatctaaaatcatatgttttaaagagcaattatggtgtaaaaataattattaagttttcctaaggattgttgagaaattcacttaaccaactccttataatctcgataattctttgaagtaatacaagtaaaa

SEQ ID NO: 231912 - DNA, 736 bp, Cannabis indica
ccacgtgtctccatcccaattaaagagggatagtggtatttaaacctcctgatacaaaatgatccttcacttcttttccctctcattttcgtttctatcgtcctttttctctaatttgtaaaacctcatagcttctttcacattttctagaaaagaacttagacgcttttgattttcacagaaccgtctgaggaagatcaatattttcaaggttagtggaaaattgtttgcaactattcccttttattattttttttttgaaaatcaatctgtattccgtcttttaagaggtagaaaatgcatgagacaataggacatatatatgaaactttatttgctttcaaacaaaactatgcatttctctatgaaatataggcctgaaatttgaataatcacgggtttcacgaagaacacctcgagtgttcgcacatttctcgttgagtattatgaatactcgcgaggttcgtgatcaacatcttaaatactcgcatacacttccaaataacttaataaatctgaaatttagctattttgatccctgttagaattcagggtttattttttagccttcaaattatgtgtgcttttgttgtgaaaattgtctgagtcttttgaatggtgggtgtgtcgcagtaacttaatacacatgtaaactctcacatgtttcttgggtcactgtgatatgcgcagccatttgagacatacggccagctttcgctttcttgctttttagtcg

SEQ ID NO: 231913 - DNA, 661 bp, Cannabis indica
ttaatttttaaatattatttattatcttatggtttaagatatatatattacttattttaaattttttttattacattctaacttagttaaaaatataataaattataataaatataaaaaattactaaacaatttactaataaaattagcattgtcttatttttttttaaatatattaagataatattttatttcataaattcttatttttaggaatatatcaaaatgtctatgaaaatcttatctaaaataataaaaggtaacatttaaaagtaaaaattaaaaaatatatatatatacttttagtaactcatagagtttattacttatttaagatatgtttatgttatttttttttaataactttttgttaattataaatatatttaagaaattaacatattctaatcaaatataaaatgttaccattaagcaataatgtatataaattgttatgttaagtttataattatcatacaatttaagatactatttggtacttttataaattattttatttggatcattttttttttggattcaacaaagaaatatatgcttctcataaattaaaatggtcatcttagaaagtaggtcacgatgatatcactcttgagctcaagtgactaataatgtgatgtaaaagaaaagaaaaaaaaaa

SEQ ID NO: 231914 - DNA, 959 bp, Cannabis indica
tttttgggggtaatcttgtgtcttggtctgccaagaaacaacaagttgtggctcggtccagtagtgagagtgagttcagggctttagcgaatgcagctgctgaaatcaagtggttggtctcacttctttcagagttacacattacttctcctcattgtccaattttatgggtggacaaccaaagtgcagctgctattgctgcgaatccagtcttccatgcacgttcaaaacacattgagatcgatttacactttgttagagacctcatcctctctaaacaaatctccgttcgctatgtaccagctatagaccaagttgcagatgccttaacaaagcccctgtccacagatcggtttctctatcttcggtccaaactcaagatgtgtgacactgcttttcgtttgaggggggatgttaaccaattaataatctcttaacagttagcttttctgttaattagttttgcttaattttcggattaattggttgtaaagtgctttactgtgtaacagttttttactctgctgtgtaacagttttttactctgctttttgtactgttctattggtgtataaataaagaatacactgccctgttttgggtaagtctttcagatatttttcgtgcccttgtgtctctcttttcagctcatagcttctcctctcagttcttgtttttaccttcttcacataataagtgtaattttttcaaaaaataaatataatattgtaactaattgaaacaagaacaataaactaaattcccaacaagtcacacgtcctttagattcacaatttcacaaaaaatacaattacctctttcttgttgatctgaagcacctttaattaaatatgtggaaacatcaaggtaaagatacccaatttcatagttctacaatttgcatatatgacaaatagtgacatttttattagtggtattttttaaaaactgtcacaata

SEQ ID NO: 231915 - DNA, 645 bp, Cannabis indica
acctcctcctatatatataaattaaattttggacatcatgtttagtgaagctaaaaatttaaccatatatttttgctaaaaataacaaaaatcaaaattctattcagaccctttatattttaaaactcttaactataacattcgtttggaccctttattattaaaaattaagatttttaaaaagttaaaaaataagactatatatcagcactgaagcttagtctacctaactcaactatttttaactataaatttattcgaattatctttaatgaagtcagttttagaccgatgcctaattccgttttttttttttctagtagtgggaaaataataaaatagataaaaataataaaatagaattaattaacaatattatgagtatattcacaattagtagttatacccatggcatagatatttatttttaaattatatatgaacattaacaataaataattagaactcattcatttttattgaaaaaattcgtccctatttgagaatgaacattgatagtgaaaaattagaatgacatttgtgtacatgtaacatataaaatagaaaaataattctatttatttttattgtttgagcctgctattaataaaccatccttgcattgattaattcttaaattcatat

SEQ ID NO: 231916 - DNA, 737 bp, Cannabis indica
atatatatgaaataagagggtagtgaaatgggttttgaaagtgtgtaaatgaaaggtccaacaatatgagcagagagaatcaaaataaaggtatatagatatagagaatcaatctaatcgaagcaagacacaaagaacagagaataattataataatactaatgtagtttgcatgggaagttgcccataatgtgtttatacttacaaaaaagctggctatggccggctcttaaaactttgataaattaaactcttttcttcttttttttcactttctttaatatttatgtgcaatagtacattcccatgcctgccatttgaaaccatatattttgtataaaatataggtaaaatgtgtatagtacccatgttaaatggataattcgataggcttcttattaatttccatatttaagtttttaatttaattttttttataatagttatttagattattaataaattttttaaaaaatcctaaatagatttatagtaccgaaaataaaattcaaacaatcatttaccatgtcatataaaaaaaaattagtcacccataaaataaaatattttaatattatttttaatattgtaaactatttaaattttttaaattttataactttaaataattaaaacatacataatcattaaaaaaaaattaaaaaaatctaccgaaacattgttttaagaagcttattagtattatagacttacttatgtatactagcaaaaagcta

SEQ ID NO: 231917 - DNA, 840 bp, Cannabis indica
taaaagtgaaaaaagggtttttccccaaaactcacttatgtattacatgtaggccccctttttctcacttacttcagcaacccatcacaaaggcacataaagcagttatttctctactgcaatgaaatcagacagtcaagacaaagtgcttcaataagtgcatcaactttttatcaagcaaaggtaacaacattcccgataatgtcaatatagctggtaaagtccctatccgtatagatgttcgcacggggactttgggggttgggggtaaatgttatcccaatttttatcctcatgatgtggggtgcctacgtggacaaaaccagcaccatgtggcattacatatcactaaaaggaaggccaagtcagcactcgaacaaacgaaaaccccaacacttaaacagggatcaagtgatagaccagctcactctcaagagctggccgactacccctgatcggccctatggccggccagcccagggatagcaccatggtgggctatccaggctagcacaagggcttggttggccaaggattgctccacatgcctcacttgacaatcctacacgtggctaggagtaatgggttaggaattgtgccctaaaagcccaacaaaatggctaaataatatatagaatcaaaggcattttggtcttttgtaaatatctaactaactatgcgattgttaagggatttgaattgtaaacctatggtttaagggttcctatataaaggcattaacctttgactgaattcctatgttgcctaagttgcctccaagctagaaacatgatctaaaattctaagtgtttgacaaattctctttctctctctctctct

SEQ ID NO: 231918 - DNA, 1204 bp, Cannabis indica
gcctttagcgcctcctgatgactccgctccaaaagagcctccctctgctgggcctcctcccgaatagcttttctctgtgctgccaagtcccgaagactcttcatggcctcatccatgcccccaaactcggatatgatgtactcatggtcaatcagagtctttgagaggcgaccggtctcggcagcaatctggaaaaataagaaaaatgtgtaagcacgtgaggacaagcgccaaaagactaagccctaaaacactaatagatagaaacttatcgcggtcatggccgcacttatgtcctggatctggtagaccgagtttgtggaagcacaggctgcatatctctttgtcgaaaattgggtcaggttggagacgaagtggcttgttagttctgaggcaaaaggagcaagggtaggcctgatgaagcggttgaaccagtctgtcgaaggatctatgtttaaatcccaggcatttccagagtactcactgcgagaggatctgtcctgagcttcccttgggacctttttcaaggcctccacctccgcgttccccttcgtgtattctgccatagcataattgggcttggcaatctgaagttgttgtctttcctcatcggcaggaacgggggtcagaacaataataggaggaacaatgtactcctccgcctcaggtgggatctcgaatcagagctgggggtcggagtgtcggctctcttgggcttcttggcagcctcgacctccaccatctttcctttacacttccggtccagaggggtgagaatctcgccctcctcttcctcctcgacctccccgtcttcgtcaataagaacaatttggcttaaagggaggctagaagagggattcccggaggtcatctccaagtcttgtgtttgaggcttgatcgggtcgggactgtaagtctgagcaagggtagccaaaagctcgtccattggcctagctgcttcaagaaaaataaataagtatcagcacatcaacgagaaattgcgcacacaagaacaaagcagtaaaactaatcctacacagacaatctaattcaaccctagcaaagtcctgcactaaaaggttggcgtcgtcattcccaagaaagttgtccgaggggagaaaccagctagaagacaggtaggctgaatgatccagaaggataggtgcaggaggtccggcctaaaaaatgacctaagttggaaaaa

SEQ ID NO: 231919 - DNA, 2534 bp, Cannabis indica
ctgtttctgcattctacaccacaacggaagccaatcataaggtatgaaataattagggtttctaaaagcttggggaaaatgacctaaactctcattgtcattgaaatatgaaattgttcatgtaaaatgaaaaaaaagaaagatttgttgtagcttgacatgatataattgattgccctatgttttcccctctcttttccctcttcacttccttggctaaaaataccatatttttgctctgtttgatggattataaaacctaaaaccctttcgtaatttagctcttacaccataaacccttgcaactatatttatgagctgaagccaaaaggtaccaaatctcgattattttctttgtgattcaagtttaaagcagattttttttcttttcaatatttccattaaatttacatagtaaagcgttgttgtttgtaagaaacttggaatttgaaaatggtcaaatcaataattttgatcaaacttgtaaggagttttaatttttattggattttactttgtatgttgtattctttcttgctgaacaacgagactatgaagttttgtgtttttttatgtacatgttgggtttaatttttttgtgtaactattcaaccctttcttgttttgtttttaagaaaatagtttaagaaaaatgttttggtggatggaatttgatagtttagttgctaaatgggtaggaatcattttgaataaaatgtaattggatggaagggaaaagtggtatggttccctctcatttgaaagatatattgtagtggatgtttatatacttccccttgtagtttgtgttgattttatactttgaaatgaaacgtagaatgaaaattttttcaaaaataagaatgtataaattaattatggaattttctctatagaaagatcagtgcaaccatgggaggtggaactttattcaaatggtccaaaaatatcacttcttcccaagttgagcaaatgatacgagccgaaaaggacataaagaaggccattcttgtatttgattcggcaacagctgagtttgtcaatggttttcgtcatgatcataacacttttggtcttatgatctctaaattagtatcctcgaatcagtttagattagctgaggcaatgcttggtagaatgaaggaggagaagtgtgatatcagggagaacatattcatgtctatttgcagagggtatggtcgtgtccacaagcccttggatgctattagggtctttcacaagatggaagacttccaatgcaaaccaacctcaaaatcatacattactatattgtctattcttgttgaagaaaaccagttaaaggtagcatataggttttatcggtatatgaaagaaatgggtattccacctatccttgcttcccttaatattttgctgaaagctctctgcaagaacagtgaaacaatggatgcagctattcggatgtttcgtgagatgcctagtcgtgggtttactcctgattcatatacatatggtactttaattaatggattgtgtaaattaggaaaggttgatgacgcaaaggagctattcaaagaaatggagacaaaatgttgtttgcctactgttgtcacatacactaacttgatacatggtttgtgtcggtccaacaatttagatgaagctatgggattttttgaggagatgataagcaaaggtattagtccaaatgtgtttacttatagttctcttatggatggattttgcaagggtgggcgttcttccgaggccttggaactaatgcataagatgataagcgaaggccattcgcccaacatggtcacttatagttctctgatctatgggctatgtaaagaaggaaagcttcaagaatctcttgaaattcttgaccggatgaagcttcaaggtttaaagccagatgcaggccaatatggaaaagtaataattgggttctgtgatattaataagtttcaggaggcggcaaactttattgatgagatggttcttgatggtatcacaccaaaccgtataacttggagccttcacgttagaatccataatattgttgtccaaggcttatgtaccaccaacaacattgatcgagcttttcaattatatcttagcttgcgtacgaggggtatcacagttgatactaggacatatgatactttggttgaaatgttttgtatgaaaggtgacttacacaaagctgctcgaatagttgatgagatgatgcttgatggatgtgttccaaatgaggatacttggagatctattgttgacggattttggagtagaaggaaggtacgagaatctgttgactcattgcaagctgagttgctgagcgacgtccttgactcttgaacttagtttgtgtttctatagtcaaattgttctaactcaatgtttgatgagagaacttgttccatggtggaaaagttccaacgtagaagggaagccctggtaagaatttttcattttcttgaaacattttatgtattggataagattttagtttttctgatttgaataatattgtgatgtgtgctttc

SEQ ID NO: 231920 - DNA, 685 bp, Cannabis indica
tttaaaaaaacaacactaagaatagcatcagcccaaacttttctttaattttcagcccagtagcatcagcccaatatgttacactctaaactaaacctagtatataaaggaaagaaacctcctacggcagccactattgtcaacagaatattcaaactctttcaaaatcattttctctcttcaacacaaaacagcaggaggtaaaaaaaatttctaggagttgtttctaatatttttttctgtacttcttcttttcacccttatggcagagttatattgttgtaatgggttcttatactatttttttctcttataaatttcttctaaaaacagtatggatatatttgggttttctaagtttttttcttatttctcttttgtacaaacctatgggttagggttcttaatttttctcttctcacttctaaccgaaaacaataaccgaaaatcaccaacaacaccaaacacaaacaaataaaaatataaaccatatagggattaggatgagaaatacaaataggtaaagatggaaacacacatatataaaaataaatttatgtcaatctctttcttttaataatacctgtacagatcgtgagaattttgaagattttagcagattataaagcttcaacaattatggaaggctccaataataacttcaaattaatggcagcaaacaaag

SEQ ID NO: 231921 - DNA, 1450 bp, Cannabis indica
agaggtatgataagggttgtttatacttttttactccgctatacaaattatcagaaggtggaaacaaacgaccttctcggtcagctggagacggacattacagaacttcaagatcttatccaataatttcctcccaaggcaaccaaattggctacacaactcacctaaagttttatatgggaaaaccctctaacaaggataatgaagctaataagacaaattggctcctaacagagtatagattgaccaaagaaggaaatcataacaaaaacatcaagacggtacattattacatacataatattaattaataataatgagttaattagtggtgcttattatctaactagcctacttaaatttatgtgcagcttgatgagtgtgttatgtataaattatactataatggagatcttaaaaaagaagcacattatcaacacattgcaaagagaagaaagattactactactgctacaacagaagaagaagagaaaggagaagaattactacaatcgaatcaatgtgatgaaaccaataacaaatacaacatggatgaagtatatattccaagccctcctttgtcacaccaacaacaacaacaagtgccgcaaaccaatgataatgcatatagtagtctaagtcaaattgatcaatcagtagaagaatgggaaaacgagatgggcattactctagatgatgatacactaactgaacaagactatgcacctattattagtcttcctccaccacaacaacaacacccacagatttatcaataaaatgtttgtagggaagactgaggatgggtcattattatttattgttttataaacaaattaatacaatattgtaattttctttaattaagacaaagtaaataaaattcatagattattattacaaatacacagaagaatgcttattttatgtgcatgcagaagctactaaaataacttaattgtaagagtagttttcatcaaatcaaaattggagagtaaagataggtgttttgaaagaatatgtaaagattttggagacaaaagctgaagaaacaaagctcttagcctaatgcatctatgttacaacattagtaattgaataattagaagaatacaattaaaccaatacataactattctctcaacctggaaagtggaaactagaaagaataatacagccactgactcatcaacctctccgaattcgcgcgtctcgagccagttcgcctttgtgaccgttggattggattagattagattatttaaagctgaattggtataaatgcccccaaagttttgtgaatttgttttgcctgtggcggcaaagttcaaattccacaaactaaaagaccttctattctacattagtactgttaaatatatatattatatttggtagaaattgtaaaattattattttttatttactaagttttttgaatattaattaa

SEQ ID NO: 231922 - DNA, 1497 bp, Cannabis indica
ttctggttaatcatacatatatgtgcctcaagtaattttaaagaatttacgctttgtaattacttgtttgaaagaaatgattattttattcacaactggaataaaatatttcatcagtaatgtgatttacaatgattattctcaaaagaacttccccagttcaattgcttattttatcaatctttcaggagcatctggttttgatgtctcgggtcaatcccaaacattctcccacaattttttcaattctcaagtttgaaccctgacatataccagggttctaggtagagtaatcctagttttagttctttgtcttcgagtgctactggttgacgtctagctttccatgtgacagcttgatatggcaaccacattgggccgatatctactcacgtcgcaattctttttatagaattactttaccggagtaactgccttttgcactcttgtgacccgctccctctcgaaataaccgaagtatcctttcttctcacggaagagggttataatcttcagttgcttgagttattgggcagatcgaactgatcataggcatcttcctacatgtttatatattgttgaaggtgtcttgcgatatgagactttctatctcatctttcaactagcgacactcttctgtggtatgaccaatatcatcatggtattcgcatcgcttatttggatccctcttaagcctcgcatgtttcataggtcttggctcgccaaaaacggcttcctgtatatgtgcgaggtatattttttcccaattttcattgagctcggtgtattctgtataaagagggatatacttgttggatttcttattattgtgcagccttttggaatcgtcttttttctttgatcccgaggcttctgaatcaagttttctaatagtatcgtgccctggtcatctcatggctttgtgatttgatgcactctgcagttattctccaactcgctctttcgcaattggaatgaatccttttgccttgaactgagtcgttgataaaggtcaggcttcttcaagttcacatactctcgtagatcactcctatcgtggctgcagttggaccttgcccttcctcttagagtttggttcaccttattctccctatatgggtttgtgcgatactaaagttgcaattgcaacccataatttgatcttcccccatacgtcttctacctcattactgattccttcaaagatcctcccgtttagttccatccaaactgcacaaagaacaacaagaatggttgtgctccagagccaagaagttctcctttttcctttaagtttacacaatagcaactatattcagatttgggcagttattctgcatcaagataatcttagcttggtctaatttttatttgacttataaacaaaagttgcaattgatatcaagaatttgatcttataataatttaactagaatttgatatcgataaggttaattagattaaagaagagtatacatcattccaaacagcattccc

SEQ ID NO: 231923 - DNA, 789 bp, Cannabis indica
ggttagtcaatatatgcatcaatattataaacacacaaccatcttaatatttaaataaattaatctatacaaaaaagatgtactttaacgacatattgtttcaattaatttactcaaatattagacataaaccaataccagaatttgagttaaattgtttaaaccaaaatatatatttatcaaactataaatattaaacataaaccaacaccaaaatttgaattgaatcatttaaaccaaaatatatatttaccaaactgtaacatatatattacacaatactggaacatgttatatatacatatgtataaaactttaataaaattacaagcatgtaattgataaagaaaaagaaaataggattgttcaaacgcataagagccataccatagcaataccatcaggaaaaaaaaaaaaaaaagacctactgaagccaaaatagtcgaataaatatatatattcctactgaactgaagcctcgattacatatggagcaagttcaattcgttatatatatatattcaacgaatcaatccaaattataatcgacatatatatacgtttaatttatcaaaagtatggtgacgtaccataaccattaatcataaatagcccaatttatctaataatttcatgaacaatatctgaagtcaataatcacaccatatatacaatacccaaaattcgacaggaaaacatgtgtcacgataaaaaaaatgtgaatcgatgcaatatctttttatggaataactcattaattacgtaagtattataacccactaactgtaa

SEQ ID NO: 231924 - DNA, 749 bp, Cannabis indica
cttcttttgctcatatgctgaattagatgaaaatacaggtgccatagcagttggaggtcttttgacactgtgtacttcttgtacacccaagcctgagctagttggaaccatcatgtcattacctaatagtgctttccaaaattttgggggtgctgttctttctacatgggctgctgctgatgcctcgatgttatttgatagtgtagctgttttttcagaaaaacttggtagcaacactgaggttgtagatagtacagatggaattatgataaaccattctgccataatgtggctgttagattattttagtgcacatggattaagtaatgctgatttgttaagtaacttctctagaaatatttctagcaaaaacacaaggaagctgctttgatggatggcctttcttctgatggtaagcaatagatgctaaatatttttaattttattttcccccctattcgttcacatattgatctgttggtctggttcataaacattctctttttgcttctaatcgttgttcgtactgtttgtataggctgcgtttttttttctcttttttttcctagacgtcattacaaaagttgatcatcggtttacattttggttttttggagtgctattgtattatttgtatctcttgcacaatttaatcattttattgtgagtaatagttttacattcttatcttgtttgtcaccttttgcttggaaactgttattaggcttatagatctttcaattaggttc

SEQ ID NO: 231925 - DNA, 2357 bp, Cannabis indica
tatagtattatatagtatgcctgtgatgtctttttcaggtgtgttctggcaggttggcgcgatataatcataaccgggtatttcgggccgaaccgtgtttgggcccgaaatacaatttgagttgaattattggcattttaattgttgatgaataatctaaaatttaattggatttatttttgtgtgaaaggacatttttgcccttggtttatgcataagctttatttggccctaagggcaatttggtcttttgacctttatttggtaatttatcaaaggaataaaattttgaagatgaaaaatagaatttctggatttctcttcctctaccccgaaccttctctccctcaaaccctcttcttttttcaaatttgattcttgaagagaattttcttgattttggcttgaagtaaagctttgagtttgtggaactttgagcttgttcttagattgagtttgaggtaactttctatggctttaatctttgttttattgctgaaattatttgttgaagagcatgaaattgcgttgtgggttgtgatattgaacttgagatgcatgttcttgtttgttgagattaagggttatgtgttcaagacataatcaggttggactcgataaccagaaccgagacgaactattctaaggccttattgtatttagacgtgtgagcgcaacacgtaggtctatgccacatagacataaataggcatgtgaacgcaacatgcaggtctttgtcatacaggcatatgtaaatggcattactgtttctataatataataaacatgttatagatattttatactgtcttgttggacttggctcacgggtgctctactgtggaggaaagggtaaagctttttctaatcaaccatgagtgcaggagctgaacgaagaatgtacatgttcgggccacactagaccaagtgggttggggtctaccagtgatgtattttgtgactctactttcccgcttaggtcggccaatggaaaaaggacttgtaatagtgttttgtaaatatttttgggatctcgactactgaaacttttagtttataaagtttaaattattacaagttttattttcattttgtttgttattaaagtttaatttctgcgctaattatattattaatcccgtttaggggattcgagtttcttaagtatcttgggaagcgtgcctattatataggacgttacacgccgtctcagaagggtaggttttttttggagcgacataatgtacctgtcaaaaaatcagcacaatataaagaaaagggtcgttgtttgaccccagaattcctaaaagtaacactacttaaatcaatatcccaaaagtgggtgcaccattcaagattccctcgaaaactcttaacaacaaatggacggagaacttaccgatgagagaggatgacaaaatcgaaggttttagtgcagcgctaatagtagtaaagtgggactgggaagatggaaacccaaggcctaggacttgacgggcaagaacattgaaaaattaaatggtcgttgcaaatatttatgggacgacaggaaggggcacattttgtgagaagtcgatgctttagttcgccccaagagatatttgatgattgcacgtgagaagctgaaagggtaccccacataccaagaaacgactcccatcattgcgtgtttcgtaaaagacactcagcaaaagaaaatgctacctaagtccaatcgtcgttgttttgagcttcccaaggacacacgcccaacacgcgcgtaaaaatccaaaagttagcatttaacactgtgaaaagaaaataggaaatcatgcctcccacataatgacacttcaacctgatggttgatgacgaaacaaattaaagcactcatcataaattcaacgtgcgtgaaaaaacccttaggtgaagatactgcaagctcccgaaccatggtatgtccctaaagcttgggggtaaatgttatttgcattttaatcgaaacgacacgtggatacttagtagggaaggatggggagtcattaatgttggaatatcttttacgaggacctagatttacaaacaagtatgtttttaacatcctaatatgaatttttaaaacgatgaaaataaacacataaaaggtatgagaaaccttacattggttgcagcgaaattaaatgactcattaagctcagatctctaacccttgtatcctttctgtcgcagagtatcaccaagatctgagccagaaactccttcagttgtttgaatttttcacagtcttacatactatgattgaggactcacttgctatgggtgggcacacactcaatcactaatggctgaatttttttttgtgaagaagactaaggatt

SEQ ID NO: 231926 - DNA, 1902 bp, Cannabis indica
cacatgaaaacttcaagaggcctgacattggactcggtgagattgaccttccccttcccggttgtgaaattggtcagccccagatggtatcggagctcatcttctgaagctgcatatgggatgtcaatcttgttgcccaaaatcagaaatggaacagtggcgagggactcatctgaaaggagtgcatcgagctctttctttgactcagcgaaccgctctttgtcataggcatcaactaggtaaactacagcatcaacctgtttgatgagaaacagaaaggaaaggcaatgtagcagagtttagttctttgacatgtgattatagttgcataacgagaaaaggactctttcgatgttcttcaaaactataacataataactaatctgacattcttataattagtaagaactagttttcagtcattttcttcatgtatcttgatttggttcagacattaccttttacaagtatcaaaatgctctgtggcaaaaacacttgacaacataaaagcatgattagcttccaaaaggaagacatgtatggaaaactagtatcaaacacctttagtaaatatagtgaaaaaaggtacttatcagcaaaactttcctggacaatttttgagatagccatgaaacagataaaacatggaattttagcttaaattgctttagtaacatcttttgaattacaaaaagtctcagtttttgtcatatgaaaaagattaacaatcaacacaactgaaatgcactaagatgcttgttgtacataacaatgtctcattatcccaacaaataggggattttgcaaaatgactaaatttatatttaggtgaaatccaatgctaaaaccagcaagcaaaggttttttaactttgagatcaaaacaaacaagagcacaaatcaaattcagctcacaattcaaatctaataattagttatgaaaataagaacaagaaaaacattgagaagaaaacccaatatatggcaaaagaaaagaacatggatttaccttagcatagtaatctttccagactctacgagcgatctggtgaccacccaaatcaaaagccttgaacttaatcttcccaatgctcaattcctcggaggtgggatgctgggtcggctgatgctgcactaatctctgaaacccaaccaaacccagttccaaattgtcatataaaaaattacccagaaaaagaaatctacacgaaaattagagaaacaaacaaacaaacaaacctcgtccttcaacatatggagaagggttgtcttgccagcattatcaaggcctaaaaagagaatctttgcctccttttgccataggccaagagaagcgagaaccccgtagaaccaatctaacaaaaacatggtatgagaaagagaaacccagatcggagaattgatgaaagagatcgcttgaagcagagatcgaatctgggttgaaggggaaaaaggggtaggaggagttattgagttgttgagtagtaatagaatacaatagaagtcgtagaggtgtgattttcttctcctcaaaaggtatttatatatatatatatatatactagtagaatactacgtgcaaggcacgtatatatactaagttttatgctagatgtgttttgttttatttaaaaataatacaataaataattaaagaaaaaatattattaattattgtttgagattattaatatgtatattcaattaatgtaaataatattgttaataattaaaagtaaatactgaatacaatatatgaacgtttaagaaatcttgataatctaactgcaatttgttcttaaattaatccaaaaataaactaaaaatcaatgttcgaaaaataaagcatacacaatttaaatttgagttaaataaaaaaaatattaaaatttaatctctaaat

SEQ ID NO: 231927 - DNA, 837 bp, Cannabis indica
tggttgatgttcctttcccaatttagagagaattgtctgttcttttagccaactcagaaaagagcaaggaaatcgacgcctatgatgaagccatatgtggagcaattaaaaaaatcctcgagcaccgcaggaggtgggcttttttccttggatttagttagtcaccggtggaatttatcaatgctttaatagaatcccaaagtaaggatctgaagcttgtagctggagatggaagtcgaatatcaaatctctcctactggattggcccattagcaatcttctctttaaccaagcctaaggaatttgggatggtgtctgaagaagttgtctaaagcagaattttaaattaaagtttaaacacgaacctcatgcctcacgttcccagtaatcctagattcatcaccaattgtcatgattacgcgctctgcttccaagctattatagttacaagacactgcttatttacttattttaaaaaaaaattgttggtaacctgctatagtaggtcactaaattgtcacctcatcagtttttttagtacccattaatggatattacccatttagaaatcatccatatatgaaattgtatttgaattacaattctataattttctaatatatgatcgaagatgaatctgatatggtaactattgtcaagggtgctgttttctactgatcaattggtgcttcaaatttaaaagattaaattacatgaaattcatggaataggcagtgactggtaagatttaagttaggtaatgaactgagagatgatacaggcttgggagagagtcatattgaaaggtcgaaattcaaaattgcagacaaaagaaaa

SEQ ID NO: 231928 - DNA, 648 bp, Cannabis indica
gcaaatttagccaacccgtcagcggcaacattagctgaacgtttgacatgtgagacatttacattagggaaaaaggacaaaagactagagatatcaacaactaaatcctgaaaagaagaaattgctgatgaaggtttacataaagcattaacaacacgaagagcatctgattccaccaaagagataggcaattgaagttgaagagcccacgttaagctgtgaaacattgcaattgcctccatttcatgagatgcaaaacaaccaatgactagttttgaaaaggctgcagcaaccgaaccatctgatcttcgaaccaaagcacccacaccagtgatttttcgcatactgtccactgctgcatcaacgttcaatttcagcaaaccagagggaggaggagtccaaggtagcagagcagttgatgaagaagtctgctccaaaggagcagcagcagtagcagaggtggaaggagtggaaactgaagcagctgatgtgcgtttttgttgggctgagataaagttctggtagtaattctttgcaaaaaaagcaagatcctttgctggttttgctcgatgaccatgaatcacacgattccgctcagtccagatcgcccaaagtgaacaataaattgttccatctcttgctttgtgt

SEQ ID NO: 231929 - DNA, 1978 bp, Cannabis indica
ctcgctggcatgtccagagtaagatattcagcgatccgcgcagagcaatcaacacttagcgaattcaactttcgcatcatgagtcatcagctcaatccctataactcagggatcaatttacgtggatacggcatacacacgatcccactatcagtgtattcagcctcaatcccacgatccttgcattcagcattgatcccacgatctttctgtttatacgcattgtaacgagagaggaaactcttcctcctcaagcttcctagccctataaatagtgatgtatattcactaggcaggggatcggtcgaaaagcagctaagctaagactatactattatctaagaattatatattcagagatactgttgtaagagctataagaaaaggaatctttttccttgatcttaagtcaatacaaataacgaggattaggctattaccgaactgctcgaggctgaacctctataaaattcatgtgtcttattattgatttatcatatatctgttactacatatcgtttatcgcttataaaatagactcattgtcgttggctaaaagcgaagtcaacattttggtgctttcattgagagaaggatcacaaatcgctctttattcgacatccaaccgccaacacgatggtgcaaactcatagaggtcagtctgatccagcaaattcacagacgctgaatcctacatcacaggacccagggagttcaacggttctgcctgctgttaatcccggacagacgggaagcgtgggtaatggttaaacaattcctattactggaattgtgtctggtgtgcaagagactgggaataacagttccgcacccaaccaaggcattcataataaaactgtgtcgcctggaaccaacgcccagacgaccattggagacgccaccgaactaaaaaatctctgtgacgcgctcagactcatgcagggtcataaaaatactgtgcatcatgatcacgacgaactgcgtgctccagtaaatctcgcgttcgacgaacaaaggcgtatgtttgctgaatggagagataaagagatggaggcattaagggctcaccatgcagagattgaagatcgtagtcgacaagccaccgtgctgatacgaagagcctaccaaactgtaggttagtaattgacgaacgacattcccctgggagaaacggaagaggacccaacgatgaattcttcccagactactaatggtcagccgcccaattcccggttacgagttccgctcgtgggctcaacggtaggtgagcagaccttgttcagtaattcattaggaggagtcatacctggcggatccaaccagactaatggtgccattccacctgtcaaccaagcgaatcaatcgttaaggaaaccaggctcttctgtgtttgaaaggttgggagcaacccctgacctaaggaacgatctaaatagaagaaggggaacggacgaacagaatactacaacgatcgtgcagcctggagctcgtactcaaatccccgcttagaaagacgctgacgtaatccaaatccactagaatgccgagcaggttagcccagccgtacaggcacaacatgacgaattgaaaaatatgcttcatggcatggctggacagcgtaataatgatcttgagttagaccgagcatgcagaactcccttctcaccagagatgaatctcctgccactgcctcacaagttcaaaatgccaacgtggaagatgcatactaggagagaagatcctctttcccatctcaagtactttgagatacaaatggatttacaaggagtacggggggatgtatgttgtagaatcttccctgccactctgtcgaaagcccctcaacaatggtatttcaagttggctcttggaaagtttagctgatggaaaaccttctcttcggaattccatgcgcaattctcctcctcacgtcagctcccattgcatttgggagacttggtcgaagtaaagcaacgac

SEQ ID NO: 231930 - DNA, 1633 bp, Cannabis indica
tcgctcagccatctcgagagtaggcattggtctttttgagatagttgtcaaaaacaaaagcaaaactaaagtcagcaaaatcagaattaaagacgtggaataatttaaccaagtcttaagcaagcaatcacttacgaattatgcagaaggtggttgtgttgattggggaatgaccagttgtccaaaaaaagtcctctttgaagggagtcttatttggcaacccaataatgatcttacgattgcatgtgtgggtcccgagataataaaaacctcctacaccattcttcctcgcaggaactgccttcaccgtgtaaagatactctatttccaggaaagtggtcccaattcaaaattttgtacagaaccttaagacttgcaaggattttgtaggaaataggaactaactggaagggagcaattccgagatggttgaggaagtctttaaagtagtctcgcagagggacaattgctccagcacttatgtgtttgaggctgcaagtgcctatccctatcgagccactcgtactggccttgccactagtcccctcaaatgcttcgcgagtaagtcgtttaggcaggtaacaactaaactcaccagcagctactgatctaacccgacaatttctcttgaattcgatgccataagtccttaaaaaagctcctacgtagtctccgatggcttgcaccttcgactctattagttcagcctcaaagttgacgttagggtctcggggagtctttgattttcgaggcttggaagtcataattttaaagtccaggtcacctgattcaaaagaaattgtgactctgggtaaaaataaaggcttagctagaggaattgatgataaattgaggggttcaggccaagcaacatctcgtaagaaacgacgtttgccttctgtaatttcttgcaagaagcgtctgtggtgactagaaatgtcatcttgatgggttttcaccaagtgttccctaatttttgcatcatttatctctaatttggatttgggttctgaaattttggatttatggcaagttcactggggcaatttgtttctaaatattctagacgataaacttctaaactagattgggacattgttgcaaaaagaaagcaatcccaattcctggataaaatttatcaaactagaagctagtaaatttgagaaacccaaaagtctacggtctgtctaaaccttaaaatttatccagaaacaactcaaccctaaatcgctaaaaccagataaggagataaaggtgcaaactaagaaagcagtgatcaaacccagaaataagaaataaacaacatgtaagaaaaagaaagaaagaggaatcacttactgtttgaagtcagtttctggtgcggtgaatgaaatcgacagtacgacgaatggtgtggtgatctctctgaatgcttgaggtcaaaaatcaaatcggatgaaactcgcaagaagtatgtcaaagacagagatggcatgcaaagtttcaaaaatatatgggtatgtttttttttttgcagaaaagctcaaaaaatttcaagaatttttgaaatggcaaagacattgaaaggtggttccttttttcattttatacaattaggtttatctctgtcagattaaggagacaattgatccaa

SEQ ID NO: 231931 - DNA, 586 bp, Cannabis indica
aatttgctatttatatttcaaagcaagttgttggctgattaattaattattttgctgatatacttgaatgcttggtcctatactaaattagcgacttgaccctttattaagttttcaaactgaaattacacatatattccatttcccacttgtgcatgtaagctttggtactataattcggttaatgtgttcattgtttaaatattatacgttgctaaaaaatatatataaaaatttcaattacaaaaattctattatgtattttggtaaaattgtttttcatgcttaatttgaaattgaaacaaattgtggacatgtaaacataataagaatagtattagtacagtcaattgcttgttattcctaaagaaaagcttaaatatacatatgaattaattatcaagcctatgcacgaacattctaattttttttttttgaaaagtcgaacattctaattgtaaaactagaatgttaaagtggtaaataaaatgtgtatgaatttgggaaaaagcaagaaagcgtgccaaattgactagtttaatatttatagaaaagtgatatccatttaggtttgattgagttggcg

SEQ ID NO: 231932 - DNA, 1137 bp, Cannabis indica
acccatttttctagtagtgataagatgttctttttattttctaaccgcccaacgagttaacacagatgcaaagtctgtggccctttgccatttggggaattgacctgatcgggcaattacctaaaggtaaaggcggagtgcagtacgcagtggtagcaattgactactttactaagtggattgaagccgagccactcgcaaccattacatcaaagaaagttcaagactttattgtgaagaacatcatatgtcggttcggactaccgtacgaaatagtctcagacaatggcaaatagttcgacagccaatccttcactgatttctgtgcgaaccatggtatcatcaaaagtttctctgtcgtggcacatcctcatgcaaatggccaagttgaagcagtcaacaaaaccttgaaggatacactaaagaagaaactcaaagatgccaaaggaaactggccaaaagaatttcccgaacttctatggtcataccctacaacgaaaaaaatagcaaccggtcagacaccatttgcaatggcgtacggttatgaagctatgctgcccgttgaactcgagccaccttcccacagaagattgacgtacgatcaaggtaccaatcacatactccttgcaaaatcacttgatgaaatcgaagaaagacaagcaactacaaacttaaagttgatggcccatcaacaaaaagtagctcggtatttcaacaaacaagtgaaagctcggaaattctttgttagagatatggtcctgagaagggtattcctaaacaccaaagacaggatggtaggtgtactaggacctaattgggaatgaccatatcaagtggtcgaagttctcgactccggagcatacaaattaggtaagtatgacgaaaaaatgcaactctttctagtacaacggttctggaatggagaacatttaagaaaatactaccaataaagtaccaggttgggtgaccactttaagtactaaatgaacatttgcttttaagtgaatggccttctgggcgaactacgcccaaatgttttgataaaagaaacaaagtactgaagtcgagtgaccatgtgaaagtacattttcttatgtctgcaatttgttttatttcacgttaagctaaaagatcaga

SEQ ID NO: 231933 - DNA, 810 bp, Cannabis indica
aacctgtgcagggtagcacataagagtcaattatttggtcattacaagtacgccatagtgaagaaagctaatgttcagtgtaaaacttaatttcaatgcatcaattctaaactaaatatgcactgtaaaaaacataacagcttaaaggaattttaataatcaaatttcttgcggtgtttctaacagaaagcagccacactttacaaatgtatagccaggcaataaaaatgatgagaaacccaagttaactggatagaaacgttgagactgaacacaatatctagtttaacaattttgtagcaacaacacgaaagaacataaatttgagatgaaaacatacatcatctatacgataatctgacactccttttatttttgcataaagctcgagatgctcttggacagttaaaaattctagcaaagcatcaaactgtgggcaaaacccaatctgaaaatgaataacaaaaacaatcagctttcaacagttaaaaatattttgagcaccaaaaaaaaaatatatcacaacatacctgctgacgagctgcctttggattggcgcgaatactttttccaaatatgtaagctgatccatctgttggagattcctctcctacagtaaaattgacttgtttcagacacaagcatagtatagaagcccgattgatagagtattgagatacaagaattattcatactggtaaccttttgaaatcgttacagtattcttttaatacttggaaacacacaaaaagataaaatcgccaccaatgacaaaacaatagaattggattgcacagttcagacatttga

SEQ ID NO: 231934 - DNA, 1232 bp, Cannabis indica
agactgggcagtaactcgaactcaggataataagtcgtcgtcgtctgagttgagcttccctttgacacctcgggctcctccttagccgcctcagctggtgccaacagaggaggaaaaatagcaaaagggcacatagctagaggtggcgcaacttcgactccagaagcagcgtaagtccctaagcccagtgctgcttgctcgaaatagggacagctgcagacctctgaaaaatgcaatggggggaagcgtagtaggttcgaagtcatgaaaactcgaaaaaggattcaatgaaagaaaagcaggatccaggggctgcaagcctgagaaaatgttggatgaggaaggctcttttgagtgaggcatctggtttttaagtagggaagccataatgcagaaaggataaacaaagagcttaactaaacttacccagaaaaagaaaagagagtcgaaagaattcttagagaaaaaagctcaactagaagcttatttatacaactaaaagattgcatgcagttaataaagatgccacaaaaacggaagcgaaaagtaactttttgcattaaaacacgtgccaagcgaacacgtgtacccaaatttcaagaagtggccctaagagtatatatgtctttccactttccaaagcaccctattcaaaaaaaaaaaacacggaataagtacgtataaatatatgtataaatgataagtaataaatacacttaacgtagccgcaactttcccaaccttatatgaaacgaacacaaaacataagaagggacaccaagagtaataaatacatacccattaaaagatcgtaacctaaacacaggttacacaaaaaaagagagaagaaaagacatagtaaacagcgattgtatacaaacgaaagccatgcacaaggaaataacaaatagctaacaaaacctaaacttaggaatcagaagcgctcgcgatcgggatggtgccagcagagtatgcatagagaacccgagattacgataaacccccgaacaaccctccttaggcaccgacggcagcccgtagggacgccagggggtaaaagggagccccctcccttaaaaattcctccatacgcctctcgttagccaaacactccctctccaggtcctcatcccaagcccgccagttccgggcttgcatacgacggttatcacagcggcgcttggcgcataagcgaagggtatgaaattcggcgggcacccttgtggtagctg

SEQ ID NO: 231935 - DNA, 895 bp, Cannabis indica
caaacaaaggtggagttgtggctgtggtcgaaggcttaagaggttttgttcctttctcgcaaatatcatcggttagtcatttaactcagtttcccaattgtgaggctctttagatattgaatatctgcaactggagactattaaatactagaccaacattcctccaggcttaacctcctaatgttccacacttggccatccttcttccttagcaaagctcttatttgaagactaaagcttggtatttatccttgtctgtctacaccaacatttcaaattattattttctattttattactgtgtactaaattactcttttctctgtttgtcgcaacactatcgaagatttctttcccaaatctctgcgataatcctccaaggttcaccattatatttctttaggtggaggtgtgggcagtggatttctgctcattctcgctggttatcttaatctcaaagccttcgagaagaggaggaactcatattttgctttgattcttgagacgggtatggatttcttttcttatttttcgattttctattgatgggttttgtgtgaggtttgcttttgtggacagattgtagtattctgattgattttagttgattatggaaaactagaagtactgataatgaaattgaaaaagataagaaactgatctggaatttcggctgctgtgtgatctatctagaacaccaaataactattaatttttttttttcacaaaaaaagaaatggttgttgctatcttgtattatttgaagtaactgcctttaagcatgatatttgcatgtaatgaattggttttttcaataaaatttggggtgtcaatatgaatggtggtattctgtttacttcctttgtttgtcaaagtactagatttgattttgttt

SEQ ID NO: 231936 - DNA, 1012 bp, Cannabis indica
ttttacaaaaatacggtctgtacaaagtttttagtatttttaagattttttaaattttatttacataaaatacagtcgttttgtatatttttatgttgttttcttgttattttgttgttaattttttgttatttatatattatttttttatattattttgatgtgtttttttttttgcatttttgtagaataccttataaatttttttaaaaaatctaaatgtaaaaatataattttcttacaaaaaattgattgattattttttatttaatcaagaaaaatgtataaacgtaccatatattgaatacaattttagataagtaccatacttcaaattaacataaatatatttgaaaaatgctaattaataaaaactttagaaaattatcacattttacaaaatatatttgaaaaaacgaaggattttctcagagttgagcatagcgaagaaattgtaaagccatgagaagcacagtagtagtcaggactcttctcaagttgtctcgcaactccaaactctcccttcaatcaccactaaatcacactcttttcaatcccaggtctctttcttcctcttcttcgatcagtgttacagacaatgaaaatgagccaaaacccagaaaagacttgcaactcctcgaacagttcaggctcagaaaactcaagggctcctctaaaaccccaccaacacaaaaatctgatcctaatccgaaaagggtagttggggttttgggttttaaggagctggggttgagtcaggagctgagtgaagctatgacccaattgggttattcgtctccttcagagattcaaagtgttgggattccagctatcttggatgggaagaacgtggttctatgttctcactctcattctgttgatgctttcacctacttggtacctttgattcaggtaatcaaactgagctttatcctatataatatacgtactgataccgtatataatacacctttatatacagttgctgagccactcaattaacaattctacc

SEQ ID NO: 231937 - DNA, 662 bp, Cannabis indica
aaacaaacccccaatatgtcacagaatcttgattagagccaaaatgaactaaggatatacatatatccataaaactaaatactctcatattttgtaccaaaccgttgccatataaaataaaagaaaataaaagtcagatgttaaaagcaaaaaatactctcagtaactttagaggttttctagttgcttaagagtcatctctgcctgcaagaaaagcattactatgtcagactgctatgaagaagattagaagggtttgagtgctcaatcgtatcgacccaatcgttcgcctattcagaatcaagaatcatttgctaaacactgaacactaaatcgaccattccgatgctgaaaaggaccaatctacaacccaatcaacaacaatcaattccgaatcaaacatagacagctcaatcgtatcaacccaatctttcaactcaattgaccattctgaagctcaaaaggatcaatcgacaacaaattgaaatcgattctaattcaaaaatcgcgtgctcaactgtataaaagtacatataaggagaccctgcactgacattcaagtatgtataagggttggcgatcaacaccacactttctatttcacaatctggaaaaaaaattctgacttttttcctctgcaggttatggattaattaattgat

SEQ ID NO: 231938 - DNA, 710 bp, Cannabis indica
aaagggttttatttagggcacaaaacccaacaatatcaacgtaacagcctttaggtcatatgaagctagtcgacctaacatgtcattaaaggcgtatggaacgtccaatatcaagaattgtgccattacagttatgctctttggatcttgcccaacagtgaggggtaggtgaatttgccctagaggtgcaacactctggccggagaaaccatacacaggatgaagacaaggagttaagtctttgagttggagccccatcttttcatatggtgttttgaacaatatatttgcagaggctccattatctatcatagttcgggccctcatttttctggctatgtggacttccacgaataacgatcattgtgtgggaaattaatcttgacagctttttcatcattaatatcagggtggttcccctgcccatggtatttttggcttcctttcttcgacggccagaaccacctcttcttgctcgtgctgtaatgttcgagtaaacctctcccaggctttccctgaatctccagctatgtgtaggcctccaaatgacttgcaaatgtccatctactagtggtgggaataaatcttgattattatccgtctgggtggccctttgattttgatcggtgctaacatatttttgcacttgcgggttattctttcttatcaaaaactcaatttcctgcctcagattgttacattcattggtg

SEQ ID NO: 231939 - DNA, 562 bp, Cannabis indica
gcataaaacccaacaaatacttgtctggtgactagtgtaagcatgtcactatattctggtttatactcttcatcttctacagaaacatcttctaatggtggcatatcaataaactcttcttcatcttcagaatctacctcaccattttcacgaatcaccgtaactctcttatttggacattggctagctatgtgtcctctcccctaacattcgaaacactttatctcactagaacgagatgaaatagggttgtttttcgttgaggggttgtagttacagtagctagtttgggtgtggaggatgaactaggttgatcccctttcttttggaagtttgacctccaaggtgttgtatttggattatgtggacttggccttggctttgagctcaaactacccttcttaagttggctttcaactttgattgccatatgcaccaaatcctccaatttcacataatggtgtagttcaactgtattaacaatctctcgattcaatccattcaaaaaccttgccattattgcctcccgatcctcttcgacattggctctaatcataaccat

SEQ ID NO: 231940 - DNA, 772 bp, Cannabis indica
attgaattagatttagaagattttgatgcaatactgggaattgattggttgactaagtaaaattttaccatagattgtaagacgaagatggtggcttttgcaccagagggtgagaccccatttatttttatgagaaaggttcagggatctcagattctaattatatcagcacttaggatcaggaaattactgcgataaggatgtatgggatacttgatggaccgaagaaggttcaagtagtatgtacatttctggatgtgtttctggaaaagttaccagggttaccaccaaagagaaagattgactttgagatataattggtactaggggttgaaccagttttcaaggccccgtatagaatggcaccaaaaacatttatggacttaacaaatagggtgtttaaggactttcttgacaactttgtgattgtgtttattgatgatattctagtctattttgagtcggaagaagctcacgaacaacaccatcaacgagagacttactacaagttggaatggtagtctgcaccaagggattgtcaaaatagcccctatttagattgattctggtcgtcttcttaggtgaagtcgtcgaaattaatggtagttttctttctggttggattttcgtttcggttgcgctgggttgctgcgtggttacacgatagttgcacgatagtttcctaggaagcatggatcctgggttgaaggtgtgtgtaagtggtatttgtgtattttttttatttggggtgtatatttgtttatttggccag

SEQ ID NO: 231941 - DNA, 1482 bp, Cannabis indica
tgggcctgtcatatagcttcttcaagtttttataaagccaccagctctatcaaagaactctttcaggttgttaattgagaccctccggatgtctttcatgtagtcattcaatgggagtatgccccccagtatgattatatatcggccctcctctagaagaaatttgtgggcttagccaacctctagatgtaatccttcaaaagttctccttgtcattgtttgacatcgacaagatcttctagctgcgatggtacaagacttgaggacgagaatcgtgtgtgaaattcacggtagaactcgtcccatgaattaaattttgctacggcaagtttgaggtaccattgttgagctattttcaactaattggatgggaatattcgacatcacacattaccaaaaatcttctagagttcgagctacatctcgaagtacttgatgtgcgtcaatgggtcttctaatatgtatacatcttctatatcaacatcttgaatttggacaagtgcaagacatttatgtatgaagagaatggtgaactgcttgaccggtctagttgaagatccgaaggttttggactagctatgccctgaatcatatgccttagttggtccaaatgtgattgcagactctgatgtgatagggtatggccggccatactctaagagagtgtatggtggaggtcatccagacctctgttgtattgtagaccttggctggctactcccaagtatggattttggctatggcccgccaaccctacactagggagctgtccatggcttgccagacctgcatcacgtaatgtctggccacccgtaactcccaaattgactaatgtcatcggtgagttgataggaggtagatcacactagttgctagagcttggtgcatctaagtacctgacgtgattagtttcacttctcaaattgttactttgggtatttccactcgctcctggtcctagtcagttgaagattggcctttgaatcactctctcccctcgaggaggagtgtactcgtctggtcagtcagggggactccatgaggtgtctagccatccaaacgctagttgatgggggctatgattgagcctgagatccctagccggccccccataccactagtttctgagatctggctattcttgccattatacctttgtgggaaggcctgtcctccttcgggtaatgcaaggtgtctcttggctcctaaagaaccgggttggttaggttactgatacaccctccctgatctatcaacaagtcttcattggagtggatctctaatgagatcctagcgtcatccattggttccctgagtgaaccgccttatcaagtccctggtctctctattgcgacaatctaactctgcctggtgagatcaaaggatgtactcttggtcatccatccacacatggaatttgcatctctaatgagcaaatacattgcaatcagcaacggtggtcttagtgttagctgtcacgac

SEQ ID NO: 231942 - DNA, 909 bp, Cannabis indica
ctcgtgttggtctgtagggtcagacatcagtccatgaagcagccagagtgtcgtactcgtgtataagagccattagtccgtgggtgtaatggctcaatggaggcttgaagcggggatgttacaccataactcaaaagcatctaaaataacatgcaatgaaattcaccatggatgagcaaagcttctaaggtggcaaatcttctaatgagtgatggggattgggatatccccaagctcgagtccctgattgactctaaaacgatcactgatatcctgaaagggggaagccttccagtaaggggagagataggtggatttggactaaagaaggaaacggtaaatttaccactaagtctgcttatttgcttcaggcttatgagagagcccccgtctatgtggttgtgccaacattatggaacaaactatggaattctaagattttggaaagacaaaaatcctttggtggggtatcctttcgaatgctttgtcggtccgcggtatcctggctaagagaatccaaattgaagacgagacttgccccttgtgtggggaggctgaggaatcaatggaacacttgttcctctattgcaacttcgcttaccatctctggaggtcttctccctgggggggtgttcccgatccatgactctggtggtcgggtctgggatcggggtagactcggataagctattcctctatgcttcagtcatcgtggaaacaatatggagaacccaaaatgacaaggtacataaattgcaaccgagtaacattataatgaccattgactctatctctcattgttatacagattatgtggcctgcttattccctccgacgttacctatggcttctcctgcttggacccctccgcctgaggactggatcgaaatcaactgtgatgctagggtt

SEQ ID NO: 231943 - DNA, 1217 bp, Cannabis indica
ggtctaacccagttatgtctcactcgcataagctttgacatatattcacatattcaatatcttcaatgtatatcataatatatgaaatctaagggtaataactctaacttgcataccaattaattacccatataacatactctatagcatgctcgaaataacgcttatagagggtaataaccccaattcatactttcacttgattagcaatattattgtacatcattgtttccttaccttcgtatacgtcctagggtaataaccctagacaacatcattattaatttagggtactaatttactgagtctaacttaattatgcctttagtgcataatcctttatttcaacatatttagcatggcataacactcaaaatcatttgattatttgggtaataaccctatgccagataaccgctcactttagggtgataagcctaatcccggttcttaattaatcacatccataatataaaacatgagcgccaccacgcttagctctacgtacaaactaatatcttacctgatgttccgcttatatggagattccaaatcccaggtgcttgaccaagtgccggtagtcctagtcacaatttttgggattcacaaaatagggttaattcctaaatatactttcaataatcacataattatcattacatttacaaattaacatatagatcttgaaacgagctttccataaagagcgtccaaaatggagttccgagtcaaaagttatggccaaaacaaaaattggccttcctcgatgcagtccaatcgaaattccgattggaacaaccctgaaccaaccggaattttggaagtctcggcagaaacaacacgaaaaaatctcaacttttaagcccctgtaacatactcaaatcttctctaatcacaaccaaattttcaagagcatcataatataacataacaaacatattttacatctcaaacacaataattgcaccaagaatcaaaaagtgtcattgtcagaaaacactgcaccgacttgtcagaaaaaatctacggaaaaacaacacaagtatactatataataatgtagtctataagcacgtcataacattaaaattactgttttatccttctcaggtcaaaattacaaaaacgaccctggctcacaaacgaggtcttaacacgttatttctcaatttaattcatataaagtaaattaattaataatataattccatataaat

SEQ ID NO: 231944 - DNA, 946 bp, Cannabis indica
ttgggatgaagtggttcttaaagacatttttttaaagacggacgtaaagcttattttgagcattcctttgttcccctcaatgtttgacggtatttggaagtggaatggtgagagttctggtgtatattcgatcaagagtgcgtatcagcttcttcaaaagcttaaaggtgagttagttggagttggtaactcgatcttttggaaagagttgtgggatttgagagtgccacctaaagtcaaggatttggtttggagggctgcttccaattgtcttcctacccgtatccaattaggcgtgaaacatgttcctctttcccttgttgtcgtgtccaaggtggttacgagttggagagtctatttttcattatcttgtggggtgttcgttttcttttgcttgctagcagatgacaggtatttcagtgatagagattggtgacaactcttttgggggatggcttcatgatagatttcagtgttgggattttgggatgaaacatagagttattatgctttgttgggcgttgtggtctgtgtgcaatgacaaggtatggaatggtaagaataagactgtgattttgttggctaagggtagttttgatcaatggagttgtgcttaagataaaaattttggttcctctttattttctttacaagacagtgaagggcacgagtactggattgtaccggttggtaatataattaaaatcaatgtcgatgcagctatctttagcaatcagaataagtatgggtatggttaggtgacgcgaaactcttatggtcaacttagtatggctcagacagccggatgggggtgactggtcctgttcttgctaaagctattggggttaaaaaagtgttgaggtggttgaaagaaataagaccgcatgatgtggtggtggagtctaacagtttggtcccaatccaagctatccaaagttcgttagat

SEQ ID NO: 231945 - DNA, 1929 bp, Cannabis indica
aaaaataaatgagaaattagttcctaaagtcaaaattcagagtatattcaaggtgaaaatgatcagctcaattgatactgatgcagacaattgtatttataatgcagcagagtacaaacaggggaaaatggccagtgatctgagccttacacgtggagctaatcaatacaggcaatcattacaatcattgcataacagaaaatgaatctctaaaaatctgtgctaacggtaaggataggacaactgtgattgtgcatagggattgcaaatttccaacaacttgggagatcataaagactgaaataccccctgcatattttatcctgtaacaccacccctcaaacgagagggtgatgaagtcactccgagtttgtcaatcaggaattggaatcttgaatgtgcaagacctttagtcagactatcggcaatttggtcatgagatggtatatatctgatttccaactccttctgtagaaccttgtctctgacgaagtgcacatctaactcgatatgctttgttctggcatgatagactgggttggcagcaagtgcactagcactcatgttatcacaccagattattggtgcagcagggagtttaaacttcatttcttttagtaactcctgaagccatgtgagttctgcagctagttgagccaaggctctatatttcgattctgtactagatctgcaaccaccgtttgtttcttagaggaccaggatacgagtgagtcacctaggaaaacacaatagccagcaatagatctccggtcatctggaaaacacgcccagtctgcatctgagaaacccgtgagtgaaagtctatcacttggggttatgtgtatgccatgctgcatagttcccttgaggtaccttagtacccgtttggtggcattccaatggacatttgtggggcatttcagaaattaactgagcttattcaccgcaaaggagatatctggccttgtatgactcaaatatagtaaggcacctataacacttcgatagtgagaaggatcggccattggttctccatctcggatagacattggtttatttgctatcataggtgtaggacttggctttagattcatcatgttaactcgttgtagtagttcagagatgtatctcccttgtgatagataaacacctgtgttatcccgaaatacctcaacacccaagaaatagtgcaactctccaagatcctttaatgaaaatgtcttgtttagtcgagcaatgaacctttccaattctgttgtcttgctgcctgtaacaatgatatcgtcgacgtaaatcaagaccataatgacatactctgagtgttttaacatgaaaaaggaagagtcagctttggaattcacaaaatgccactgcagtaatgtgcttttaagttgctcataccacactcttggcgcttgtttcaggccgtaaatagacttctgcagtttgcagacataatgtggcttagatggatcttcaaatccttgaggttgggccatataaacatcctcatcaagtgtaccatttagaaaagcgttgttaatgtccaattgccttatagtccaattataggccacggcaatagtcaacacaactctaatggtagaggctttaattacctgactgaatgtctcactaaaatccaccccggcctttgatgaaaccctttagctacaaggcgagccttaaatcgttgaaacacaccagctgcatcaaatttttctgtgtaaacccacttattaccaaccacattatagtgtggtgagggaggcactaacacccatgtcttattttgacgcaaagctcccatttcagtattcatagccaagttccacccctcatggtggagtgcctcctgaacagtaagtgggacaccagaacctgtgtgagaaaccagaacccatggcttaaaaatcccagccttgccac

SEQ ID NO: 231946 - DNA, 866 bp, Cannabis indica
agtttctctccacaatatgcatccaataaaattctcaattctagaagattgtaaagactttgaagcacattcagtggatcaacttccagtttcgaccattgtaggtgaatcttaacaatattattaagtttcgtaatccaattgggcaactttctcaaacgcccttttaaataaagacgttgaagatattgaggaggggaagaaatagattccaaatcaattatctcattctcacttattgaacttacataaatgacttcaagatgactcatcttctgaacacagtcaaaaaactctttattatcttcacttctcaacatagtgatgcctaacgttctcaactcggtcaactttttcaactcttcaaatatgttaaatcccacaacattcacctcaattaaatataacttttgcaaagcttttagctctccaattcctttctgtacttttcctccttctgtaattttacgaacagaaagatgtcgcaactttttaagcttcttaatctcaatcggtaactcaaccacaagtgactgcttcagatccaaagtctctaaatgttctaacattccaattgattttggtaactctgcaacctttgttttacgaatgcttaagtatttcaagtgaaagaggcttccgatatttttgggaaggtgatctaaatttggcgcatcttcaaagtcaaggacttttaggagcttaaaattgatggagatagcacgtaccacattatgaggcaatccttcttcaccaaaaacaaaaagagatcgcacttgggcaagttcggaagcactgttttgaatagattcgtaacatccgccattgacacttgatatgcgtctgttaaacagttaatcatctct

SEQ ID NO: 231947 - DNA, 781 bp, Cannabis indica
aagttagccaaagaagtggaattaaatctcggtgatcatcagcggaacgagctagcgaatcgctgcgatgagattgcgatgatcttcagccaggctaaggagtggctgcgccgaggtactactactacaagtgatgatcaagatcattacaataataacatgttggtcacgcaacaaaatagtactagtattggccatagtagtgggagcttattattacaagaattgctaattaggccttcttctactactactagtattcatcatgataacaataagagcatgtctgatattgttatgaggggttttgctcatcctcaacatgaaaataggaataatatttccaataatatgggtagaaatgtggaaattcttggctcatcatcatcatcagcaatctactcacaaagaccgcgaaaaaggtaacttaataatttatatacattaagaatatttgctaaagacactatatatttttattgggataatttagttttgaatcttatatattttaatataaaataaaaatacataaaattataagaatgctcatatatgttggtgatatcatatggtcatttttgtttaatttatacatttaatcatatataatatttcgtagtatctctctcactctaattgattaatttgttatactcacgcagctttttaattatatattatagctattagctagttttggttcacaatgatcttcctcaatattaaattttacatatatgtatccatatatgtaatgccatggttgttgccttgttgg

SEQ ID NO: 231948 - DNA, 1685 bp, Cannabis indica
aactcgaagaggataaagtactcgatcagttaatgattgaaaaagtataagaaccagtaaatttgcgagtcactcaaggtcgaagtccatgagcaagacaaggtccgtgagtaggacgcaatctgtgagtaaaacgaggtctgtcaacaattactcccaaccagatctgcgagagaacttgaatcgaaagaaacttgaccttcgccaacaactctgtccaatgcaagaggatcctatccaattgcaaatagacgagttagaggacaagtttaggagatatcaaggtgggggaaccagggaggcaatctggatactactaagactaggagcttgagccgtatcacccagatatcatgaataccctttctccttcgggatttaaaaacccgcatgtctcatcgtatgacggaaccattgatccggtcgcgcatttgaatagctttaatacagtaatgcgagcaagtaatgtgacaaataatttacactgtatctagttcccaacctcacttgttggagcagcaagcagctggtttaacaagtttactcacgattcaataacttcctaggaacaactgtccagggatttcaagaaatagttccaggctgctagggagagacgacccgaagtggcttcactaagcaatataaagcaatagtctggcaagacacttaaggcatatttaagtcattttagcacggctactgctagggttaaaaatttggatgatagcacggctgctgccagagtcaaacagtacagagaagtaagagttgttgaccgagagctgacctgttaccactgaagggttggcttctgcatcatcctgagttatgccttcctttcttggtccttggccgagccactacctcccctacgaaaacttgatgcagaagggtaggagccctgccaacagctgaagtcccaccagattctatcatgcatcccactacgccctcagctcgtagtgccttatccaccatttcagcataggtggttctgttgttagtagtaatcattaaatcgtgtcggatttttgcatttaacccatccaggtacttctcttttttattgaaatcaattggcacaattcccgaggccaacctggtcaaacgatcaaactgagtcgtatactcagtaacgctcatgttttctttttgagtcaaatgggtgaattcttttctctcggcacctctgactgccccattataatacttcgcattgaaaagttcctggaacttttcccaagtcatcgtcgtgacatcatgaatcatggacaccatgtcccaccagaccagtgcttcttcttgaaatcggaaggtggcacagaccaccctatcattaccagtgacgcccataaaattccagattctagtaatcactgttagccattgctcggcttttataacatccggacctcccagaagaactggaggtgcttgcttgcggaacctttcatacagaggttccatttgattcactgcaaccactagttcggcctggacagcaggggcaggtgccactggaatttttggagcaggcactgcaggatcaccctgctgtctcaatcattggatttcattatcttgttcctcgattctggcttgcattgttgcaaacctattttcccaatttcgggcatcctgagcagcttgggcagccttggcaacctgtggcgagttagcat

SEQ ID NO: 231949 - DNA, 1050 bp, Cannabis indica
ccataaatgtcgtggcatttgttaatccaaaggacatgactaaaaattcataatgtctgtaccgggtccaaaaagctattttgggaatatcttcttcctgaatcctcaactggtgataaccagatcgaagatcgatctaggagaagacggtctttccctgcagttgatcaaataggtcatctatccttggcagtggataattgttctttactctcaacttgtttaactcccggtaatcaatgcacattcgtaaagttctatccttcttttgcacgaacaaaactggtgcaccccaaggtgaggtacttggtcttgtaaatttttaaatccaacatcccttgtaactgaactttcaactctttcagctctgcaagtgccatcctataaggtctcttgatacaagctctgcccctgttattagatcaatctcaaaatcaatttcacgcttcggtggtaacctgataactcctctggaaaaacattcagaaactctcgaaccactaggacatgcctcagtcctgcttgtggttccctggaagtatccactacgtttgctaggaagctgatacacccctcacacaacaaatctcttgccttaagtgcagagattaggggaatctgggatccttgcatcttacccacaaatacaaagggatccttgccctcaggctgaaaagttatcatcttcctcttgcaatcaatagttgcattatatttagcaagccaatcatacccaaaataacatcaaagtcttccaaatttttagttctatcagatcgactgacaattctcttccttccataaatactggaagggatcgaacccacctgttggagataactagctccccagtaggcagtaaagttttgaagcctctagaaagtacatcactaggcctattcaaattctcaattaccttacttgaaacataagaattgttgggttttatgccctaaataaaattctatttcaatgaaatccagattattcaatatcaaaaagtaatagaagtatttttcattcatttgtgtatgttttggttcactttat

SEQ ID NO: 231950 - DNA, 1119 bp, Cannabis indica
aacggaaggagtcatattattccgctgcacccaatgtaaggtttctaatactttatatgtgtttatttcataatcattttagaagttcatatttagggtgttaatcaacatacttttgagtagatctaagatcctggtaaaataatttccaacagactccaactggctctttcctatctatgaaggtcctttagcgagtgccttaaaacgtgactccaaaagccttcatactcgcttccaaatgaactcttacttaggctgacatggagatcgaccttgcttaaaggagagttggttaagtcagttattgcctaactaacttaacaacctcgattcttgtagccattaactttaggatcttgatcctaagcctataaataccaccaaaacttatcatttttagaatgacaaccagattgagttaatagtgagagagagagagagatatatgtaaagagaaaagagagagattatgtttggattttgtaagaagaatctgttgggaattgtcaataatatccctacacaaagtcaactcacacatacaattcacaaggtctatcttgacctttatcaactcagcaaatggacaaaaactgtccacgaatcacatgcaatatcaacacattacattaattaaaatcatctaactttaccaaattgaatagcaagaagagtgatcaagtttttttagcttagtttcgatagggttaggttcaaaatatgcacgcaatgttcaagtgattgagtttgattatgcagaagaaagtcaaagaagaagagaagcaaacacagagattttatagaggttccccctgagttgatgggctactccactttgagctcgcctcagaaatgagcaaagcccttgcactattcaatcaagatccaatacacggtttaatgaagcttccagctataagatcaactggtaagacttgatttcctctctctgcttagtttcctctgattctactttcttttttttttttttttttttttaatgaatcagagaattatattgcacaaaaccactttactatcctacggagcacttcacaattagtaagcctcaattaatacatctatacatactttgtatttacactatacaaatac

SEQ ID NO: 231951 - DNA, 600 bp, Cannabis indica
gaaaagtatgcgtacagtaaaaacaattacaaactatattattttgccaaaattccatgaaatgagtaccttggaaatatgtcataaatatttatttgagaaattctcacatatacaaataattgattattcattaactattgcaaccttaaaagattataatgattataattattgtgaaaaactagtagttccctagtatactaataaagtaataaaactggcattaaagatccaaggtacctaacactaacagagaaagaaacctgcatgaggatctcacactactatcctgcaatatttgaaagttgacccttaatcagaatcttcatatacttctccatcgtccgatagatcatcgaaagatctcatgtcaagctggtatcgaaggatacctccaatcccaccaaatcctctgcaaaattgtgatccttcctgggatttgttagttacaaattcgagtgtacaaccgaacctcttgtactcgttggcaaaccactcaagtaatggcatcttctcctgaacttcaagctctgctgcagtagctgggtcacggaaatggctctggacattatcttggtccttgttcagatgcttcac

SEQ ID NO: 231952 - DNA, 797 bp, Cannabis indica
gagcaagcccatcaaaacttgccttggtcctttctagtccttttggttggtctttcttcttcttcatcaacaggactccaaggtcacgtgagcagtgagcttcttatgggacaatggcggagcttggcaaaggagacaatggcggagcttcttcttcatcttactcagattctctcaccatattttcttcttcttgcaagtcgttatcggatctaggagatgcattcagatctggcttcttgagtccggtcagatctgggaaaagtcgaatataggctgggttcccttgcccttcttctcggcttcaatggcgaactgaccccacaaaatcgagatctcagtcgttatctgcagagatctcaatcgtcctccatcgattttttttttccagatcacagcttggtgtggatgggtttttcgaattttttttttttatgcttttgggtataaatctagttaggagttgggtgggggtggcttcagtatggtgtattgatggtggtgtggttatgggagagaggaattaaggttgtgtttgttgtggtggtggtggtggttatgggagagtggaagttactgtagagagagaagtggtttttgggaagagagaaatggtggttatggtgggagtagttttgggagagagagggagttacgaggagggagaagaaaaaaattaattatgtaatttttttttaatttttaattatatttatattattttatttttttcattttaaaatattatttttattttttttaaataatgtaattacgttgggcctaataaaattgtg

SEQ ID NO: 231953 - DNA, 1358 bp, Cannabis indica
ggttatgaatcaatggtttgatgcagtatttactttgcaaatgttcaaagttggaatgaggtttctttactcagttgaatcccattagcattatgcaaaacttgttgcattatgtgctttgatcatcgcatctcacatagattaattttgttggaggaatttacttgtaggttttcggtttaaagcttaggagctatttgtgccgttaatgttcttaagttggatatctccctttcgattgcagaacactaatatctcgtttgcattcaggtcataactaagaggctttcagaagaagaaattggcggtttaaaagagttgtttagagttggttatgagctcatgaaatctgaaatcaaagatctcatggatgcagtaagaggatattactaatttcaccattagattcgaaaatgggcataacattttgcttgtgagttatttgcaggcagatattgacaatagtggaacgattaattacggtgaatttcttgatgcaactgtgcacttgaataagctggaaagagaggaaaacttattgtcagcattttcatttttcgataaagatggtagcggtttcataacaatcgatgagcttcaacaagcctgcaaagagtttggtttgaacgacttccacctcgatgagatgatacaagaaatcaatcaagataatgtaggctttttgttttgttttttcgatggagagaaaaatgtgttaagcattcaaaagttattatccgaaatcacagaatggacaaattgattatgggaatttcttgcgatgatgagaaaggtcaacagaggaataattaggcaaacaatgcgagatcagatcaacgtgggaaatgctcttggattgtctaactccaattcgagctccagccatggagatggaaatagagttcctaatgttgatgattgacataatttagtaacttccaccttaagagagattgagaagaatttttggtggagtgggagtggatagtctttttaacacttgaatgttttactaatttttaattttaatagtctctgaatcttttatctatgttctggtttatatcttctgtatattactctttagcttcttgcacatgtcatttttgtagcattgacatatctaatctcttagattcaaagatgtagtttctgtgtgcaattagtttctacttggatttttatagtcttgacaagtattgcattcaggtttctttttttcttgtttcacaatccatggattaagatatttgaattctctttgattctgatcattttgctaatccctagagtatttcataatctgtaggtacctagccaagaaaccagcttgattgttagatgtcgaagggtttatg

SEQ ID NO: 231954 - DNA, 746 bp, Cannabis indica
ctaaggttcttaattttaaggttggtttagttttccacctaagttttccagtttctaaattgtttcagacactcagtagttaacaagtatgtctaaacacacggactgtaatcattaactatggaaagaaaatgtttcttaacggagtgagtagggaccttgtatggtccccagaggtcagcgtgcagatattcaagtactctttacgttgtgtgccttgccagagtgaacttcagcttatgttttttacctagaacacaagcttcacaaaatggtaaggcacaagagtttaaattttcaatgataccttgtttgtgatgttctttgaggccttgttcactagtatgtccaagtctctgatgccacaactttatatccgattctagtcctttcaccatactttcctctccagatgacacaatttttccttggagaacatacaaaccatttatcttttcacctttcatcactaccaaagaacctttggtgatcttcatgttggaatatattttaccaggatctaaatttactaacaagtatgttaattaacaccctaaatatgaattctctaaaacaatgtaattaaacacatataaagtttaagtaaccttacattggtggcagcagaataataggtctccccccactcagatctccaacccttgttcctttctgtcacagagttttatcaagatttgagcccgattctccttcaagtgttggattcttcacagtcttacacacta

SEQ ID NO: 231955 - DNA, 1818 bp, Cannabis indica
aatggatcttcaccttctagctgaaaagtcactattttccgcttgcagtctatactggccaaatacttagacagaaaatccatcccaagtatgatgtcaaactctattaattctagctctataaggtcagcactcaactccctatcttcaatcttaactggcatagacctaatacgtctattggaaataactaactccccgctaggcattaggttcccaaaccctctttcaaggaaatcataaggcctacccaaaagatcaaatacccgtgtagccacatatgagtttgtagctcccaaatcaaataagacagtataaaaggagttattaacaggaacctaacctgtcaccacagaaggactggctgaagcatcaacttgagtgatggcaaacacccgagcaggtgcaggctttacctttggcttctgcacttctttatttgcttgagggtaatcttccttgaaatgccctaccatgccgcactgaaagcatgtctttcagttgcactctctgggatgatgtttcttacaacgtgggcactcagggtaaaagtaaccctggcgtccacctctgccttggttcccacagaatagcttgctctgccacgagccaccagatgccaaggtaacttttctcttctgatcagtggtggaatcaccactatccctaccataagtaggagtaggaagactgggggtcccaccaacacttggagtcacacagggctcctggagaaactttaccgcaccctcagctcgtagagctttctcaaccatctctgtatatgatgttgcctcattagtagtgatcaccaaatcatgtctaattttcatatataaaccggctagatattttactttcttattgaagtctgttggcatgatacctgacacgagcttggccagacggtcaaattttattgtataatcagtacccgacataccctctgtttgcactaactcaatgaattttttccacttagcactgcggactgcttcattataatacttggcattgaataactctcagaactcttcccaggtcattaccgtgagggacaccaactcccaccacaccagggcatcttcctggaactgaaatgtggcgcaggtcacttgatcatttccaaccacccccatgaaattcaaaattcgctcaatcacagtgagccactgctcaaccttcatcacatctgaacctgccaaaatattggaggtgcttgcttacggaatctctcgtataatgacgctccatacggttgccagcaacaggctgttcagctagcatcgctggagctacaaccacctgagcttattgtggaggcacgacagaagtaccttgctgccttaatcttagaatttcttcttcttgttggtggattcgatcttgcatctccgcaaacctctgctcccaatccgtaggagcttgtggtggatttacaggatgaccaccttgaattctgccacggcctcgaccgcgaccacggggatttcggagaatttgatttattgaccgccttcggtctctaccatattaccctgacttcttgtatttcgctgggcatccatttaataggacttagcctacgaacccataagccaggcaggttagacggtgatcataaaacttaataccgctcttatggattatacatgtcttggcgagcttcggtagacaaacctggcgggcttgataccaaaattgtaatgccataatgctaaggaacgctataatgatttttcaattacaatgctatgtttgctaatcaaagaacttgctcaaaaatcgtgtgaaataaaaacttttatactaaatatt

SEQ ID NO: 231956 - DNA, 1229 bp, Cannabis indica
tttgatgttgctgagattttctttgggtttttagttggcaagattgggttctgattataaataaaataataaaaagtttggagagtgtttctgttttgactaagatataggatataaccattataagcatgcttgttactaaaaaattaatctttgaattactggaagtagaaagagaaaaaaagatggatgatagaacaagctaagtagttatgcaatgttacaaggaagcttgtagctcgttggtcatgtaagcatgggttctgtgaccattttcttctgtttacatgatattttgggttgttttgcaatcttgtaactgtggattatgagttgggatatgactgttattatctcttttcattttgctaaatgatattgtaatttggaaacctttttgtggtgaactcatttctcttctgctaagccccaatcgtgccataacaacaaatcaaaatcggagcagttttgacacatttgaatcattgtattttctctgttttatttggttcaaaatgttaatgatcattggtatttattattttgtgtattgcattttctctgttttgagtggtgaaaatagtttataagtgatgttaatttgaaactcaagtgcattgcctcagttggggcataccaaattcattaatattactcaaaccagctcatagaaactcctcaatgcttgtacatattttatatatgacaacattactactctaaaaacaaattttcaattttgtttggtaattatagttatatataaattagaggtacaagggcacgtgcgagcctctcttcgcctgtgtcaccgaaattactttaaattacatataaattatattacatactacttctttcgtgtatactgactagatctcaagtcaactaggagtagtgtgtgttttttaatataataaagatgtgtacaatataaattacattaaaacagatgggactcctttaaatatagccattttttttaagtgttattataagatagctcgcattattatgcaaaataatgctctggtttcttactttttcattgtcccagatgatgagaaggatgaatgggcgtgacttttgattgatggctctctttagtacacagctcggaaaagagttagaaagatcatgtttattcactttgatctaaaataatttgcaagacaatgtatatttagccttttagacatttcaagttagtatacaaattataatctttt

SEQ ID NO: 231957 - DNA, 1740 bp, Cannabis indica
  modified_base (1683)..(1683): a, c, t, g, unknown or other
tttttaaatgaagagtaatcttttttaaattagagcattgctccaaacaacacacaacaaattgaaggaaaaattaccctcgtgaaaatgccgattacataatatcaagattgtctagtgagtaactcgattaacaaatcgtataataaaatataaagatatattattgtgaaacttaaatatgtcgatttcttctaagtagattttaggaataaaacttgtctaaaattgcagaaagaaaatcagtaaacacatggaatttacaagcttcatccgaccctaaaaatgcattctaggcgattagtgcttgagttctcctgatcaggataataacttttcctatgaatcaatcaatctagtatccagatctgactacaatttctaaatagtaatccaaaaattaattcatacaaagattaccctacaaacttgatcaccaatcaagtttaatcgtctaagtctccttagacttctaaagccaagatctctttgctttctcacagctaaaatcctttcaataacttaatttgaactcccttcagatagaaacaaatcattgattctcctttagctcttgaagatccaacaaagaatgacctgcaaataaaccaaaaaacacaaagaaaaagctatactctaatagagaaaaaataacaagagaaaaactttcaaagaagaagagttagttagaaaacagttaatcacagattatatactaacaattctactaaaacaatcttaacaactgaacaactaactaaagacagcggcccattattcatgccaactaatgctaacctgtcaaaaataagcaaacaccaaacccaaaacaaccaaaaatctgaatgagactaacaaccagttaaatgaccaagcacacataatttgccaaacatgacaaactggatcttacaatctcccccttgacaaatcatacataacgaaattatcaaagagacaatacaaaataaaagaacaaaaaaacaccacagaccaaaaagaacaaaaaaaaaaactgaaaaaacaaagttccaacaagaaattcttgataccaatagaatagaataaaagattcacaactaatcacaaaaaaattacacttagttattggtatgcctaacaactgcaaacgacaaaacaacaaactaaaactacaagatattaacaatgataactaactccccctcggtgagcatgattaagcaccatcttccagagaatcgacaacatcagacacagactccccctggacagtggttacatttgctgtagcaacgggaattaaatcaaacccctagacaggagtagtaggaaataaagtcaattcagtggacatgggagcgtgctttggaagctattatgaggaaccagactcaaactgagcagcatctggagatggcatagactccaaggacttaagaaccttagacatagcactgagcacattgatgaccccttattcaaaccttttgtggtgctgttgatttgtagcataagaatgagccacgccttgaaccacagaatataattgcacctgccagctagtagaggataaacttgaaagagtaactgaaggcatagcagacaaaaaagggaaccttagatggaccagaattgcccagtggcatgtcaatcacagatagaggaatatgcgtattgaaaaattgattgaaaatgattttntataagagggaacatgcatagtaacatcctgatcaagtgtgattggtatgacctctc

SEQ ID NO: 231958 - DNA, 1374 bp, Cannabis indica
cggtcgagatgtcttagaaaaggcccgaacgccgaataagatatatctaaaaaaagagatgaaaagaagagtttaaacagctggagtcctaggctcttggttcggttcttctgggccaactagagcaggaggatctgttgtttgaacaggagaagcatcagcagcctgatcggaggttgaagcagcttggctattggttgaagcaatagccttgttcccacaataagccacttgggccgcacagtactcaaggtccatgtccttagcctcgcccaagtagtcaaagttggctcggggattagccttccagaaatcaaagaagagctcaagaccgactgtctccaaggcattgaccttctccttcaacctatccacctcggccgtaagctccccctccttggcgtccttctcctccttcatccaaagaagaactgattgtagaaaagtcctctcatcctgaatactgtttaccttagcagataagatctcgatggtctcgtcaaagcggtcaacagcctcgagatcctttgtcagcacggagatcttcttctcaacagcgaatagcttcttgttggcctcgcccaactccaactgaatagttccagcttctgccctggcttcctcatcttccttcttggccaagttcgcctctgccttcaaggtgtcggacagagccgcgctcttcgaagcaacagacttagcccgggagtaagtatgaccaacttcagaccgacctgcacaaaggaaaaactttagcatatggagctaagtgtggaaagttaaagggaagtatcaaaaaagacttaccctggtgaactccttcaagacttcgcccaccaacacatccagagatgagtcattatcagcaccagccagttgctcactgacctcgggaacaagccggttcatatagtgggccagcatttccttgccctttttggcctttggaagcatgggcaaaggtggagttggtgcctgcacccgctcaggattactccttaccagttaagacccagtcgttggtggtccagactctttggacttggcagacttgggggtagaggggtttgcagcagtcagctcctcagaaagatcaatgacctctccagaaggtctcttttccgtaaaagaggacccctcaccccccttagacttcttggctagaggagaggcgctagagcttccgcccattctcttcctcagagcatcgatcatctgccgagacatgtctgcaaagaacaaaaatagtatagttagaaaacaaccatcagaaagcacaaggcatgaaagtctagaagctgaagaacaaagtaaagtaaaatgcaaggtgactgcccacacaagacttagaagtccatcgtcacctgacatcga

SEQ ID NO: 231959 - DNA, 772 bp, Cannabis indica
gatggctatatggatcgaattgtgaaggaattttatgctaacatcactgatgagtgcctcgatgaggactcttttatatttggcaaagtatttattaggggacaatggtattcctttactgtgaaggatgtggctaaggctctcaatctgcctatgggaatttagacaattgatgttgagtttgatcgtcaaaaggtgttcgggtatttaactggtaataatgatgtggaactctctgacacaatgcatatgtctcaactcacctatcaccatctatgcttatgaggtttgccctatccaattggtttccttgctccaatccgataaatgtttcaaatgaacttgccttctttttgtataaagtttctattggtgctaaaattgatttggctgacatgatttgggagcaaattatttttctcttagaaaggacaagaaacctatactcaatataatctttcctcatttgatctataagattttatctgaccaagaggaattgattctggagaatgaatccattgaaattcttgctgttggaaccactttcaaagttctagagaaacctccccaaggaaaatctgctaagaaaaaggctcggtctgcttcccctggtgttacaaatgaacctgttgttgcatttgcttccacttctgctttcacagaaatgactgaattcaacttgcgtttgggaagaatggagacaagtcaagccttcttctcaggaggatggacaacatcatgaaattcttccgatccaatgatgatgaat

SEQ ID NO: 231960 - DNA, 687 bp, Cannabis indica
atccggttccagcccctcatagtgcaccacttcaccgcattaaccaacgccaccaattcagcctccagcggctggtttgcctcataacacacagccatagcctctgacaaattgccctccgagatagccaccactatcccagctgcagcacgaagatccttgaacgctgcatccactagtaacaccggattacctgtgtatattgtagcagggttgtgctgcagaccaccagcatttgtaggagactcccaagccgagtggaggtaggtagcagcactagtcaccttggcaagaacacctctccaagtaggactaatctgatcgtgaaaagctctattgcgggcagtccacaaagcatcaaacaagcaaaccccaaatctccaaagctcacccgagacttcaacatcagcaccttgcaagaactccggagataagagccacaccaccatgtctctaggagaaccaaagttaagtgtatcacttctaatagcccaaccacttgcaaaccacacggccttagcaagcggacacttgaagaataggtgtagggccgagtcctccgcttcaccacaaatcacacatctagtgctatttctgaagatcctttgaagccggttcccaaaccggaatgatatctctcaaagtttccaaagaaacatttcaaccgctcagtgatttgaagcttcc

SEQ ID NO: 231961 - DNA, 658 bp, Cannabis indica
ctcaagggtgattgtacacattaggattgttagacttggagagtttggtctcgagacgacttagaccttattttgtaatcgttgtgcgacatgtttgtaaagtgtaatttgaatataaattttagtaacgagatcccgaatttttgtatggatgtttatatttataaagtttaaagttttatttaaaattttaaatttaacacatttttcaagaaaccctttcattgacaaaggtgtgcacaataattagaaagtcaatgtagcatgtctaagcagtagggtgttacatctatggatagttttacagcaactacgggaacgtaaactttatgtcaaatttaagaagtgtgagttttagttattccaagtatcattcttgggcacattgttagtaaagatgggatcatggttaatttgggaaagattgaattcgtcatggatgggccaaatatatagatactaccatcaatttgtagaaggattttctaagatcttaatgtccttaacaaagctaactaagaagaatcaatgatttatatggatagacgagtgtgaaacaagtttcaagagttgaagcaacgattgatcacaactcttgtgttagcccaccgtcagatcaagaaacattcatggtctattgtgatgcatccacacaggg

SEQ ID NO: 231962 - DNA, 1336 bp, Cannabis indica
gaatgtacatcaattcaattttcaaaaaagagaaacgaatgtatcagttcaaacttcaaaaagtccctcttaattatcttttccctgatgtttcaccacaaaaaactgttacttttagtgataactttttagtcacaacataatttttttgtgactaaatgtaacttttagtcacaagaaaatgttatttgtcactaaaacatagtatttagttacaagttgtcactaatttagttttagtcacaacaagtattgtgactaatacttttagccacggaccttttagtcacaacaaataaatcataatttataattagtcacaattttttcacttttagtcacaaattttattgtgactaaaagtaaaagtttttgttagtgctatttatggccatattatgtttaaacaaacaaaaataaataaactttacagtgtactcccttaaaaggaatgtactgatgtacttttatttgttttggtatccaataacttttaatcaaattttttctcataagcatatgcatttatggttatttaagatatcttataaaattttaaaaaaattgaaaaaatttaacaaatcgaaaaacagaattcaaacaatatattgcacacacatgattattttattttatacgtatgtgaaatagaatgtttgaatattactttttaaattgtaaattattttaaagtttttaaaattttttaagatgttttaaatatttataatttacataaatattaaaaaaaaaatattagatgttaaaccaaataaataatgcattgtacaagcatattttgcatttaaaaactacatttatttgggccgggtaaccatgaaaatcaaggattgtcggcttgttatgctgtaaaccgtgtgtagagttgtccttatgctataggccttgtttaagcccactttgaagtttcctaatgccgagttacatttctgcaaaacaaatatcttttttaaaaatctataaaaataacaaaaagaaatataaaaatactgttgtacggaattttaaatatttttctaaatttatttacagaaaatacagtcttttatgttgtacgcttgttaatttattgttgaggttttgtggagccatcttcgatacctgatgctatgctttgtaatgaccgagaaatgtaatttttctatcgttttattttcaaaaaaaaaagaaaaaaaaataattgaattttgtattgacacgtataccaaaattagaaagaaatatatctctagctaatacacgaagttgtttgctttctcctctacaactccctccctctttctcgatatgtattctttttgggaaatttgatttt

SEQ ID NO: 231963 - DNA, 1224 bp, Cannabis indica
cttgaatctagaagctaaatttatgtaatgtaggcttgtagattcaatttatgtaagttgcacagcaataaagacgaattaatgaataataataatatttacattctatttattgtgtctaaaaaaccacttgctcactaattaacttcttaaagttattattttggttccacatgcgtactatggtaccctcccaagatagaactcaggcaaactctgtgaaacttggtgaatagcaagtgaccaagagacttgtctacatggtcacttaggggcatccatactgtacaacacatcaaactagcataaagaacttatgcagagaaattttaatgcttagtgtaagctactaaacttgcctctaagtcgtgtaagcatagttcgacttgacaaagtaaatttggacccttacttgtcaaggccataagaagatagccaggattaaagactacttggttagtcacataatccatgataaaaaatgcaataacgccaaatgctagtagtgttcaaaaatagagggctctggggttgaaataaagtagtgttctaaaaaggccacatgccacataggacatgaaaataaagtagcgttctaaaaaagccacaggccacataggacatgaaagtaaaacagtgttccaaaaggccacaagccacatggagcataaaagtaagtaatgttctaaagccaaaaggccacaggccataaaaagccacatgctatgcggaacatgaaaacattgtctacgtagtacaaatataatgttgaacgctactaataaaaatgctatctaaatgtgtgcaggggcaaaagagctcaatttggagccgcaagattaaaatccacagagtctaggctggccccatcactagcatgctggccggcctgctggtcagtgtcctggccagccacctcctccacatgtgggtcggccagctcctcgtcatgagtttctgatgatgacccctctcaatagacagcgacttggtctacctccatctgactctcgaaaagttactttccacgggccaacattctttccacaaaagccttatttcccatgtatgacagtttagctcaagggttgcgcaaactggagctcataagtaagttcgaaggacaagtcaacatactcctccttaatggccgtgttggccatcgagagattccttcaacttttttcttatgatcatcaaggccagactgtatcctagagatga

SEQ ID NO: 231964 - DNA, 1662 bp, Cannabis indica
tttatataatactatgttaaattttaatttatactaaaatattatatatttaggtggctatgaaagttaataccacatatagttttacataaaaatattgcataaaatataattcagtataatattatacaatatagtacggtgtaatacggcgtaacaaacgaacactcactactataaactaaacaacatgagagtaaaatcaattatgttaaaacatcaacgtgaacaaacctaaaccaaatgatgatggtataagcgataaaacgacaagtcgtttagtttctaacaccacaatccagtgttgttattcactctataaacagattacataacatatatcctaagtccaaagagtaattaattccacaaaaatatgcaaataaaaatttatctattatcacttgtgatggtattttaataatgatgagggggcggaggagtttgcagtttcagagatccgaacagcggagatcgtggccgcggagacggcgaaggaagagaggcagggctgccacgtgggcagtcagctccagcggcgttgcagttaacaggtaacttgtagaaagcagcacattgctccctcgaacgctgcgaaggcctagaaggaagacagtttcccccgtcacctttactgggcaacttcaggcaagttcccggctcagaggagaagaagttgccggagtaggtgaagttttccaatttgggcaaggcgcaaatactcggaggaatatgcccagaaagcttgttgtgagccacgtcaagttgctctaagtttttcaacttccccatcgattcaggcaacgagccgactaactggttatagctaacgtcgaacacagtcagtttttcgaacataccaatatctgtgggcaaacagcctttaagaccgctgttagtgatgattaactcggtaagggtattcttcatttgtgccaaactcaaaggaaaacaactgttgagattgttattagccaaaactataaccgaaacaggggatttccctatgttttggggcaaattagaagtgaacttgttgttgtttataaacagagcatctagtttcaagtcgaataagcgagagggaatgttgccatcgaagaagttaaatctcatgtccaagtatctgagtgaagggatggatagaacaacagttgggaatttcccagacaatctgttgttacttacatcgagctcgtaaaggagtttgagatttgaaaagctttttgggatacttccatagaagcgattggagttgatgtggaagagagctaagtcagttaactcaccgagctgttcgggtaatgggccttcaatgttgccatggttaaggtctataccggccactgtggtggtgttgaggggatcatttggtgtgggtgcacagtacactccggtgtagctgcacacatcgaaaccccaccagtcatcggtgagtttatttgggtctgaggtgatttgagctttccaaatttggagaactccgaatgcgttaatgattttttcgtttggcggccagttggattgttggtgagatggtttggagaaaattatgatggagaaaattacaagaatggctaatgtgaaatgtgagttcttcatttttttttttttcgtaaagtagattgatatttgattgatgttgtgggagaaatgagctga

SEQ ID NO: 231965 - DNA, 1088 bp, Cannabis indica
ttctttttcaattctaaattttattcaatatttagtgatttatattatctattaagatatatatcatcctaatcatacttataatataacaataacattaatttaaacaaatgttatgtatttgtatagtcaccaaatattagtttaaacaattttcttatttatttatttgtatgttgcctcttgttcactaaattacttttaccaccaatcataacttaaatagtaggattatatgtttttgtgaagaataaagaaaaatatttccatacactcttcaaagctttatattaatttttaatttgttataacatttttcatctgcattccattgtttgtaatttttcaaaaagtataaatttcctccataaaaaaaatttaatttgtttgtataagcaacttctgaaattattatacatgttatacttcataaaaaattctttaattaatttatatgctttattaaaaaaatgaaacctttcaaggaaatttttttattttactttttttttatgttttttaataaaataatatattaaaaatctcagcttatatttatcaaattttcttgaataacaaacaacaacaacaacaacaacaacaataatgtaatatgtatatgtttatctttaaaaaaaaaattaataactgcgcaaagtgcgggtttgttacctagtatatatataattgtgctgttagggctaatgatgtggcacgttctccttttagtgtttaattttctctaatttgtgatttattctaactttttcatatattttattagatatatgatatttcttatacaaaaattaatgttgagttaagaaaaagactttaaaagacttaataaacttaaattttacacaaagtaataatcacaaaatttacacgtagtaataatgataatattaataattgtaaccgtatataaaaaagttaaaaagataataattaattaattgttaattataatatgaaaaaacataaagttttaaagacaattgtaaatgatatatatagacataattgtgttgttagaatagatgaagtgtctctctacaattactctaatctgttttatctttttc

SEQ ID NO: 231966 - DNA, 1924 bp, Cannabis indica
tttaagggggtgtattgtagaatcaccctatatttttagatgtgttcaatgagtttaaatttgaattgcatggttgaaaaaaaaaatatacacaatgaatttaaatttgaattataatgttttaaaaataaaagatattagagatatgtgtagcgagtttaaatttaattagaaatattttttttttaaaaaaaaaagaataatattttttattttatattcacatttcataaaacataaatatatttatatattttctttttaagtaatagagtaactagtgttgtaagttcatgtgtgtcgtgctggtccagtctgtatttattcgtacttttaaaaaacaggtgatgtcacagaaaaatatgagttgtgccgtgttgtgccaatatttttgaagggaaggctcgggacgactcgtaggctcgatattttcttgtcgtgctcagatttgtgttgtgctttactagtgtcgacctgtatttcttaaataggccagcctatttttatattcaggtttaaattcgtgctttactttttcatataaatatagttttataactactaaattatatgtatatttcaaaactttagttatatttatataaattttgaacaatattttactgataatcatataaaaaaaatattaatatcattaaaatttaaatatttacttataaatactcaaatttttatatcacaccctataaataaattaatatataattttagtttttttatattttaataattttaattataaaattataatatatattaagtcttacaaattttattattattttaatttatttataattgataaatttatattttattattttattaataaattataaagttttttaatgtatcgtgtcgtgcttttcgaatttgtcgtgtgtcgtacttttcgagttagtctattcatgcttacatatcatgcttttcgtgcttttcatgtcgtgttatgcttaaacctataattttttatacctaatcatgtttgtatctaccggggatggggagtttgtgttgtcggtggatgcggctgtcaccccggggagaggttttgcggggttgggtggggtcattcgtggccatgcgggggaggtgtgggctgcttgggctgtgggggttgtgggtgacttccaggtggcggtggcggagcttctagctgttcgtatgggtcttctctgggctacaagattgggattcgctgtggtgcgggtggagacggattcttctgttgtgagttcttggattaattgtctggacaatattctaatgtataaaccaattgtcgatgagattctttctcttttagctgctgctggtggtggttcttgttatgccatttcgcgtgatgcgaatggtgtggcccacgcactggctaagtctgttactagttctataggggttcaagtttggacagatgcgtgtcctagatttattagtgctcctgtaacagctgatttgatttgattaataacatactttctttacaaaaaaaaaaaaaaactccaaccacatatttaaaacaacactaagagtaactactaatggtaagtgtaaggtacatgttatatatgatatttttattttatattttgagtcaaaaactaaaatattgtaattattaattgttgtgaatttggtattattgtttgatgagatatatacaaagaagtaagaacaataacaaacaaaggcaaccgtttgaataaaaacagagcaaataagacaaccaaagcctagatggagcacacaaaggcaaaacctgaaacaatatttaatttgttcagttgagttggtgagttgtgacagcttttattaaaaggccacgtatacttgtcttttaataaaagggtaagttgaaaaatacctcttttattaatcaattaatcaaatttatctctaattt

SEQ ID NO: 231967 - DNA, 855 bp, Cannabis indica
tctgatctcaacaggtagaattagattgctgaaatagagaagttgatgacttaatatgacagatcaatgaaagaactactagaataggtcaagatgtcattaaagatcctctccaagggagactaatcaacatatcagggagggtctatagaaaaatttgccaaccaatttcctttggaaccaggatagaccttcccctgcctaaaggaggataagtcttgccatgaagatttagtgacgagagcagccaaactctgtcaaccattggtctaggggccggctagtgacctctggtacaacaacaccctcaattgtccaacccatggtcgaccaacaccttagaagtgaacctctggctagccaacagggtgagttgttaacttggagcatcccggagggagtagcccaaaggccaatctttaactagcttggcctgggattgcgtggaaacacccaagacaataacaactcgtggagtgaatataatcacttcagatagttagatctaccaaactccagcaattggtgtgatctaccccatgtcaatgaataggctccaccagccagtcaaggaagagtgggcggctacgccttgcccagtacagggatggcccaccatgaacagctgccaggctctgggctagctggcattgaatataccctctcccaaggaatggcctacgaggctctggccaatccaaggatgtagctcaataaagacgggccaattaaccaggcccttcaagcaatagatccctctatgcaagcacagttttattaaatactagacatgctcaagggcttggctagcccaaaaccatcaaaccttaagatgaatatgttaaggggttcacc

SEQ ID NO: 231968 - DNA, 1035 bp, Cannabis indica
aagttcatatttagggtgtttaagcaacatacttgtgagtagatctaagatcctggtaaaataaatttccaacacttacatcttaaacttcttaagtacttccttagcatagccttcttgagtgatgaaaatgccttcatcttcttccttcacctcaatacatgagcctaatatttgtcatgtcaaactcttttgccatatctttctttaactcctcaaacatacttaagttgcttctagtgaagatcaagtcatccacatacaagcgtacaatcaagatatcttcattcttaattttgatatatagtgcatgctcatatggacacttggtgaaattattgtcttgaaagtgcttgtcaattcaagtattccaagctctcggcgcttgttttaggccatataaagacttcttcaacttcatacttttccttcatgcccttttactttatagcccaatgtttgctcaatgtagacttcttccttgaggaaaccatttaagaaagtagactttacatccatttggtggatcttccatctattttgggctgctaaagaaattattagtctaacagtttcaagatgagcaactggagcaaatacctcatcatagtcgatgccttccctttgactatagccttttaccactaatcttgctatatatctctccacctcacctttagcattcttcttttccttgtacacccattttaatccaactggcttgtatccttgtggaagagtagctggttcccatgtatcattttttgtaattgaattgatatcttcatccatcacatctctccattttttgattcttattgcttaattcttggcagcttagaggttcacaatcaccaaatagacacataagagaaatatcattttgattctcagttacctcataaagttcttgcaagcttctaaagcgtggtgtcttttcatttgagctctcacttgaaacttcttgtatatttccagttggcgagattggtggagtattaggttcttgaagttcttcttccatccttggttgct

SEQ ID NO: 231969 - DNA, 1026 bp, Cannabis indica
tagttttggtgttcaaataattagatttgaaaaataaatatgtagtatatgtattttaaaactaaaagtgttataatcttgttgactagatttttagccaatcgatgcagagtcataataaatgagatttaaaccaaaatacgaacaataaatgtaaataatgacaccaaaatttaatgaagtttagtctcaagtgttggtaatagcctactcctcttatattttattaatctttgttgtaaagtcaagaacaagctcttgaatgcaagaagtaaaaatggtaaagtttttgctctttgagtgataatttttggatcccctttctaggtcaggtgtgaccccttatataggggaaggtttggtgtatctcgcttcaggagagatgaccttggtgctaaaatatctcaatcattcccttgatttcgttgaggtccgattcttgcgataatatctaactatttttgtgagtttgtaacaacttttgagcttcatgtgggattggataatgttgggagagtgttggatgtgtcgaaccatgtgggggtaccccctagggagcagcctgattgaccgaccctatagtgggtagtactcaccttgagaaaaagtggatgttggtccataacttctacaacggactgattgataataccagaacgattatagatgtcgcagctggtggggcatttatgagaaaaagtgcaaacgaggcgtatgatctgctcgaagaaatggccatgaataaccaacaatggccaattgaaagaagccaaacgaagaaggctgctggtatgcacgagatagacgccatcaccaagttgacagccaaagtggaggccctgacgaagttgatgactgctcaggtgaaacaggctcaagttgcttgtgagctctgtgggggtcctcacacatatgaccaatgtctagtggatttgaatagtttgccaatggatcaagcaaaatccattgggaactattctcaaaataataattatgggcacaaccaacaggggttctaccagcaga

SEQ ID NO: 231970 - DNA, 1226 bp, Cannabis indica
gtaaaagttaataattggaccatttgattgttaaatgataaaatagactctgtattttcaaaaatagtataaataggaccctttaattttcgacaatttttttaatataacaaacttgaagaaaattcgtaacacaaacagatgtggaaaatttaactaccgttttgtcataacgtctctaggtcagattattaataagttttattttgacaaaaaattaattaaaagtcctatttatactattttgaaaaacacagggtctattttgttatttaacaaaacaaaatgtccaatttataacttttgtaaaacacagagtctaaaatgatatttatcctaacaacaataataattattttttatatgattttgtgtaactattattaaaaaaaatatgtaaaagtaattaaaattataaaatacacacatattttattatttagttcatcaattgtaataaaaatacaaagatatagagcacgaaattgagctcatatataaaaaaaaataggttagtctatttaaaaaaaaacaggccgacccaaataaagcacgacatgaaattatcgaacttgcgagtcgtgctggacatatcctataaaattattgtacgacacgacacaacacgattcatattttattatggtccaacatggcacgatccatgtgtttaaaaaaatatgagtcgaactaacacatatttataattgtgatcaatatttttttgaacaaacaactgtgatcaatattaactctaattaagttttaaaaaataaaaaaataaaattttattgtatcattaattaagcaagttagctaacaaaatagtttgaaaagcgactaaattgatgacttgaacaattgattgttttgtttatagctcgtttaataaaaacaatagaaatattatttaaagaaacaagtatatgttttaaaaaagaaaaagatatttgttgtgtatgagcaattgcatgaacaactacttgttaatcaatttccacatatgtgaaaagttttgctcataatattaaggtagatactcactttcacttagtacactgttttattgaaatagtgtttcacagtcacactcatttattagtacattgtgtttttagtggttataagtttaatctagtggttttacaattctcttcacaaaagaagaggtcttaaattcaattttttttcttactcggtattaaaaaaagaaaaacaaaaaaaaa

SEQ ID NO: 231971 - DNA, 1526 bp, Cannabis indica
attcccattcattcccattcccattccctttcccactcccattcccagtcccatcctcatgccgattcccattccctttgcattccaattcccattcccattccgcagcccactcctatttccattcccattccttggcccattcccattcctattcccattcccatttgcattcgcattcccattccctagcccattcccatttctatacccattcccattcccattctcattcccattcacattcccattccctttcccattcccattcacattcccattcctattctcattcctattcacattcccattccaattcccattcccattccctttcctattcccattcccattcccatccccatccccatccctattcacattgccattcccattccgttcacattaccattcccattcccattccccgacccactcctgtatccattcccattccctagcccattcccattcccaatcccattcccatttgcattcgtattcctattcccattcccatttctatacccatacccattcccatactaattcctattcacattattcccattcaaattccttggcccattccgattcccattcccattccaattctcattcccatccgcattcccaatgccattcccattagcattaccattcccattccccgacccattcccattccctttcccattcctatttgcatttgcattcaaattcccattcccattcccatatccattctcgttcccattcccattccttggcccattcccattcctattcctattctcaatccccattcccattaaaatttctattcatattcccattcccattcccattccccagcccattcccataacgatttcccaaaccccaaaaccccaaataccaaaactgcaaaaccccaaacgcgaaaccctaaatcccaaatccccaaaccctaaaccgtaaaacattaaaaccccaaacatcaaaccataaaccccaaaccctaatcccaaaaacagcaaaccagaaaaccctaaacacaaaaacaccataccccgtatcccaaactccaaaccgtaacccaaaaacccgaaaccctaaaacccaaacaccaaacccaagacttaaaacctcataccccaaatacttggtccaagatcctaaactctagaccctagtcataaaagccaaaaccctaaacctcaaaccctaaaacccaaaagccaaagactctaaacaacaaaacccaaactgttaatcccaaacccgaagaccttaaatcccaaacctaaaaacccaaaaccccaaactcaaaaccccaaacccaaacacctaatgtaaaacaacttaaccccgaacccccaaaccacaaaccccaaatcctaaacccaaaaccctcaaaccttgaactgaaaaccccaaatcgtaaacccccaaaccctaatagaaaagttatagacaacggtcttggcttcgtccctatgaaatttcactattttataagaagtgtagggtgagattttgaaaga

SEQ ID NO: 231972 - DNA, 1206 bp, Cannabis indica
gctgatttaaataattagtttttcagttatagttttagctagttgattattgtaaatggtttcagtttgtcaaatttcaacgtctaacactagtgacaactccaatgtccaactcctgtgactttttggtaatgaagacaactctaacgaattttttgatagtttttggacgacaataacaacttcggtgaatattctcattctattttcatttttttttttttgcggctaatattttattttagtggataattactattttgggtagtgtagtgcatgggttgatggttaagtattggagcttttgaaaagtttgtaactagttttattttggtattctatttgatttgttcaatattgtgtatagtatctagaatacaagcatgtaaaatttatatataattttttgtatacgcaattgactttttttcattaggataacaactctagcgaatatacccttattctactttcgacttcttttgcggctaatattatgctttagagtggataatgaatgttttggtagtggattgaaggtctagtattgaaatttttgagaagtttgtaactggtttttatattagtattgtgttggtattagttttggtaatgggttgataatccaatttttgagcttattagaaacatgtaaaatttatgagttttggtatttgtatagttggattttttattaagaaaatagtttcgattatatagaaaaaattgttttcttaatttattgccttaacaaaattatattattattattattattattatagcttctatagatttttttatatgcttttatagttgcaatatctgtataaataactagttattttatatgataaaaaaggaattacaattatatagtttttatgacattccttcttatctataataactttttttctttcatattttaagttttttcttttaaaaaaaggtcatatttagtataattaaatttgtataccatatatatcaaaattctaattttttttttccatatttttgtaataattacttcatttgtaattatgtattagagtcacaattataaaaaaaagtagttgaatagtgtatagcataaactaaatttttatgtccaaattttaacatattttttagcccataaacttggagtatagttttagtagcttctcgtagggaatatatataaaaatatattattttgaa

SEQ ID NO: 231973 - DNA, 681 bp, Cannabis indica
gtttgggtccgacttcgggtcctagtcccaatgtgggtctgatttttgggtcccttgtctaagtctggttgttaattcctgggtgtggtcctagttttttggtctaggtctgggttagggttcgggactcggtctcggtccaggtcctggtcttggtttaggtcccaagtcacaggtcccggtccaggtcgaagtcccagtattggttctggtctgaatttgggtttaggtccgagtcttgatctaggctcgggtcccgtgtctcgagtctagggtttagtgtttgatcttggtcccagttccggggcccaatttttttgtcaaagtcccccatctaggtcccgatccttggtccaggtcttggtcaaggttcagttttggggcccaagtcccctatataggtccggatcctaggtcccggcctaggtccaagttcaggttcgggtttggatcccgagtttgggtctatgtctaggtcccagtacgtgttaaggtttgagtttgggccaaggtcccggtttgagtgcaagtccctgttcgggtcagggtcgcggtcctgatctgtgtcccagtcaaggtctaggttccagacaatgttgtggtctgggtttggatccaggttcaggtcctgtgtttgtgtctatgttcaggactacatctggtctgggtctgggtctgggt

SEQ ID NO: 231974 - DNA, 2466 bp, Cannabis indica
agtttttgatctcggtcccagttttggggcccaattttttgtcaaagtcccccatctaggtcccgatccttggtccaggtcttggccaaggttcaggtttggggcccaagtaggtcccggtctacgtccatgttcaagttctggtttggctcccgagtttgggtctaagtctaggtcctagtacatgttcaggtttgagtttgggcccaggtcccggtctgagtccaagtccatgttcaggtcagggtcggggtcccgttctgtgtgcctgtcaaggtctaggtgctcgacaacgttgtggtctgggtttgggtccgcgttcaggtcttgagtttgtgtctaggttcaggactagatctgggttttggtcttgggttatgatctcggtatgggtatttagggttttaaggttttgggtttagtgtttagggatttagggtttagggtttagggcttagggtttagggataagtgtaaagagtttaggatttagggtttaaggtttaggatttagctcatgtcttaggtcctggtttgggtctaggtttgggtcttgggtcctgagtcatgggtttggatccccaattcaggtgagggtgctaggtctcggtttgggttagcatcccacccgagtgcaggtcccggtccttgttcggtaccggtccttctctcgagtctgggtctgggtcacggtttggttcttaggtcccaggtccaagtatcgggtcctggtcccgttcccagttcccaatcccggtcccagtctgggttctagtcctagtccaaattcaggtctcggtttttgtccaggtctgggtaccagtcctaatcttggttcgggtctaagtcccggtttcaagtcagagttctggtatgagtccaggtctgggtctgggtccaggtttcagtcagtgtttgggttcgggtgttggtttgagtctgggtctgggtttgggtttgggttcttgtacgggtctggcatctggtccaggtcccgagtcacgggtcctgggtcgcaggtcctggcgcatgtcttggtccgggttcgcgtctagagctagttttgggtccaggtccaattcttgttccaaggtccttattccggttcttgttgtgaaatcgggtctcgggtccgggtctgggtttgggtcctggtctagaaatggttctaggttagggtcctggtatgattcaaagatctagacaccgactacgggttgggtgcaaccctaggtcgtgggtcaagatctgcatcccaatcttgggtctcggtctcgtttcgattcggatcctgggtcccagtccgtgttcaggtatgggtctgggatcgagaccggggtcgggtcttgggtcccaatcccaatcctgggtcttgattctggttctagttttgagtttgggtcctcaatctaggtctggtcttaggtccaggtctaagtctccaatctcagtccgagtcctgggtcagggacttggtccatgtctgtgtctgggttcaggttcgagtccctagtcccgatccgagttttgatttgggtccgcgtctcgatcagggtctgggtctaaggtcctagtctgattccagttcccgaactcaaacctagactcagacttggacccaggtttggggtatgggtctaggtctaggtctgggtccgagtctaggtatgggtcccaaatccaaacactgactacgggtcagttccaagccccgagtccagatctggatcacaatctcgggtcccagtttatttccacttcgggtcccaggtcctaggtcccagtccctgtcctaggttagggtctgggtctagggtcaggtcttgggtctcggtcccaattctgatgcctgtgtcccagtccatgtcctaggttagggtttgagtcccggttcagtttccaatctcggtctaggtcaggatctgtgtttgagtgttggtccaagtttgagtctgagtcttgtgttcggatctgggtctaggttctgaggcgcaggtcatggtccgggtcctaggtcccgatctgggtccatgttcgggtttgggtcctcgtccctattttgattttgatttagtgtctgagttcgagtttgggttcgggcctggttgaggtctgagtcttagtttgagtctaggtccgagtctgggtctaggtttgggtctgggttcgggtcgaggtccgagttttggtcttaggtgtaggtctaggtgtaagtctgggtcagggtctcagtatggatctaggtctcgagtttcgatgccgacctgggtctgggtctgggttcgagtctaggtatgtatccggatccatatctaggtccgagtctgcgtcttggatcgggtcccaggtctagatccaggtccggctctcgctcccaatatgggtacacgactatctttgggctcgagttttggtctcgctttgggtttggggctaggtccgagttcggttctaggtttgggtccg

SEQ ID NO: 231975 - DNA, 1042 bp, Cannabis indica
tgctaatcactgtcttacctgttgtccaacaatggaaagagattctgaatccccgggtgctcttgatcaggtgccggtaatcctagtcacacaaatttgggatttttcatacctagcattaactcttgattttcaactcataaaatttaatcgtggcatttaaaattcagataatcatacagagctcggaacgagctttccaacgaaatgaagaactgccaaatcggagttcggaatcaaaagctatgcatttttcaaaattcgacacaaactgcccaaaaattacgagggcgggtcgcggcatgcccaagccatgccgcggcacctgggacaaaacataggttcccccaaagggggcgggccgtggcatgctgcgacatctgggtgcagaacccagaaaccaacaagttctccacgtattttcagtaagaacttcaatctaatcaccccaaattctaaaccaaacattcaaattaacaattaggattactagcacacaatagttgctcaactaacatacttcattcatcaaaatcccaaaataactctaagaattaagattgagaaaacataacaaaatcatgcttaaacttatcaagatttcaagttcaagaacataaactcaaacccaacacaaacctattaaaatccagcagcataacaccactttaaacatgaaattccaacctagaaatatcataaaatctctgcccaaactcaacaataaagcatacaacaatacaaactcaaattcaacaaaattaacaccaatccacttaacatgcaacccatcatcatcattaccaagttcatgcttttcaatcataatatttcagcaaagaaatcacaaattaaaaactatcaaactacctcaatctcttgcacaatcaaacctcaagctcccaacaccctttttccaacacaagctccaattcaagccaaattctcacaaatcaagttgaaaataaatcaagagggtaagagagggagagagggtcgattgagaggggaaagaaaataaaggctgaaaacacattctatt

SEQ ID NO: 231976 - DNA, 792 bp, Cannabis indica
aagttttgatcactccaaggaactgtaacaaaattagcacatgaaccaatttcgctacaaattttctaagtaggacttttttaatgtttctgactcatataaagaattcaacattaacaattttccttttcatttcagcgtgtttttgacaatatcataaacagggacatcccctggccgaagacacctgatgaaatgagctacgaagcttatgatttgattgacaagtatgtattcattgaaagctattctgcacatttaaagtcacacaaatgctcttatgaaaggcttattattgtagagcttaatacataaaaataaatattgtcatcagaaatttgaaaccaagcaatgaaacatgttaccttactgatttcgagtacactcaattttcagattactaactgaaaatccagttcaaagactaggaacaacgggagcaagtgaggtaagtacaacaatgagaacttcgtgctttatttgaagcatcagtttactcagaagtaacctcaaaaatgtgtggcaggtgaagagacatccattcttcaaggatgtaaattgggatacacttgcgagacaaaaggtactttcaaatatagaaaggataaagaagtatgtagtttggtgtaaataaataattcattcccacatttatatttaatttattttgagcaatgcccgctccttcaaataatatttaaagttttcgagatgaatttgaacaatttcatacacttttaatccttgttggtcacaggctatgttcataccatccacagaagcacatgacac

SEQ ID NO: 231977 - DNA, 932 bp, Cannabis indica
attaaattaaaatttgtaagacctactcacaatactctcacaaagagaaatgctaaagggcaccagtggtgcctagtattgttattggtccaactaagtatcgcctcccatctaatttaatataatagtttttagggagtatcgctaacctatcgcaacgtaacatgtcgagaaggtgctagacaccactggtgccttacagcaatgctcagagaaaaaacattaatattgaataaatcagaaaacttgttacaattttattaaattttgctgtctctttcaggactgagatcacgaactcggatctcgtgtccaatttcgttgtcaaatttgttgtctaaccaaccaattaaacaatgtcacgttatttaatgaatttaacatcaattaaccatttaacacttcttactccatctgttaatacttctgccccttgttataaattaatttaaattagggtttttttataaatattagaaaaaataatgaaattgacataaataaatattataaaaagatatgaaaataaaaaataaacaaagaataaagtatggaaaacttaacaaaagatcataaataaaattgatgaaatttctaataacaaatattaccagaaaagtcactgatattttatgtggtttctggaatacaaaatacaatatcaatatttgatttataagatcttctctctcaaaatttccttcccttttcccatgaattatgcccctatttataaaaatacaggttagcagttatttttttttttggattaattcatttacaatggttaatgaaacgtggacattcctccctttcatttattcacatatgagataatatcttattaactcaattgctccttatctttatcctctatatggttattgctaacttggaaggttacatcttattgaatatgagttctccttcgt

SEQ ID NO: 231978 - DNA, 576 bp, Cannabis indica
gcctcaaggagactccttaagtgagccatggagttaagtcagtttgacatacagtacattctgtgcatcttgattaagggccaggcactagcaaactttgttgtagaatgtaatgagacagaggccagggccagtgtgccggctcaggatttgcctaaattgaaggtatatgttgatggagcgtcaaatgaaaacagatcgggggtcgaaagagcattgatctctcctgacgggttaagaatcctagctaccatgaggttcacagttttggcttctaacaacgaggcggagtacgaagccctgatagcagggttaaaatttgctaaggctgtagggccaacagtgtggaagtgtacagtgattcgcaactggtggtcggccaagtatcagaggaatataagacctacggagaaaagattgccgcttacgtatgggttgttagggaattgctgcaggagtttaagaaatacaaagtagaacgaattccataagaaagaaatgcccatgcagactggctggctaagctttccttagataacgagatagaaattgtaatgaccgctctagtaatgtgga

SEQ ID NO: 231979 - DNA, 1252 bp, Cannabis indica
aaaatcttagggtaataaccctaactcatattttcattggattaataacattaccatatattaacgctttcttactttcataacattctagggtaataacccaagaccgtattaaaactaaactcaaggtactagtttaccgagtctaacttaattatgccttgaatgcataatccataatctcattatacatagcatggcatagcattttacacaatacatttcactagggtaataaccctaaattattaaccgctcatattagggtaataaccctaatcccagttacaattactcacatatatcatattcaacataagcgccaccgcgcatactctatgtgcaaactactgtcttacctgctgtcccgcaataaccgagataccaaacccctgggtgctcctgatcaggtgcccgtaatcctagtcacacaatctgggattttacaaatagggttaatcccgaattccactttcacagaacataaggttggcattcaaaatacagataattatatagagctcgaaacgagctttccaatgatataaagaacgtccaaaacagagtcccgagtcaaaagttacgaccaaaacaaatcgggaaaaggaatggctctctgctaggttttatggccgcggcgaccatatctctggccgcggccactgggttcgaaaaacccagaaaaccagattttaagatctaaaaatgcccacttttctatatattcaaaccttaatcaaatcatacccaaaattaacttcttacagataaaaatcatcacaatagagagcaaacaacatcaacaacaactctcagaattcagattgcataaacaacacaaatcttgcttcaacttaacaaaatttcaagttcatgaacatgaactcaaacccaacacaaatctaataaattccagcaacaaccatcaaatttaagcctgaatttaagtaagaaaataccctaattatttcatctagggctcaacaataaaaatcacaacaagttcaaggaattaacacttaaatcccatcaaaacattacaattcttccatacatgcattaacaacaagatcaacacataatcatgctctttccatagttaatttcagcaaagaattcaaaaataaaaactgtaaaaaaactacctcaatctccaattcaaagcttagcacaattaattcccaaaaattaagctccaaccaagcttattcctcacaatatcaagttgcaatcaagagagtaagagagggag

SEQ ID NO: 231980 - DNA, 1034 bp, Cannabis indica
aagctcagcaactctgttcacccgcatcctggaagagccgacagtacgaggtaagaaatctttcctatgaggaatccaagggtcttcccaaatattagtatccttcccgtccaccaccaacttacaagaacctttttgtaaaatagatttggacttaaccacattttctaaaaccacgagtcagaatttttagaagtacaattaagaaaagacttttcttttaggtattttgcttccaagatctgacaacaaagggattgattgcgagtcaatagattccattcccattttgccgggaaggcgagattcatttctctagttttacagaatccaagacaccctaaggactttgggaggcaaagcttatcccaagcttttagacgtagaccagttaccccttccggactcccaccagaaatcatgaaccattccatcaatcttagcaacaagtcgacttgagaacttggtcgtttgcataacatacataggcaaggataagcccacatatttaatgagggtagcacggttggctttagatagtgtcttagctttccaaccctgaagcttagacgtgaggtttttagaatgaaattgaagtcagcatccttttgtctggaccgaaagagaggtaacccaaggtatttaatgttgccatctgaggacccaatagctgagacttgattcctccttcatgccattgggagtgtttttactgaagaagatcgaagtttttgagtttgttgacttgttggcccgaccaatcgcaaaacttctcaatgcactgccaatagcctttaacttcttccaagttcgcttttccaaccaaaagtaaatcatccgcaaagaaaatgtgagaaattatggggcctcccctactgagtttgatacccttgatattttccttacattgggcgtctaccaaaagtcttgacaaaatttccgtagcccagataaataagtaaggagataaggggccgccttgacgaaggccacacgagggcgtaatcttaccaaattgacctctatttaggcaa

SEQ ID NO: 231981 - DNA, 1337 bp, Cannabis indica
attgttgctactatttcaagtatgagttcctgttcctcgagccatagaagaacataggatcaaaacgaaagagaaggagcagaagcacgagctcaacaatcggttggctctgataccattttagttttgagagagagaaaaacgaatgaagaaatgaattgaatatttcattattgaagaaaacagaatacatagatgagcttatataccacatcgagggagaaggtgaacctaaccaactaactctaacaactaactaactttgtaacaaacttaactaacatgacaccttacagtttaataattaattagtgtttctaagagtttttttacggctaaactctttcaattgtcattttacttgcacttaattcttgaagcttaaattttagtggtaaaatacttcaaattattcatatgatagtaaatttaaaatgtcatatattactcttatgtatacatttatgtacacgtgacatgtttatattggtacatgtagtataattatttaaaaaactctatataaaaattaaaaaataatttaaaataaataaattaattattttttattttttaagaatgagaaattatttttaaaaatatgaaatcattagaaaaaattaaaaaaatcaattttttttataaaatcaaaaattaattcccaaatatcatttttttttgccatatttactttcccaaaagttttaaaaataatttattttattattttcttcttcttctttgatagtctagcccagccaagccctaaatccccaactccagccaccactgtcgccaccaccacccactactattgctatcacaccactactattgcgcttattagatccacctgattctttctctgctgattctcaaatttaaaaaataatattcaccttattattctctccatatctatattacaaaagccaaacaaataccaaaataaaaaatctataataaaaaaataatagagattggtggactgagttttggagaccagatcttgtgaggtctcggatggagctaatggcgaactagagattgagcacctactgcagaacttgaactgtggtggctatggtggttttcgtgatttaggcaatgaaaaaggggaggtgtaagatgttggggtgaacagatttgagtagatctgcatttagattgagggatttcaggcaggggaaacatattgatggtggctatcgagttttcatgaactgtggtggctatggaggttttcgtgatttattgcacttcctcattactgcaatttatgagtgttcttaatgggtactacctatgaatgagtattattaggaaaatttgtgttt

SEQ ID NO: 231982 - DNA, 610 bp, Cannabis indica
ggtcagatggtaattttgctaaatcctctattttattctctcctaataccagggctgaggttaggagtctctttttccaaacttttcagttggaggatagggctttcattaccaaatatttagggcttcctcagtgtctctcgcgtgttaaatatcctgcctttaccttccttaaggataaagtggccaatattcttcattcctggaatcataaatggttttctagggctaggaaagaaactctgattaaggctgtccttcaagctatcccatcatatgccatggctcgctatcgaattcctacaaaaatttgtaaggaaatcgaatccctgatctctaagttttggtggggctcttttgcagagtctcataaggttcatcggaagaattggtctagtgtttgtcaatcaaaatttgttgggggtttagggtttcggtctttaactcattttaatcaggctatgctggccaagcaagcttggagaattttccaataccctgattcgttattatgtagagtccttaaagctcggtacttccctaactcttctattattgaggcagttcctggtcataggccttctttttcttggagaagcattttgtgggg

SEQ ID NO: 231983 - DNA, 756 bp, Cannabis indica
attaatatgtaattagaaaaaaaattaacatatacatattaactattacacaaattataggttctaaatcataaacatttggcaatctgatacaacattttagaaaaattaataatctcaagatacaaaatttgtatataatatagagcactataatatatataataattttataacaatgagatttgtgtacctaattgatccatcacaattaccgtaatttgatagtgcaatattatcaattacgtattcctccctaggtttctaaattaaaagcaattttgttaatctgattatcaaaagaatacaattgtgatgaaacaatatgtatttatagagttagggaggtaacttagctacatgaccctagttggactgctcatcaaaagatcagttaattagaaaagtacacactgctactttaactacacacacagatgttaagcccattaactattgatcactaacaatatgggctagcataacaaacaactatccaatcgacctaatttttaataaaattaataaaaattaatgtaagcccaaataatagtctaacagaatgagttaaaaaaattataatggaaagatatttttttaaatatgtgcaatatgtttatatttaaattacaattaaaagaaggataaataccattttggaccctgtgttttataaaagttaccaattagaccatctattttgttaattgttaaaacggaccctgtatttttctaaattatacaaataggacccta

SEQ ID NO: 231984 - DNA, 1349 bp, Cannabis indica
acactccccctcaaacttggaatcggtagaaataccaataccaagtttgttacgaaacagagtaaaacgatcagtggagattgccttcgttaagccgtctgcaatttgatccactgcagggacatgttgaatacgaaccaagccttgagtaagcttctcacgaacaaagtaaagatccaactcaatatgcttggtacgggcatggagtacaggatttgcagtgagcaaaattgtactcaagttatcacaccagataatgggaggacgaggaagctgcaattttaattcagtgaacaaagagtgcatccaagttaattcagaaacagtttgtgctaagctcctgtactcagcctcagtgctggatcgagaaacagtatgttgtttcttacatttccaagccacaagattcgaacccaaaaagatagaaaaacccgaagtagaccttctgtcatcagggtcactggcccaatcagcatcacagaatgctgtaacatcgagttcaatggacctttggagagacaagccatgacacacagtgccactgagatacctgagaatgcgtttcactgcattccactgtgtgtgaagaggattggccatgaattgacacaccttattgacactataagagatctcaggccgagtgatggtgagatactgcaaagcaccaacaatcgatctgtagtgttgtggatcatcaacaggatctccttgataggctgataactttaagccacttgtcataggagttggagcaggcttggcatcttgcatctgagctttgcatagaagatcagtaatatacctcccttgagaaagatgcagaccagattcagtaggagtgacctcaattccaagaaaatagtgaaggttacccaagttcttaagagcaaacttactatctaaggcactaattagagcagagacttgatcagagttacttccaataactatgatatcatcaacatacactaggatgagaagcacagagctagaagtatgttgaatgaagagactatgatctgatttcgaagaaacaaatccaaatgacaatagacactgctgcgatttgtcaaaccaggccctaggggcctgtttaaggccatagatggctttattcagtttgcaaactagatgaggagcatcaggtaactcaaagcccgggggttgtgtcatgtacacttcctctttcaaatcaccattcaaaaaagcattatttatgtccaactgttgaatgcaccaacctcttgctaaagccaaagacagaacaatccttatggtaactggcttaaccacaggctaaaaagtctctgtgaaatcaaaccttggttgctgatgaaatcctttag

SEQ ID NO: 231985 - DNA, 710 bp, Cannabis indica
cacgggcctagcccgcctatgcctagggccggccctggctaagactttgtaagtatatgagttgcttatatatgaaaagagaaatcataatataaaaatttgtattttggtaatatataatgcggtacggtttgaatcgcgattattaaatttaaaactgcaaatcctacctcaccgcccgatttggcaaaaggacaaactccaaccacactgcaaaaaatttcaaattgtatttttgtacaatgtaatggggtgaggacagtttgtgtggtatagatggtttggtgaacacctctaaattatctatggtaatgatagtaattacgatatatttctgcaaaaatatagtaatgataattacatatataatataaagcactgttattagcattagtggtgcctaacactttctagaggtagtgcattgtgattagttagtaatttttttttaaaaaaattattatattaaattatatgagactcaatacttaatgtcatatatgatatcacaataaaaaaaatggaagtatcactatatattttagcatttttctataatataatatttaaacgtaaaatggttcttttcttaataagataaaaaaaaatagtacttaattataatatatatgttttctttgaacaatcacttataatattttcagtaaaataaccatttaattatagtattattagtaaataattatcaa

SEQ ID NO: 231986 - DNA, 1028 bp, Cannabis indica
cctcatttacccttcctcttcttcacaaattgcagcagggttttatcagagaaattcacatccacatagcttatatttcaggttctgattgtgtgaacttcatgacactacggtacttatccataacactcatataataacactatagtccattatagaggaaatactggatatggcatagttatagaaaattttactctgtacttgtctaccgcattagatatcattatttgagtacaagaaacagaaaccgtttcaaatatgttaatacaaacacaattacaaaaggaaaattgtaagatatagtcatccaagtatagaaaaggcctaacctgaccatcaaagtaagccaccaaaatcgtagatgatccaggtaattgtgtttctgcaacacttttaacaagaacttctgctggtttattcactagagtgcctttggaatcggatacaatcctttcacaattcttcatcagttctcgggcatatattccatcattgattcctgaaaaatgaagtcaaaagcgggggtaatgtacatcatacatgtattataagagcatatattcactttccaaaaccacatgcgagttttaacttatgcaacttacaatatataaaatatatagctatatcatacacatactcatgagaaaatataaaccataaaactgtatcaccaggtattcttggttgccccatgtctatactcaggcatgaagcgaggtgcatagcagggaatattccccaaaaaacttttttaaaactttcttgtaaaaaaattacagatagttttaaatataacccaaaattattgaaaatggaatcccctgaaatttaaaatatacaaatcaaaattattgagaaataaaaattctgcctccccagaattttgagaaatactaatagccccttattgaaaacactggctttgtgacttcctccttgtgtaaaccaaaattcgatcacagaacttgatgcctcaattatatggtagaacagaatttggcaacagagaataattaaataat

SEQ ID NO: 231987 - DNA, 1447 bp, Cannabis indica
tattttctgtttcactttaaattgtaataggcatttctatgttagggaattctttttggttataaaaaaaaacatttaaattgcgattgtaaacaatccttttcattctcattgttttccaattttaagtattcacaacccttttctcatcgtgaaagtactcaaggaaagaagaaatcgaagcgcccagaaagagatcgattgccaagattttattgcaagaacgatcgtcaaactcataacaattaagaattcgatcaggttttctaaatgaaaaattcgatcaggttagcgctaagaaatttgaattttgtcatgaaaaattctggaataatagctgggcattccaaatcattggtggcgacttgcactatttgagttcttcctaaggtatttcttccttactgtgatcttcattgaagagttattggttttctatgtaatagtgattgttccttatattccatcaggaggggattcttcttagtctatgtttatgtaatggcttccatgaaattttcttataaataaaaaataataaagttctccatttttcaaaatggttctctgttttttttttctttcttattggttggtgttaattcgccccgatgattcaagtgtcatggtttagcagaaataccacttctatctttgtgtgattgcagatataccacttctgtcattgacccactttttagctttataaatgcagatgttcatataatattaacactttacagaatatttatagatataaacttacattacaatgctatgtttaaaaaaagaactaaatagaataatctactactccaataataaatttatttacaattttataattacactaatattatttttaatacattattaaataatatttcaaatataaatatttaattttttcaaacaaaaaatttgtaatctttaaaaataaaatatattcaaaatcttaaaaaaccaaaatcttaaatgaaactagcaatacgtggctcgacaattcttatgaataatataaagagagagagaatttttttttatggcccacttaattttagggacgatcctcacaactcacaagtgtacacagtggtcatctagttagtatttaacggtaatatataactaacgtctcaaatttacaaaaaaaaaaaaaaaattaacaagattttgccgtaaaaaaataaaaaaattaaatttataaaaattaaaatattcaaaattttacggcgaactactcttatttatatcatatatagtttaatatgtatgcaatcaataaaatatattatttcatcaaataatttacatattatactataacttggggattatataatttggttttaattaatagtctataagcagattgacttaattaaataacaaaaaagaaaatatatacatttagggctcgtttggaacgccgtattaggtcgtattg

SEQ ID NO: 231988 - DNA, 1100 bp, Cannabis indica
atcgattaacatgtactttcttactcaacgcagatagaccggcttgacctgctctggacccagctcatagagaagtcgctgaaattctcagtagcctccctgtccaagatcgcaactggcgattactgtgcacgaccttaaagttgcgggaacacaaactaattccggagaacgccagccttcatcaagagccagtacacaaggagccatctaagaaacaaaaagagaagataaacaagcgtctttctaaacagacctcccgaccaacatcaggtaacacatcatgcatatatgcgatatatatatgattttattgtttatttttaacttatcttttgttgtcttcgcaaaaatgactttcctgaagcaagctcctgtgctcaattgcaagtcgaaaactggaacagtgacgacttctcctatcgttcctcagaagaggaagagtgatgtcgtcgtgacttttgtcgttgactcgtccaagaagcaggtgaagccttcgcaggacaaggggaagggtcatgattgacccggccgtcaaggcccgcgattttatgactctgtagagcaagtttgtgagcgacgagttcgtgtcgaaggtggaagcgatccctaccgaggaagtgatgtcgatagggttgtagctaaccacgcaattcatgaccttgttttcgagggcattcgtcgcaggttacaaagaagttgatcttctaaagaaacagatcgtccagctttaggaaaagaacaagaagctgaagcaggaagcgaatgccaaggataaagaacttgagaacctctagaagtccaaagagtaggtggaacttgtagcaaaactttctcgatcgaaggtcaaggagttgtctcacgatttggaggctgagaaggagaatcgaaaaaggcagtacgaccaagtagtctccgactatatatacgaccctgtccaagataccaaatttcgacttcgcactccttggagcagaggaggctgagatggcggaagcatttcgtgctatgtcgcctactcagactcaagggtgcgggggggaatctttttcctaaggatgcagaggctgcgatactgaagaggtcgctgatgaggctgc

SEQ ID NO: 231989 - DNA, 1284 bp, Cannabis indica
aaacataaaaatttagtagaataactattcatattattaaaatatatatacataaaatataaaatttgaaattcgatatatgatatcctatttttagtactttgacgtgactatgagaatgaatgacacgtgtcccacatttttattacctaggcagagggaagtattcctagcagcccactaatggttaatcttcatatctgtaaccctaggatatccaaacaggatagtcaagaagacgttcgaccaagatacaaacatatatgtatcgagcaaggtatataagttggcaaaactagagatcagtctcgtcaccttcaagacatgaagacaatccctataattgtgagtttgaatcagagaataaaggcaataggccttaattccctattctttacattgtagttatataattaatgtagtttcttattttattcattataaattaagggaaaccattcttcatgtattaagcccctataaatagtggcataatctcactattgaggaggatgagagaattaatccagaaacacacagaataactcggagatccattgtaagagctttagagagaaaaaagactttattccttctctcaagtcaatataaatacaaggggagtaggctattaccattcttatggggccaaacctctttaaaatctggtgttctctttactttactgtttttgctttcaaattttggtgctttcattgagagaaaaaatacaagtttttctcttaatcttgacaggttaacatgatggttatacaaactcaaagggaaggccttactgatcaaggcgatccaatggtgacaaatccaaacatgcaaactattggaaacacgagtggaccaccagggacaaaccccaaacaagtttatacacaaccacctacggtaggccattgagtgacttcctctctggctgggttcacaccaagcgtacaagagattgggaacaccagtacgacttctgatcaaacactcctaacaccgaggtcctgtccattaatattacttaaaggctagttggagatgacattgaacttcagaatctgtgagaagcacttgggctcatgcaagggcataacaacactctgcatcatgatcaggaagatctctaagtaaccattcaccttgcattcaatgaggaaagatgtcaactcatagagtggagggaccaagagatggaaattataagggcacaacagacaaccattgacgatcgttctaggtaggccactgtgctgatagaagggcctaccaggttaccagtca

SEQ ID NO: 231990 - DNA, 608 bp, Cannabis indica
gcataagcttcccaccgcctcatttgggatgaagatcttctattagctactgcttcaaaagctgctagtccaaagctcacggcaacaagcaactccttacctgtgtttgtatttgaacttccaaaggtgacctttcatgaccttgtactaaacagaaatttatgtaattataaacccaaagccatatagtaagaataacaggagaaacctactaatttgtagtgactactgataatcgttcctaaggagaaatgctaaaaggcacctatagtataaggtgtcatataatttaatgcaataacttttatggaatattattactaaactaatcacaaggcgccgcacctcaaggtggtaccaagcgtacctgcaatactgttactaaatagcaatgataatcattatctttataatgtataatttacctagagagtaatttgagctcctcttgatatgttgattgcaccatattgaaatccaatttggcaaactcaagtaaagttggattcatgtcttgttttctttcatatatttcttcaattaatagaccatttagcttcttatcaaggattctccattgaagctgtggcatctccaaagcatgattc

SEQ ID NO: 231991 - DNA, 767 bp, Cannabis indica
atacccttctaaagttaaggaaggagctggtgtgatatgaagaccatgatgtatggtgcctttgagatatcgcataagcctcttgcaagcttcccagtgaagacttgtgggagcatgaataaaccgacttagtttattaataatgaatgctacatctggtcttgtgagggtaaggtattgtaaagcacccaatgtgctcctgtaaagagtatgatcaccaaagggttctccttctgtaagagagagtttaatggccgaactcgtaggattagaacaaagtttggctccttccatgttgagatgaacaagtaaatctgtgatatactttgtttgtgacaaatacatgcctgctgatcacgataaatttcaataccaaggaaatagtgaaccgaccctaggtcctttaaaaagaaagacttgttaagatcagcaatcaactttgaaatgagatgagtgttaggaccaattactaaaaaatcatcaacatagacaagtaggattatgatgttgttacccgaaccataagtgaacaaagaggtgtccgatttttaagcactaaaaccccattctagtagcttgtctctaagggtttgattccatgcacgaggggcctgctttaatccatagagggccttgtgaagttgacacacatgagtaggtttggtaggatcaacaaagccttctggttgactcatgtagacaaatctcatgtagctcaccatttgaaaggcatcggagacatccaattgcttcacttgccagttaag

SEQ ID NO: 231992 - DNA, 1459 bp, Cannabis indica
gagactaaccatttaacagctatatcatttttttttaattgtaatcttacagactagctatgagtcaacaaactacattcctaattttgccaataaacagcatccttttcaaaacatatttcaagtaaaagtggcaatttccttaattttaaaacatcatatacattcacctttatctatggtttatcagaatgatttgtttatttataaattaattacctatctactaataaatcttacattttaaatgaagaacatatatatctacttgatactctatggtttgaggtattacttatgactgtctcaccaactgcaactgcaactgcaagtggtgtatagttgagtgttcctatggtaattgattgagaaggccacaggcaatgacaagaagactgagatgattgccacccaagtactaactgcaatccaaaccgacgatgagtactccatatcgccccaagttaaaaggtcctgtgacaaaggattttcatgctagagttaaccttaagaagatagataaagcataagcaatgtactatgtagagtcctagctatggacaccattgcattatatgccaccatatgctttcaagacactgctgcaacccaaaacaaatgatgataataattagtacatcctagcttctaaattatgttatcactattcataaacagattgtacttttaataagtttccattctctcttcttcttattcaaaggattctgctttctattccttaaccctttggagtaagaataaaacttttatttttctatgataaattagtttgtgctttatatggagttcatgtttgtacttataacactatctatacaattatactttctttctgaactctcaacttgcttcacatcagataaaaaaaaatgaacaatatacagtaggaaggacacaggaataggaatagaaatgactagtgagaataggaatagaaatgactagtgagaataggaataagtaagaatgaaataaaataaaattcaaaatgcattaaaaaaatttataaaataattattaataaatttttttctcatcttgcactggaatggtctttcacttcatttcaaaatggaatacttattccactaaaatggttaaaaggtcattctattgaattgacattcaaatactttaaaatgcaaccaaaggaagaagtggaatgaaaattgattcattttcattgaaatgacctcttctagatgctttatgaagatcggtttaagcaaggcttacaatattgttgtctggttgtttgtttctgatcttcttaatggtctttgtttccccactatattcattaattggattttagtttgtttgtagtgcacttcctataccctgatgttgaatggaagatttcatggggagttcaaaggtgaaaaaagtcttcgtcaagggatcctatctcgacccttactatttgtactgatta

SEQ ID NO: 231993 - DNA, 1763 bp, Cannabis indica
tgttagtggttggaaataataagttctctgcaactgaagatgttgttagtacgtatcttgcacatagttgagtgctcaagctacgagattgaatgaatctgttgcaacagtttctactgttgtatattttgaacggtagataaatggaacttaatatacaagttcttaaagttaaatgtgatattgaaatatttttaatttgataatttttagtttgttaatcagacaataattatttgattcattttttttaatttaattctggtagtatttccaaggaaaatatatattattattttacaatattcttagtaattaaattacataatttattaaaaaaacatatttttttagttctaattgatctcctcttcgtgacatgataatgaccatgactgaatgagtttctttggtttttaggatacttattagatgaccaagatattatcttgtacttaatgagatttttataacaatgcgagccctttcaaaaaaaataaaaagtaatggaagcggtgcgaatagtcgtggtgtatcttctagtcttagaaaacgcttgaaatagcaacaaattcaataccaaaaaatattggtaaacgatgctaaaaaaaaagtaaataaataaaaattacagctaatggtgagttgacacgtggaacatgtgccaagtgggcccatgagaagcgtaggggtattgggtgatggaaataataatgaattccaaggtaaaacagtggaaaaagaacagaggtggtggggtccagtgtggatctagtacgagaaaacacaggataagaatagtgcacctctaatccacccactacatgtcactacacaatggtatttcctacaccgtccttaaccatgtctatgtcctctcctctcacacactctcacgccacccaagtcaccgaccgtcaattccttcataatctccctacctccctcattcaatatctcatttagtttaattcatttccccttttatcattatcaaatgttcataacttcataacacaggtactttttttcttctttctttttttacaccaataataaactttttctttttatcagttttgtgaatcaccatctactttcattttcctcttgttatgtcaatttttttgatgtttttgtgattgtggtgcattggtttcaatgaatctgcaggtgggtcttgatctttctcggtgtttttttttaatcatattcggactcttatattattatggtctcctggatgattttttttaatctggggtgtgattatgagttgggttgatttgaaaatatccatttacgtggtttgtagcccaaagatatgaacttttgtttccgattgtcattttttaataggtttagttgttatctgattcgatttttagtttggtcttattcttttatttggtatgtcatccttttatgtttggggtagttgagttaaaaatcaatgataatgttcttctagcaatactgggaaatggcaaaggacatgggcatatgttatagagttgatttaattagataaaattctaattttgaaataagtttcctattacgatcatcgtagaaatataatatatttgcaaggaatccaatgggttttatgttataagtgagtgaactatgtaaactgtgggttacaactaaatctgcgtttcaatgtagaatggtcatcataagtgtctgtttgccatatctgatagatgctgaaatcttttaatataactgtgtttcatggttttgctcaattggttaaa

SEQ ID NO: 231994 - DNA, 667 bp, Cannabis indica
attgaacaatggaatatgggagcgttaggaagatatgtttgagtcatagctcaaaagaatgataatttatgggtaaaatagttaattcggtttacatcaaagatcaaaattggtggagctaatgctccacaaggagggagttggtattggaagaaaatagtagagatgaataatttgatcaaagggaaaatagattttgctagttcttgactatgaatttcagcatctccatgttctgttcaaagatttggcccagagaacaaaaccaaagcttagaattccttcatttggaatatgtatagttctcccaagtacaaatttataagttggttagcttgtaagcaaagactttaaacttggatagactaatcaattttggtatgatctttgatggtacttgtctcttgtgtaacatcgatttaaaatcgtataaccatcttttttggctagtaaagaagtcaacagaagttgtttgtttggacatagattatgatcagaaatccaagtcttgataccattaaattggataaagaggtgtggattatcaaagtttaggagaaattatttttacagctattgtaaatgcaactgtttacaaaatttgggaagctaggaatattgcactttaggaggctaagatgtataatagagttaaaagagaaatttg

SEQ ID NO: 231995 - DNA, 1191 bp, Cannabis indica
gctggttagcatttctcttaacatgagaaacaacaatgcctgggaaaaaggaaagaagacaacggacatctaaaattaaatcagaaaaagcagataaatctgaggatgcatgattgattgctgaggaaacacgaagagcatcagtctcaacataatcgatttccaaatcgagttgcgtgatccaatttagtgcatgaaagagagctttcgcctccatttcgtctgatctaaagcatccttgaattggcttcgataaagcagcgactacctgaccatcatgatctctaacaattgctccaacgccaagaattttgtcgacagtattgaccgcagcatcaacattaagcttcaacttgtgaagtgaaggtggcttccatggaatgccctctgttggtcgggtcttgaatgcagcagaatttgtagaagtagcagcagtattcaaatgattgacagcagaatgtggagatagagttgcaataggatcttgtgtactggtagcttttatatagttgttcatatatgttgttgcatgtaaagccagagcagtagcatctttattcttatttccatgtattattttgttgcggtcagtccatatcacccacataatgcagatcaacatctcaaactcatcctgactaagcaaattggctatatggaaaagataatcaccattaaccaaatgtagggccttagcataatcaataggataattaaatagtttccaaacatccttagcatgcctacagcaaaacaatgcgtgcccaatcgattcccaagcttgtgtacacaaagagcaaactgccgaagtgaggacttttttttgaaccaaagcagaagccactggtatagcattatggatcacccgccaagcaaagattttaatctttgagggtagcttgagattccaaaaaaatttccaccattcactatgtgagtgagaagtagaatctaagtccttttcatttaaatctgaagctagatgaaagccagatttaaccgtgtaagtcccagcagtagtgtaatgccaaattagcctatcttgagcttgaaaaaaacttaatgggatggtcaatattctgtccacatctatatccccaaaataagcttttaataaaggcaaattccactctcttgtctccgaaatgaaatgggagactgtcaaagtggctggtccaacatagttaatag

SEQ ID NO: 231996 - DNA, 652 bp, Cannabis indica
agattactcatttccttagcacgatctttgaagaaggtgaccacaagcgcactgtcgcagtagaaaatgactttttgaaactgctttttgactgcgaaagtggcagcacttcccaacatttgagctttagcaagggcaggatccgctgcagcgaatcgctctgtaaaaataccagttatacaatttcgacaattagaaaaatggggcagtccatggaaggaatgggaaaagcactcccagtttctctctagtagggagggagttgctaaggatttgccaccaaagtagtttaaatcgtgcatgaaatggagagttccagatggctttccaaatccaattaggatggtcttcaagggagtgttttgaaacaaggtggtaggctaattttgttgtaaaaacaccactcttctctcccagccagcgccatgaatcatcttgtgggagcgcagggagactaatgttgagtatatgtatagcatcggatgggctgaaccattgtctaaccttcgcttcatgaaatcacttaccaagttagcaccttgggtagcatctaaaagaggccttggtttatgatcccctattggtacccaatcgtcaaaccatatagaagttgatttaccacccccgatctttctgaattgtgtatgaattt

SEQ ID NO: 231997 - DNA, 1674 bp, Cannabis indica
ctaaaatcattgtgacatttttgatctccaatcgggtatccaaggtcaccgaacttgaaaatatttttatttcacaaataactcatattatatccacgtatttcaaataaatctctataattaacaaactgcacttatttatccacttatcgggtcttcagggtcgtctaacttgaaaatacttttgttttacaaatagctcatattacattcacacatgctataaatctccataagtaataaattacacttatttatccatttataacaaaattaaaatttatgctgaaatagattagtaggttcataatcccacttattacttgattaactcataatataaatataaactctaattatttaccattagacttatcgggatattacagttcatatgtggcaatttgtcttttatccattcatataagtgacctagccttattaggctctcaatttcatctttcaaatttttactttcattggtagtgtggttaatgtcattgtgatattcacatctttatagggtccctctacgagctatgccaatacagaggaagcggcctctggtagtggatgttttatctcgtggctaagtacatacgttcttgggtgtccactaaatcggtatactaagtatactgggaggtgtagcctttcttctacctcttgttctcaattcgcatactttctttcgatgacctcttgctctgggaggtttgaggaacatctgctgcacttgctataggtggtgtagattgagagagatactattggctcactctggaagccaggttccccctagtactctgaaactggattgagctagagtaagagcaaggttgtgggtatatcctagtgttgctgagaattgcacaatgggtatcccacttgtctttggtgcaactggaagagtaattctagaaaactgcactctgagagcataccttggaccgccagtagggtaatatcatccgaaagtagttatttgtgctccctttaaattgatgtattttttaaccctcttctggaagtcttgaaggctagcagctccttcttgctaaagctcattccagaaagggattctcgtccaaattctagcttatagtaatgccaactgctatccatcatccacttttttagttttggaagctttttaaatctttttatgaatttttttagattttcgactggtagttgcttgatgttggttaaagcactgacttcaaggtttattttcctggctgtcacaaactgccttctgaagctaacttgtaatttgtgccaacagtccacggatccaggttctagctttttaaatcactcctcagtagaccctcctaatgtaagtgggaagcacaaatactttgtgtcattactgactctcatgagcgtcatcacgtgattaaacctagataagtggtcactggggtctgagtctccagcgtatagggtcatttcaggcattttgaaattctttaggagctccgctttaagtatgtttctggcacagggttctcgatccttgcaatcaaactccgaatcatctcccctttgtcttcgggagactttggctatatctttttggaggatggcgagtttaacgaagattctctcattcagtgcactattcgagactggtattgtttacctctttcgctctaagtgatttctaag

SEQ ID NO: 231998 - DNA, 1057 bp, Cannabis indica
acctactaaacgtaaaaaagctgaatggtacatcttgaataattgcccaaaaattcgcaagtatattgatgaacacatggaacaactaaaggctcgagggaatcataatttggatcaaaaacaggaaattgagtttcctcagtggtttagaaatcgggtaagtatctaaacttattctttaagttcatattaacaaattagtagaacacaagatgacattgtttcttttattgttgcttgtgttagatcaatcaattacgaaagagtggatcaaaggaggtgtcagatgaaatatatgccatagcaaatagatcatattcctctgcatattcatatcccgagtgtatcattaatggtgtgaggtttgttactgagaaacgagatattaaccacagaacacaaaatagtggcattggtgttcctgggataggcgcgactaacttttatggagtccttgaagatattattgagatgtcatatctaagaggatataatgtactattatttaagtgtaaatggtatgacactagaaatagaaatatccaagaagatggaaattttactagtgtgtttgttcgtgatctatggtgtcaagacgatccatttatacttgcatcacaagcacaaatggtattttatactaatgatgataagaatggatctgattggagacttgcacacaaagtcagtcatcgaaatatatgggatgttccaaatattaatgtcgatgctcaagcagatgaaaattactatgacatcccaatatttcaagaagataattcttctaattttctcatatggattgaacttccagcgcttgataatatgcaatttcatccttacgatgatgccgaagtagaagatgtcaacgctaatgtagatgaactacttcaagtaaaggtgaataatgaggttttagttgatgatggtgattttaaagatgatacacttgaagaatatgaagataaggaaagtcatctagaagatgatgatgatacatctgattatgaataataagtatataagtatatttatctctttttattcttttcaattt

SEQ ID NO: 231999 - DNA, 1078 bp, Cannabis indica
gttttttatcctacatataataaagatgccacatactgatttttcaaactagggtggatagtatgtactaagggaaaaccatcatcagggagccaatgatcttcaatgattgatgtttgaattccactagcaatactcttcctagcactagctgtaataagatctttggcttcaaaaatgcttctccacacatagctaggactgtttcctaaagtggcagtcaataaagagccattaggaaaatatctagccttaaaaactctgctaaccaatgttgaatcattcactagcaatctccacgccttcttgctaagtaaagctaaattatactgcctcaaatctttaaaatcgagaccaccattattcttatgcttgcagagttttttccagctcatccaagtaactccacgactttgcttagatgactgccaccagtatttgctcatagtactctctaaggatttacaagtattactcattcaattggaagtattgatccaattttttaaaattatgtttcgtaattccacaatgacatagcatgatttggaagagcttgaactaccgtttttagaagaagctccttaccagctttcgataagaacctcccttcccaactttgaattcgtttgcataacttgtctttaaggaaacctaagatagcattcttgttcctaccaatgatacagagaagccccaaataaagacttgtatcttttgcttcgtggatacctattctttaacaaattagagaacgagtagaagagtgtttacactgaagaacacaaatgaatttgagaaattaaccatctagccagaagccatttcaaaatcctttagcaaattcaacacatttgtagtgtcattctcattggcacaacaaaataaatagctatcacccgcgaataacatgtacaaaatgaaaggagcacagttcgcaacctgaatgcctttaatttgatgtgaaacttcataatgcttaattaatgataaaaaagcttcaacacagattaaaaacaagtatgaagacaaagaatcaccttggaagattcctttagacaggaaaataagacctatt

SEQ ID NO: 232000 - DNA, 1280 bp, Cannabis indica
agaaaaacctaagactggttacaaacttgtctttacaaaaatgccgctaggggaaaccattaagtcattctcctaaacaaaggatgagaggggaagccgataaactcgagaaagaccgtctgcatatagcttggaaagaccatctgcacgtagctcagaaaaagatcaactacacatagcttgagaaagaccggctacacgaagagagccttgatctctacactggcctcattcccctcatcatcacaagatcccatttcctgaagccgagatctatgtcccagcctcaggaaatttctcaacactggagagaggctgacgtaaagatctcctggcacaggttatgatcttgggttgactggattctgtgatagaaaccacgctaacttccttcccagatccacctgaaaccatgccaatcttcctctggaattcttcatcagcctgaggaggatatttgagattgctcacaagatcaataccctctgggataacttgtgaggatcggccatggcaggctacagagttcccctggtttggattggtcggaagttcttcagccctggaatccatcattctggctccggttgaggcctgaagtctgtaggaacaaatggaaaatggttggtgcatctgggtattatgagtctagaagggtaaacttctaaactcaaaaaagacattttgacaagaaggaagtaaatcattctgaaaatagatttcactaaagagccagaaggattgtcaaaaatgacaagcttgagccgcacatttatacacgaagtttagtgacgagaaagccaatgattgagaaatctaacggctgggaatcgtgtagaatatgaataggcaattcataatgatctttaaaaccatacaaccgccagaatcaaaggaggtgtccttttcaagaaagcattttgttgaaaataccctccgtaattattaaaaagctctttttactaaaaaagaactttttaaggggcaattgttatacccaaaattcagctagaggacacgtgtcaaggaaaaaggaatgtgaatcagtgcaatatctttttatgtaataactcattaattgtgtaagtattagagtatatttgtaactcgcttactgtaaggtcttaggcgagaaatcaatgtacgaactggtacttagtgtattaacgagaaactatatgtcgctaaaggagaatagcgaggcactagagaagagtaacacataccttagctgacaataagcaaactaagtgtaaaagtcagatcggctcgaagacaag

SEQ ID NO: 232001 - DNA, 991 bp, Cannabis indica
ggtccgagtttgggtctgggatcgggtcccaggttcaagtctgacctgatctcggacccgaaactcgaatcagactaggactgggactaaaacccagatattggaccataacagggccaaaacctaaacccaaacttagaccagaacccataccaggacttggacccagaacgcgacctgtgacctaggacctaaaccaagaccgggacctagatacagaccaaaaccaagacccaaaaactagggccaaagccaggacccaagaacttgactcaatcctaggacccgaaacccggaccagactgggactgggacccaaactcggacccgaacccaaaccaagatttggactcggactggacccgtacccaaacccgaaaacgaacttggacccggattgggacctaagaactgaacatagatgggggaccctgacttgggaattgggcccccaaactaggactagaacttgggccttagaacttggatagggatctgagacccgaccccagacccaaacctggacctaggaccaacctcgagacctgggattcaaaactcgatgcttggacctgaccagtagtcggtgtctagatctaggacttagaccagaacccgaacccaaactcgaactcaaaccaggacccggacacataccaagacccagacccacactcgggaaccaaaaataaatcttgaactggaccgggatattggaacgtgaccaggacctggacctagacccgaacccggaactggacccaccttcggatcctaaccgagaccgaaacccgaacctcaaccacgccccagacccaaatcaggacccaaacctagactcggaccaaaactcaaccccaacccgtaccccgtgttcaggtacgaacctggactcgaaccaagacccagacccagaacgggatcgaaactcgggacctagatacagacccagaccgtgacccagacccagacctggacccgcacctgggac

SEQ ID NO: 232002 - DNA, 2202 bp, Cannabis indica
gtaaatatttgtatgtggactgtataaatgtttaatgagccggcccataatatttttgtaatttttattccttttttgtatttttctgtttttttccctttaaataaatctgtacgtggatcccactaattaattaaacatattaacaataatttacggcctaaataaataagtttaattattagttgcagataacaattaaaaaggatatatttatttagtactttatgttacctcgaaaaatacatttgatatatatatttttaataatatttatttattactttatattttaaaattatacatatttaatgtcctaaagtaaaatataattaatataattttattaatttaacaaaatagttcataattatatgtaatcaaataattgaatttgaatttaaaatttataaaattgaagacagtttaattgtattgataaaattttattaaaatatttttagtttaaggtactaaatatgtatgattttataacacaaaataccaaataagcatcattgaatatataaagtattaaatttgtatttagataaaatataagttaccaaatatgtatacacccatacttaaatttaatttttgaaggtaataatttggaatgcacatttcctctatgaaaatagagccgtatggatatgctactaatggagtgggaatttcccgtctaaataagaaatggagtggggacgagattattttttatctccaaatattaaacgggatgggaacgggtatgacacttctagcagaaaatattatactttgttcaccagagggaaatttttttattaattattcagagagtttttctttctagattgtccaaaaaatttctctcataaattaatgacctcgagtagccaaatatacaaggagagaaacttctggtgttttgctcattactacttaatctttgttgaaatggcatacgagttccaactttgtgtttagattctatagctctagactctagagtaattaagtgtgtatacttctctgcaacatcaatcatgatttacataaccatgtgaagaaagctttttccttgggactaatcacaagccaattccctctcttattatgtgttttctaggttttgcttctctttgtgagaatgatagagacaaagagggttgttgttctaacttttgagctcaatttgtaagactgcgggtgttttttgcttgttcgatagacatgatgtgttttgggaacaagtagaaagaaataaattaagtgaaaggtatagtggagttacagagaggaagaacatagagaatggctatggctatgaaagctagtctaaagcttctaggacaataccccattctcagttgcagtaaacactggaggggttcatcattgcgagtgtcgtttcggggcttgtgtacggattctacagagctacagctcaaggacttcatggagtacctggattctcttaagaactatgagaaattaggggtccccaaaggtgcagggactgattctgaagatgggttcgatttgagtcggatgagaacgttaatgaagctacttgataatcctcactccgacttcaaggttccaacattttccactttttttttttatcaattttatttatttttgtattattcttaaatatctatgctctgtttggttgagtaattaaaacaggcacacacagagttggcaattgaaaaattttgtattatagtataatttgggaattacttgtttgactttggcagcttgaaaatatttgaaatttgggtatgcatgtagctgaatttattagaattatagctaacatcctttcctttttttttttttggtttattttccaactaagccgataatttatgtttgttgtagcttcacagagatcattgccaaaaaatgtatcttgttagagacgaagtaagctatcatatgatatggttcactttatactctttattgtgtgaaaattctgctatagatagctcttttgttattattcttcatatttgtggaacttgagcaatatgcgattgacgagcattacaacacttttaggccattcatattgccgggaccaaaggaaaaggttctactgcagcctttatttccaatattttgagggcacaaggctattcagttggtagttatacaaggtagtgttattgacttcattatcgtcttcacatttttcattta

SEQ ID NO: 232003 - DNA, 1194 bp, Cannabis indica
gattgatcggctacgagatcaccataatcattgacgcaacaacttggttatatggaacaatggaatggactcgaatgtatggaggattggtcagaatatgcaaaagtgtcctctgtaggggctttcattgtccgaatgaacatggaaggttctctaagaattcgctttccctactagctagtggaagaaacctatcttaacacccactggttttggagataaaaatcgtttaggtgttgatagttgttgagcacaacataaggtgttcatgctcaccttaacaaagcatggataacaatatgcgaaagtactagattgatcggctacgagatcaccataaccattgacgcaacaacttggttatatggaacaatggaatggacacggaagtatggaggattgatcagaatatgcaaaagtatgcactgtaggggctttcattgtccgaatggacatggaaggttctctaagaattcgctggccctactagctagtggaagaaacctatccttaatacccagtgattttggatatacaaatcgtttaggtattgatagttgttgagcccaacataaggtgttcatgctcaccttaacaaagcatggatcattgatcacaatatgtgaaagtactagattgatcggctacgcgatcaccataatcattgatgcaacaacttggttatatggaataatggaagaatttcagcagaacatggagcaacttgtaaagaaaggcagagttcgtagttcgtaaaataaacaaaatgacaacgattattatacctgaagaaagaactttacttttagcaaggtagcagattgagcttcttgagtttgagtgtaattttaagcaatgatctctctttgactcccctatgctctcttctctctcttctttctaagaaacgtgggcatgcatactgggggcttccatggcccttctggtcgtggaaaacaccataaaccattggttttgggaagaataaaggccttcaccccactggtgttggctgggaaaatttctctgatccaaatcgtggtcagaaactccataaattttggagttttcatactaaacacaaggcatttattagcaccttgtcaaaagatggaggctcggttagaatttgtgaaagaacaagactttttgggtacgagataggggtaataatcgatgcagcggactggatga

SEQ ID NO: 232004 - DNA, 628 bp, Cannabis indica
tattttttagtacttttcaattggaaaataggccttttattactaaatatttgggtctaccccaacgtctttcccatgtgaagtatctcgcttttacttttctcaaggatacaattgccactgtcatccattctttgaatcataaatggttctctagggcaggtaaagaaacactgattaaggttgtccttcaagctatcccctcatatgccatggcttgttatcgaattcctaccaagatttgtaaagaaattgagtctttgatctctaaattttggtggggctcctctgaggaggctcgcaaagtccactgaaagaactggccgagtgtttgtcaatccaaatttgtagggggttggggtttcggtccttaactcattttaaccaggctatgcttgcaaagcaagcttggagaatctttcaataccctgattccttactgagtcgcatccttaaagctcgttatttccttaattcctccatccttgaggcagttcctggtcacaggccctccttttcctggagaagcattctatgggatcgtgatttacttaagcagggtttaatttgaaaggtgggaaacgatatgaatatcaacaccatagaggtgctggaaattattttacca

SEQ ID NO: 232005 - DNA, 1782 bp, Cannabis indica
gcgccaagtcttttaataattatttacttggatagtttggtaattttatatgtatggtaggaacacaaatataattttatattatagtaatgcataagtaatatactcatgttatttggtgaatataaaccctgcataacttatatagtcacattattagtaaatataaatttgtatgagtaataaatgtagattatttgaaaaaattagcttacaagaaaaatataattttatatgagtaatatggagtatacttagtaaatatcaaattatatgatttaatgttgaatcttttaaagattttttacaatatagtattttatttatttttaatattattataaataatttatatattaaaataattatatttaattaatattatatatactttgaattgcatttaattataatattttgattattataaaagcttacttataatattttatttattattataaataatttgaatgtttgaaataattatatttaattaatattttatatttaaagagtaattggcagtataactatttaaactctaaaatttggtacgttatacccatttactaaattgttggaggttaaaccttctaaagtttacatctattttagtttcactacaaaattatttatgagcatactaaaaagaatgaaaggagccttgtgtggatggggttggaaagtttgtgtcatttcttgtgtaagatgatgttcctacccgagaggctaattctgatctcaagtgacacgttcgcttattatggtcccaacctccacaaagtgtgcattgctgaccgccttgtatgccatcatttggttttattctagaatttttttgggatacccatgcctttggtcctcaccctaattgaatcttgtacaatatttagattatcatgatgtgctctagttattttttcagtacctgtttcagtactttgtctctagtcgtaagcctctttagaaatggtaaccaattttgtagctcaatctttgccatttgaaatatcacatcgtcgtgtgaggcataaaaactcagtgattgtgctaaagaattaagtgccccagacctacaattaattataaaattctctattacgtacaaacacatcatgataagttagagtttacttaatttttttgtaaagtgtgtttacttaacatttagttcataaataataataataatcaaaaaaaattggtaagatttggatcatcttttgactttcagctgagggttcagggagtggtatattggaagaactcttgacatcttttcgccaacaagttaaaattaaggaacttggtataactcgcatgtcaagatttttcattacacaccatatatgcctacaaggaataccatctacctcaaataagtacacttaaactcattgattagttgaatgtactgaactctgtgccttgattcaccacactggaatgtcttcgtcatcgacagacactaggtggatatcctccccaccatctttaattctcataatattcacaaaggactcaaccgtgatgggataagtttttccatcaagtttgagctcaaatttatcaatgtccatgtgggaatataaataccatatgaaccctcccttgacactaggtggcttctctaaaaggagggaaccaaagcctatgtctttgatcattagcttttgttgctcgctcatcagttttacaattgatgccaatttctccggaatgcagcgacaatttactttaccgtatatcatttcctcatgtagaacttcagaatatgaa

SEQ ID NO: 232006 - DNA, 1079 bp, Cannabis indica
atattgaataatctggattacaaagtcctgcaaaaacagcttgaagtttgttacatcccatcacatgaccaagtcgctgactgcctcactaaaagtctatcacactttcgattctcattccttgtggacaaactcggtgtgagaatttcaccctttcgtttgagggaagatgttaaggaatgacagttgctgtgacgccaattgctactgtgttttgctgtacacgattgttaggtagaatatcactcgtgcgtatattgtatttggtgtgctgtcactttctgttattagtcattatctttgtaatgattaggaaatcattcagttagaatattcacctatgtattgctgacaactgtaaggaatagtcgtttggggttgtatttcattgtactggttttacaccagaatttatatataaataccatgactctggctcatattgaaatgagctgagatttcagagttcattacccaaaattattctgttttcgcttattatatattatgattatttcatgtatactttgatcaagctttaatgtattattatatataatcttgttctaatgtaattatttagctttaaatgactgaaaatcattgtttgaacaattctactatttatctaacaattacagggtacattgtaaaaatgtatatatttacttaagttaattgtgataaataataataataataataataatgcaaaatttatgcataattaattccatggagaaaaaactaaagatttggctcttggattaatcatgaggttgtaatggggggacaagtattgatcttcctactttaagaaaaaatctcttgtgtctttaccataaataaaatatgggtgcaataatgttactttatttaaagttggtgggaagataacaaacatagctgagcaactccaactatatatatcctatacctgctttaaattttaatgcaattaatatatagttatgatgtataagtccagtactacatgtacaatacatatataaaagtattgttattgaatattattggtgtctaatataacatcgtacgattaattattaatatttttt

SEQ ID NO: 232007 - DNA, 690 bp, Cannabis indica
ttatgcaaagaaaactaccctttatttctaaacacaatattgccaaggaatgttttgatttgattcatgttgatatatggggaccatataatactcttactattggggggcacaaaatttcattaccattgttgatgatcattctggatatacttggggtgcatttcattaaaaccaagggagaaactcaaattgctattccaaatttcattcaattgatcaaaacccaatacaacaaaaccattaagggtgttacgtcaaataaggccaaagaaccacgatttacaaatttgtttagttctcttggaattattcactatgactcttgcattcatagaccccaacaaaattctattgttgagagaaaacatctacacttgttgaatgttgctagggctattttattttagtcttatgtgcctataacctattgggatgagtgtgttgctattgttgcctatttgattaacagaacagccacacccaacttgaaaaatgtctctccttttgaagttttgaaatccaaagctcccaactatgatcatttaaaggcttttggatgtcttgcttatgcatccacattatctgtgtcaagaaccaatttttctcctagggttgcaccttctgtctttttgggatatcctcatgggatgaaggcttacaagttattagatcttaattcccacaaaa

SEQ ID NO: 232008 - DNA, 504 bp, Cannabis indica
aaataaataaaagatataaacgataataaatgaaatcttatatacaaataaaataaaattattttatcaattatttcaaatttactgtttgggtttgtaaagtggttgcagcagtagttgcaataacggtttctatacaattttttgttgcaatttaggttgcagagctaattgaaatagggagttttatgtagaattccataaaaatgtaaaaaaaaaaaaaaaactatcttgaagtgtaaaaataaaaaacccataaaatgaaagagacatgtgagcatgcaatatactctttgaattaatcttatttcggtgcactaaataattctaaatttcttggaaatttgtgggatatatcatagagtaaaataatgtacactgtgaaataaaattttaagactaaaactctgtagatggcataaagatgaaaatggtaccatttagttttagaggatgcaccataatattttacaacattatataataaaattgattcactctttt

SEQ ID NO: 232009 - DNA, 849 bp, Cannabis indica
ccattgtcaattaggattctagccataatcttcttggcaatgggtgttgctatgaccagagggtcatgatgaagaaaacacaccgtctctgcgtcctcttctatgaacgtaatgggttgatccatgagtcggggcctttgagctgggagctgagtaacttcccaaacctcaatgtgttacggccctagcatagcgtttcaattcctttcgagtagtccctccaatatgcggtcctctggaggtcatagctactcttccattgggtctcagtggcaagccaggaatctgctgaggttcccccgggggagcgactggtgccaaatctccggacgcaccccctggcactccttggggaaaaggtcctgctaccggaaccaagttgagatgaggcagctggttcttaatccactcgtagagatgacccaatcgaatcaagtttttgatctcatctttaagatttttgcattcattgttgttgtgtccaatgtcgttatggtattcacatcttttgttgggatcccttcgggagctatctctgtataaaggaggcggtctccggtaatgcgtattttgcctggtggcgaaacacacacgttcttaggagtctgtcagttccgtgtactgggtgtattggggagtgtacccccttttctgtcactggtcatccgtctggttgttacctttcgaggacttctagtttcgagagccttgagaaggtcccgctaggcttgcagcaggagcagagtgagatgggacttgcccatttatccctgaaggattcccgtaatgagaagatgtaggagccaatgcctgactctgattatatcctggggtagcggagaattgtat

SEQ ID NO: 232010 - DNA, 1170 bp, Cannabis indica
tatttctcaagtttagaattaaggttaagattttttttctcttgaattaattagttacttcgctttatttttatttgaaatttttagaattgcttttagttaattttgtattatttagtaaaaagtccatgtgaagacaaactttagttacttgtcattgtattaattgtttgtaattgtgtacacttgcgcagttataaatcaatataaattttcacaacaggcatcaatatagacccttgactaccacccaaccccatagtattattactttcaacttttctcctcctcagccgaacaggtacatgcaactagagaagagtatacaacagcttaattattaattattatcattaatatttgacatgggaattgagaagagtaaaaccaagacaaaatctcatcatctttttcttttattttcttttcttcttatactatatatatgcatatatatgttactctcaaatagataattgatcaaattgatcatgtactgcaattactagtcagcgttctcaagcacggttttttttgtcaaactttctttattatttatataaaaataaaggtttgctgaagaattttacttgaaagaaaataattttacacaccaattattcaaatatcattttaaattttgtgttttgtaaaagttactaattagaccttctgtaaattaaatgataaaacagatcttatctttttcaaaattgtataaataggaccctgaactaattttttatcaaaataaaacttaataataattagatataaagatattgtgacaaaattgattacattttctgtatttattcgtgttaaaaattattttaaagttagttatattaaaaaataaaataaaattgttgaaaattgagctcaggatcttattttcactattttaaaaaatataaaatccattttatcatttaacaaaacagaaagttcaattaataacctttgcaaaatacagaatattatttattattataaacacacaacgcactatgctaaaaaaaaataggacgcgcgttattacattatgtcacaatccaaaaaatataaaatatcatacaagtttaaagtatgactaaatttactaaaattatagatttgtgccgcaatttttaattaaatagtgagctatatattactattattattatt

SEQ ID NO: 232011 - DNA, 1409 bp, Cannabis indica
cacgtgttgtaattttggttgttaagattcttaattctgccgaccactcaaggtcactcatcatgcaaactctgtagtactaaaccacacatgatcactctaagaaacttaacaaagaaccatttcagaacgaacttaatccggctctaataccacttgttggacaccataacacgtgaaaacgtaattactttattattataaaagtaattacaccaagacttgaatactttttactagaccacaatacacaaaaaactcacactcttttattttatcactagacacctttactacacacttctgtataactcacacttttgagacactttgtctttagacacttattaagaactcacacactttagactctttttctcacacttgaactctcttactcaaacttacttcttaagcacacgtacacctcacttctatttataggctacaaaggatgtatctaaaatatttctagatttttctaatttactaactatttaattacttcttactattttctaaacaactctagaactatctaatcttagttctagtgattctaagttttctctaaaactttctagagtgttcatggtttttcttacaaatttcttagaatattgtaaaacattcaaacatattctagagttgataatgatttttaacaatatacacatggaataatcccaaaaggattaaagtacatacagaacagacaaacgaggccaaggaccatgatcaaaagcaacacgagtagctttcgcggccaagtcaatgttgtccttctctcattctccattttatttgattttttcaagcacaaacaaatttaatttaataataagtgaatagtcatttttgctactgagctacccctattacaatgattgaacccaaaaatagtaaaattattacaaagagtaaataataattggaataacatgttcaaattcatttgaaagagcagttctatttgttaaagcagtacacagtacacaccataaagcttttagcaaaaaagaaaaaccataccataaagcaataacaagagctacggtagtgctcctttgtggctcatttaggcaattgtagtggtaaaaaatcttctcattatcctaaacacgcatgaaagcccaatatgatagtcggacggaataacaaggcacaaataacaaaagagaaatttatgttgtatactatcttttttgttactttttgtttttaccgtaccacgcgtattattatatttatactgtatatattctatactatctactgtattttttggaaaaaaaaaatatgtggtattttattacatgtgtcatcccaaagtagtattatgatgaaaagctgatcaaaactatcttctatacgttttttttttcatttgtagttataataggttattt

SEQ ID NO: 232012 - DNA, 1189 bp, Cannabis indica
ttaactaacagtggtaatgttaactaattaactatctgtaaactaactactaactaactttatggttaacatctctcctcaaaaaaaaaagggtaataaccattttgaagtttagacttgagatatgagaactgatttgtggataaagactttacgagatcatttgccacttggtcataagcaggaacataattgacagaaagctgattttccatgatttaatctctaacaaaatggagattaatttcaatgtgttttgatctagcatggttttgattgtttacccaaatgattggtggttgggacaagggaatatggagttcctttagtagagaactaatccatttgagctctgctgcagcattagctaaagccctaaactcactttttgtacttgatccagccaccacttgttgtttcttagcagatcaagagattaaattgccatttaagaacacgacataaccacttgtgctcctcctatcatcaacacaacttgcctaatttgcattcgagtagcactcaagagtgacccctgcagtaggtttaattaacattccctcattaactgttcctttcaaataccttagcaattttttgtaggcttcccaaggcaatgttgtaggagctttgagaaattgaatgagcttattcacaatgaatgcaacatcagatttggtcaagcttagatattgtaaggcacctaaagtgcttttatacaatgtaggatcttcaaaaggctctctttcatctaagctcaattttgtggtggagctgctaggatttggacaaggtttagcacctttcatgtttagtttgaccaaaagatcaatgatatactttgtttgagatatgtacattgctgttgaattcctgaaaatctcaactcctagaaagtagtgaacctctccaagatcctttagtgaaaaaagttgattcaagtctgcaataagttgagatatgaggtgttgatttggactagttattagtatgtcatcaacatacactagtaggacaattagattcaaccctgagccataaatgaatagtgatgtatctaccctggatgcttagaaaccccattgaaacagactattctttagcttttcattccaggctctaagagcctatttcaagcaataaatggccttatgtagcaaacaaacatgatctggatgttgagcatctt

SEQ ID NO: 232013 - DNA, 1081 bp, Cannabis indica
ctcaatcaataaagaagattttgtgatgttctagaactcgaatagagctatagatcacataaatctattagacttgaactagtatatgtttttgtgttgattttgttgtttattgctttgattgtttttgaatttaatcatgttcatctttgttttcttcgattactgttttgcatttgtttttcttgttattataaactgtttgatgattagattttaattgatttgattttgcattttaattttaattttctcataaatagtttagttttttgttgtcagttaatagttaaactcttatttactctgttaattaatgtaatggacttagtttagtctataaattctaagcattctgtaatcattcaattcattcattcaataaaagtttcagtctttctcttttttctcttcttacaattctcaagtctcacaaaagcaaaatgacacaaacatctcatattgagcattgaacttgacagctgttgcgtgagaaaaaaccaaaaagttgttgtagggaaatagaaatagtactaaatgctctcgcgtagccaaaccatcggaaagggaagtgaaattcgatgtaattcttagtcatggaaaatattttaatttactagaaacatgttacttatcatccacaataatgtaataatctctacacattcggcactcttcacttttaatgttgtaaggatgatgatgatcattataacatatttcattccttactttcctttaaaagaatataccaacaacattaaaatttgtctactaattgggtttttcactatacacattctcatgaaattttacttgccaaattacatagtatttacttggaggtaaagagatagaatataatggaaagaaaataatattccattactttatttagttgaatattatgacatatttacttaatggaaatgagatttaaaggtatgagatcattctcctacaattgtttattaaattttgaaaaggaagaaagtagtgggacccacacaaattagagagaaaataaagaaaaagttctccctcgaatatctttttctttctaacttaatttattttaatt

SEQ ID NO: 232014 - DNA, 782 bp, Cannabis indica
ttcccctgattatattgtttccattaaccctaactatgagaactagctagttcatgaccaattgttaatgggttggctttacggttcgatgatggagagcatcgcatccgaagttatgggctgtcaatccgcctacgccctctggacagcactcgagaacctcttcggagcctattctcgagcacatactgatgatcttcgcaccagactacagaaaacaaggaagggctcgactaccatgaccgagtacctcaaacagaagcgtatgtgggctgattcactcgcacttgctggtgaaccatacccagagagacaccttgtgtctaatgtgctttctggattggagattgaatatctctcaatcgtttctctaatcgagtccagatctgaaacaacctggcaggaattgcaaagcatacttctcagctttgacaacaaattggaacgactatctgctacgcctctgagccccaaaaatttgaactctccttcagcaaacttagctcacagacccactggtcactatggcccgagaagcacaaaccagcaacatcaacaagggcgtggctcttcgaataactctggttcccgtggaaggaatggtaatcgtggcaggggccgtggaggacgatttggaggacccaagccgacttgccaagtctgtggcaagtatggccattcagcggctatttgctacaatagatacgatgagaattacatgggacaacaaccagcaggggaacaaaaccaggataagcaacttaatgctcttgttgctactc

SEQ ID NO: 232015 - DNA, 848 bp, Cannabis indica
tttcttaggctaagcagagtagagtggatgagtaggactctaccagcaaaagaaaggtgtttcttgacctagcaaataagcttttgcttcatctttttcaaaattatacaaaaatcctcaagcttccatttagtcagtctaagagggatccccaaatacctaaagggaaagctccctattgacaagttgattttctgagacaatgactcagggtgagtcactcctcccataaagatttgagacttctcatagttgatagccaagctagaagttttactaagctcttccaaagcctctttgataacatgcaccgagtctttatcccctttgcaaaaaacaagtagatcgtctgcaaagcaaaggtctgtaagtttgagtttttattttttacataagggatggtacctgaactttttctctttagtggcaagttggaatttccgcgaaaaataatccatgattagcacaaaaagaagaggcaaaataggatccctttgcctcaatccctgctcacctttgaaagtgccctggaatctcccattcataagtaaggtatatgaagtatttttaacacaaatcataacccagcatatgaatttcgtcagaaaatagaaagcatttaatagctgctcaagaaagtcccagtagacagtgtcgtaagctttactgatatctatttttatagtggatctcggagagcaatttttcctcttacaattcttcaaaagatcttggagaattaagatgttgtaggctatagatcttcccttaacaaaggcaccctggttttggttgattaaactcgaaagaattttagccaaccaagaacataaaagcttagatataca

SEQ ID NO: 232016 - DNA, 2519 bp, Cannabis indica
aagggttatttgatcatactccggcgatattaacgttatttcctactattctaaatggtaggaaacctttcaaatattttcggatgtggtcaagtcatccttcttttcaacaacagatgggggatacatggaagattgatgttcaggggtcaagcatgttcaaggtggtgtccaaaatgaaggctttgaaaggtatgttgaaacagttaaaccaccaaggcttctcggatatacataatcaagaattgcaggccaaggcctgattggaagagtgtcaagtagagattcagaggaatcctagggatcggggtgctcagcaaaaggaattggaagctcgagaagagtaccaggaagtccataaggcatttatttccttccttcaacaaaaatccaaagtgaattggattaaggaaggggatgagaatacaaaattttatcactctagcctaagagaaaggagaattcaaaataggatcacatctattgtgaatgcaagtgggattagagtggataatgtggaggatgtcactgaggcgtttctgcaatactataaatgaggggcctactgtttcggctgcccaagctgaagccttattagctgagtattcaaatgaagacataaagcaagcagtttttagcattcctgggaacaagagtccgggaccggatgggtttgggagcttcttcttccaggataattgggaaatgattgggatggaggtgtgtgaagccattagatcgtttctgcattcagggaagcttctgaaggagataaattctacagtgatcacgctcatcccaaagatcaagagccctaatttggtgagtgactttagacctatctcatgttgtaatgtgttgtataaaattgctaccaaactaatatgttctaggcttaagaacatccttccggatttagtctctcttaatcaaggagggtttattaagggtagatatatagctcataacatcatgatttgtcaagacctaattaggaattatggaagaaaaggagctaagcctaattgtttgattaaacttgacttgcaaaaggcttatgacactttggattgggatttcctcgaggaaatgttgattgccttaaagtttcctaaaaagtttactgatttagtaatgagttgtgttcgaactcctatgttctctcttatgttcaatggatccatgcatggtttctttgcaactaagagagggcttaggcagggtgatcctatgtctccattgttgtttgtagtgggtatggagtatttcagtagattgatgaggaaagttgggaagaaagatggattcggtttccatgaaagatgtgctggtatggagttgaatcatttaagctttgcagatgatgttctaatgttttgcagaggggatttcaaaagtgtctatttaatgatgcaagctctcaagctcttctcgatcacttcgggtttggttgctaataattctaaatctgcagtgtattgtagtggtatggatgaaaatgaaattagaagggtgcttgaaatgtcaggttttacaaagcaaaatgagcctttcaagtatcttggtgttccaatctgtgctaggaagatttcggcttctaaatgtagtagcctggttcagaaaatggtagcaagaattaggatttggagctcgagacatttgtcctttgcagggagattggtacttattaaatcggttttgctttccattcacatatattggtgtcaaattatgttcctccctaagcaaatcattaaggagctggaagcaatttgtaggagcttcttatggacagggaaaagcgtgatgagcggagctggggctgtagcttgggaaaaggtgtgctgtccaaagaaaacagggggtttggggctgatgtacattcctcactggaatgcagcagctatggtgaagcatgtgtgggcaatagagaaaaagaaggataacttgtgggtgaaatggattcattgtgtgtatatcaaacaagattcgtggtgggattacaaagctcctttgaatgcaagttggtattggaggaaaatggttgagcttaaagacaaaatcagatattatgtgcaacagagtgatttttcagcacatgaatatcaaattgggaagggtcaaacatggtttgctcaagagttcgaaaaggtatcttggtgtaatgaagtgtggtctagattaaatacaccaaagcatagctttgtactttggttagctatgatgaatagactcaaaaccaaagacaggttatacaagcatggagtgattgaatctgataattgcatattatgcaatgcagccgtagaaacaatagaacatcttttctttggctgtgtgtttgctactgcttctctctcacaggtgttgcgttggctcggctggaatacaaaggaaacatctctccaaagtctcatgaagagggtgagaaaggcaaaatgtagcaggttcaagaaaaaagtgaaggctgctggtttagcagcactggtttacttactctggcagacccgaaatgagca

SEQ ID NO: 232017 - DNA, 1423 bp, Cannabis indica
taatgttcttaaagcagagcagtggttaactgtgatcgaaaggatactgaattacatgggagttaccagaaatgatagggtggcatgtgccacgtttcagctccaagaagatgccctggtgtgtgggagatggtgtccctcacaaaatatgtcactagaatgacctgggaagaatttcgggacttgcttaatgcttaatattacaatgaggcggtccacaatgcaaaacggaaagagtttggtgagctggtacaaggtgagaatatgcatgtggctgagtatacgaccaagtttgatcgcttggccaagctggcctccgaaattgtgcccacagatttcagcaaaagggaaaagtacttggcgaggttgaatgccaagatcaagcatgatctagttattaccaccaatgataccacaacctatgttgaaatggttaacaaggctcttcgagctgaaggagcagtaaagtttctgcaagaaacccgagaggctcctggtgttggtgggaccgccactctccctatctctggtcctggcagggagagtggtgattccactatttaacaaaagaagagaactttcccacctacagggagttcagtgcaaagcaagaagtttcgcaaaagtcagggtaaagggggacgtcagacctactcctatcctgtgtgtccacgctgcaagaaacatcaccctggaacatgtaacacgagagcttgttttaagtgtggatcagttgggcacctcaagaaagattgtccccagctgaagaaagaggaacccaagctggaagctaaacctgcaccagtgtgagtatttgctatcactcaggcggatgctgccgccagtccttcagtatttgtaggtcagcttcttattaacgactttacttatactatgttatctgatttgggagctacacgctcatatgtagcaacaagagtgcttagtcagtttgataggcctagtgatatttttgaaatgggatttggaaccccgttgcctaatggggagttaattatttcaagaaagtggattagatcagttctaatcagaattgagggcagagaactaagtgccgatcttgtggagttacctttgtccaagttattatacttggaatggacttcctgtccaaatactctgctagtatcgataataaacgaaaaatggtaacttttcaactagaaaattaagaactatttgtttttgtgcgattggttcaaggttctcgtgtctcaagaatttcagcatagaaggctatggattttctacgcagtggatgtgtagggtttctagtgattgtaattgattccatgaaacctgtgttactcagacctggggaggtcaaagtggttaagaaattcctggatgtgtttcccaaggaattaccgggaatacctccacagcgagagatagattttat

SEQ ID NO: 232018 - DNA, 1600 bp, Cannabis indica
ttcattggaccttttgaaatcctacgaaaggatagggcaagtagcgtacaggttggctatgcctccagcgctgacatctatacatgatgtgttccatgtttcaatgctttggaaatatgtttcagactcatttcatattgtgagttatgaagcattggaactccagtcagatttatcatatgaggaacaaccggtgcatattcttgatagaagggagaaagtcttgagaaacaagaagatttcactggtaaaagtattgtggaagaacagtaaagtggaagagacaacctaggaactcgagaaggatatttagcaaaaatatccggagttgttcaggtaaatttcaggacgaaatttctataaggagggggtaattgtaatacccaaggattatgtaaatgaattagcaaaaccctaattagataattatgtattattgagaaattatattattatataatttaatatatgagaatttatatgattcatacaatgttaagaccctcttagtgagctaggggcattttagtaattttgacatgagaagggtaaaacaatgaaattaatttattaacgtgctaataagactatattgttatatagtatgcctatgttgtctttttcaggtgtgttctgacaagttggcgcggtatagtcacaatcaggtatttcgggctaaactgggttcaggcccgaaatgcaatttggaatagaattattggcatttcatttattgatgaataatctgaaaatatatttggatttatgtgtgtgaaatgacttaaatacccttgagtatgtgtgtgcatgctttatagccctaggcgcaaaatggtcattttgacccttaatttacaaataataaaagaaagaatttttaaggaaaagtaaattgatttttctagtttcgctacccccttacccaaaccccctctccctctaaaagcctctttttgtttcaattctttaatttgtgaaaattgcttagaattggcttgaattgaagctttgaggttggagaactttgagcttggaagtgaggtagtttcctaccaatttttatttgaattcttgttgagtttattatgagaaaagcatgttatgggttgtcttgctcttgaattgcatgtatgaggaattgtgttgatcttgaaagatttaggtgtgttaattccatgatattattgtgagtttattgtttattattggatgagattgttgagggttttctaggttaaagtttaggtgttaaattgtgttatgctactggaaattaattgagttgggttggtttggagctcaagttcttgagcttgagttcttgttgattaaggcatgattttgtgctattgtgcaatctgaaattgggaattatatgttggaatttaatgcatgatttatatattttttactctctaatgtttgctagcaactttattttttaatttgagagtttgattaagttttgggggtgttttggttgtgtttgggagctaattttcgtgtaaaagcttgctggtttctgggtttggaacccaggttccgcggcatggtctttagcatgtcgcggcatggtctctccttattatacaacttataa

SEQ ID NO: 232019 - DNA, 1010 bp, Cannabis indica
gggtcaaggttctcaagcttggagccttgtacctaaatgtgtttaagggttggtgcttttcatcgaatatagcttggcatcaagggggtaaaattatgatagcgtgggatcctaataaatttgtggttgatattctcaaatgcactagtcaaatgatgcatgtgagaatctcggtagttgatggtagttttgagagctatttgacagtggtgtatggggccaatgataatgagggaaggaaacttttatgggctgacctgtgtggattgagaactaaggaaaattggcttgtcatgggggatttcaatgctaattagccaaagaagaaagagtgggacacagagtttgttatcattctgatacagattttatacaatgtgttcagcagtgtcaacttgaagatgtcaaagcaacgggctgctattttacatggtcgaacaaacagcaaggacgagacagaatatgttccaagattgatagaatcttagccaatcaagagtggttggataaatacccaaatgctgaggcaatgtacttgaacgaagggacttttgatcacagtccagctgttttatctttgcacccgagatggaaaagtgggagaaaactttttaagtattttaggatgtggtcatctcatcctaaatatattgaaaaggtttcgaaagtatggcaaaaggaaaagagagggactaggatgtatcatttgatgagcaaattgaaggagttgaaggctacttttaaagagattaatagagaaggtttttcggatgttcaggctcagtttgaacaatcaaaagctgatctaaatgacctgcaagataagctacaacaagacccgttgaatgctgattttcatgaagcagaatcaaatgcccgggagaagtataacactgctgtgaagaattatctctcctttctccagcagaaggccaaggctcttggatacaaaaaggggacagtaacttagctctttttcatgcgagcatcaaacagagacagaggcaaaa

SEQ ID NO: 232020 - DNA, 771 bp, Cannabis indica
ctcctctcaggttttgaaactctaccaaaggaccagttgtccctctgctttgccctgctgtggtccatttggaacaagcgtaaccaaactctctttcaatccaagttcccttctctcgatgatattgaagattctgctgccaattatttgaaggagtacacgaatagtcaacaacattttgctacttcgattccaactcctcctgcctctggaatgcagcctcctcttcctcctaggggcatgtacaccttatattctgatgcagctatttcaacatctcgctcaactatgggcttcggggctgtgattcaagactccactggacagaccattgcagccatcagttctcctcatacaggtgctctttccccaatcttggttgaggcacacgctcttctccatgcaatccagtggtgtatcatagttcacttgcctctccattcaatttactcagactgttgatttagtgaacaagatcaacaagcgatccaaagatagatctcccatctcagatgcagtttggaaaatcattgattctttatcaacttttccttgtgccaatatctcttatgtctctcgcaaccacaatgtaacagcacacactttagctcataaggcactggaaacggataaagatcttatttggaattgtcatagtttcaattccttcatcatctgattttgtaacttcactctctcttattttctaatgttacaaatcagttttctcaaaaaaaaaaaaaatgctatatgtgtaatgatttttttttt

SEQ ID NO: 232021 - DNA, 1314 bp, Cannabis indica
ttcaagagggtaaacaaaagccgttggccacgcacaacttttttcatcatgaccgatacggccacagttataacaataccgtggcagtttgaagaacctaaactgaatccattccttccttccccttctcatatcaaggtaaaaccccgtagaaagaggttgaagaacatctatttccacctgaaacttgaaaaaacctcttctcgtgattaatctttggtcagcagtatcactccttttaaaaatacctgcctttctaccaacagtaggaatatttgatctgtttaaatacggagtgggaagccctgaagccattgcccaaaagatcgttttgttcatattcactgaagcccaagctccgtcctctggccattccttgattaaaagtaatttcccattgatgagccatggcctatgagtcaagatctcaacacaatcttcttcaagatcaaagaaaatcccccataaacctgtctttaaagttttgaatttccaagcccccctgagctttggtttccatatatgactgagaatttccttgagtcgtgatctggatacaccttttccgtcgaaaaatctagcaagaatgcccgttctagtaatttcttcgctcaactcaaaatccggttccaagtctaaagtcatggactggaaaaagtcctgtctcaaaagttccagttcatcagcacccttttgaaagttctcctcctcctcaataataccttcatttactgtttccaccctgttactctgatcttcacacattacttctgtaggctgtagtattccatccaaagtactaggattaggaatgtcattaataatcccagtctgcatggttgactgttcattaataacagtttcctcaaccaccatattctccactgtagctgattgaccactcgtctcccattacaataagtcaaagaagtaaagacactcccaaagcctaaccaccagaaaccaacaagaaaacacttttagctctgatctacttttcactcaataacaaatggaataatgaaaaagttcccctgaggatgaactcattgacatttaaccgtcattttggacaagccaaaactctcacactagagagaaaacttttaatgctcataattaagtatgaatcttttagctctcttttattaaacggataagatttggtagtgataaaattttacgaaaaaatataataatattaatagctatagttaaatggataaaattactatttgtttaatggaaatcccatatctgactaatagttacaattaggggggggcatcatccaatctaatccaattgaaccga

SEQ ID NO: 232022 - DNA, 1945 bp, Cannabis indica
attttataggacacattacacagagcaattggccgaagttgggtcatgttctcgggtttcttgttcttcgggattaggacaatattagcatcagcgcagccctcttcaaactctccagtagcaagaaaattgtgaaccatttgaattacatccttgcctacaattgaccaacttttttggtaaaaagctggtgtcataccgtctgggcctgggcttttgtcggggtgcatttgaaacactgctcttttgacctcttcttctgtaactggttggcggaattcttcatgagctatttcaggaatggaggtgttgacacaatcaatgatctcttgaaaagtacctcctgccgattggaaaagattattaaagtaactagtaatttccattggtaatccattctcccaatctacccaattaccatggccatcttgcaaccgatcaatctgattatgcctttttcgagtagtagctgttttgtgaaaatagctactgttttgatccccctctttcaaccataactgttttgaacgttgtttccagaaagcttctctttggtcaagcactttaaacaattgtttttttacttcactatatctctgaaccgagtgagaatctctcttgtttttcaggttggcaagttcaactttacactttctaattctcagtttaaaattacctgtgatttcttttccccatggaccaagcacatcggcacacttctttatttttgctgctaaattattgtcgactgaagcatcccagcagtctcggataatctcaaagcacaacggctctttgaaccaggcattttcaaatttaaaggtacggccaggagtgaattgttgaacaatgtcgggttccaatagaattgggcaatggtcagaagatgataattctaaattagtgagaacagcaagaggaaaaacctgggaaaaagttggagtgatcaacgctctgtcaagccgcacctcgacccagttttgagtgcctcggcctttctcccatgtgaatggataacccgtcaattccatgtcttgtaaattacagtccgtcaatgcttgttggaaaccagttatcaactggtgcggataacgtcgacctcctcttttatcttcttgtctcatcacattgtttaagtccccgattacacaccatgggagattggagtctcttgataggaaccgaaggagatcccaagttaaatgccttctgtttcgaactggttccccatagacccccgttagcctccactcgcctctctctggtgaagaaaccatgatgtcgatatggttagttgagtaaccaagaagtcgaccctctgtttgaaaacgccagaacataaccaatcccccagcacttccttgggcttccacaatgaacattccttcaaagcccaaagcacggcccactctttgcattttacttttgtcactttttgtttcacaaaggaaaataaaattgggtttcttttgagacacaatctccttaaggaattgaaaagcccgctggttcccaagcccacggcaattccaacttaacacattcataattcctggcgggtctgtgaaccagaacccgccccaaacaagttttttgtactaccatttgcttcagcatccatatccacatctattaaatctgtaggcccagtggtatttttcacatttgtctcatgtcccacgttttccataaccaaaagcccactttgattggcaaagcccattctccttctcttattttctataataagaagagcctcctcattattaattggattcgtcatatcagtccccccttcttcagtttgaaattgctcctttcccacactttccttattcggcctctcattcaaaagtggggagtcttcttccatatttcttgtagcttgattggttgcattgattgatttattttgattgaatcccagattttgtgcttgatttat

SEQ ID NO: 232023 - DNA, 1305 bp, Cannabis indica
ttttttaatggtagtaattataaaaatatttaaaaagaaattatataatttatggtgtgaaaattaagattcatacataatttgtggttccataaaaacaaatcataattgaaatattaaataaaaattacaaacatacacacactaattcacacatgaaaatattaatggagccacattgcaattaaggacacaataactttactaattaattaaggcaataataacacaaaccatgcataattaaaacttacaacaattaaccaatcatcataaatacacttcttgagaacaagaatatatacttatagagtaattggctaaacattatttatttatacatataatattagattaattaattaattaattaatttggataggcttcaatgacagattgcaaagcagggattttggtgattttgtaacgagggaaaccagattggtccaacagagatttccattctttctcagttctttcttttccaccagtgttatgagcaagcataagaacatcaaagacaacaccagtgtcatcaaacactccttccccatcagcctcaacaactatgtcaactattatcactttcccacctttttctgggattgcttttctgcaattcttcaatagcttcacacatagttcatctccccagtcatgcaatacccactgcacataataatgacaagaagatatatttgttgataattattgtggggttatttttgtttctatgtaccttatttttttatttttactaaaacgcaaaatatattttaaaattaaataaatagtaatttgcggcataaatacttaaatttaacttctggttgcaaataaatatgtaagtttaattttttgacggcaataatacctaagttatattcatggaactctacagttacttgattgttaaatgttatgtaaatttttacgtggaaatccctaattagtgcaagtcattaatttttatattcttttaaaaaaaaataatttaaatacactaataattaagaaaataacacgtgaatatataattacttgatatttaatgaccaggttcctatagaattccaaaaacataacttagttattattatcgctaaaaattaaacttaaatatttatttacaattgagaattaaacttaaatatttatttacaattgagaattaaacttaaatatttataccgcaaattacttttaaataaataaaaacaaaaatagcataaagtctatttactactaagtagtactaagtacgactaaattatataaatagataaaaatgtttttcataaata

SEQ ID NO: 232024 - DNA, 610 bp, Cannabis indica
acttttaatgacatgtagcgatataattaccgataaataaaaatatttgctttccacttacaatttttgtgatgtctatcgacattatctgtgatatgtatggatagttttacaaatagtgttcaggagccatttgtaaaatttaagacaaaaaaaagaacatattaaaacacataaaaatgtgtcgctaaatttcgcaaaataaattgcaacatatcgtgaacaaagttgccacatatcgatagtaatcgctaaaacatatacataatctgtgagaaaaaatccccaaggcataggtcgcgacatgtcgacaaacgtgtcgccacatgtcactaactatagcaaggcagagcaaacaactaaaacaacatcaaaattgcaaatgatgttgataacatatcgctacatattgctacatatcgctaagggttttaactttcaattcaatcatagctaatatcgttagatgtcacaaactatgtcgactaacattgctaactataacaactttctagtctaaggttgatggttgcaacaccctaactaacataggcgtattacgtgctttttaaacatgctgtgcagctcattgctaatcaacgaggtttat

SEQ ID NO: 232025 - DNA, 1364 bp, Cannabis indica
gaaatgccttttaacacttccagactccagtgatgtgatgtgcattcgaaaatggcagctgctcggttctcgatgaaggagcccggtttggtttgttactcagaacagcctatgcatatagtaaaactatataacatgatcatatcagtaactttctcagacacaaaacacaattcctttcagtgtaggctgatacatttgatgtgaatatgtaactcttatctgaatcaaaagagacttttgattttattgaaactaatcactctcttgtaattgtattgtattgtacattgagaaacaaagagaaacaaaaattccttatatcacatgagtaaaagatccaaatcatggtccaataaatctcattatatcacatgatcacataaacaaaattcctataagagatatttatctgaatagaaagaaaaaaaaatgattttagaataggaaaaatgaacagattatctaatataaatgatagtcaataaattgtaagctttactataagagatagttctatggaatctatatggaatggtgaagaccactgattcgtttaaaagtataatattcaacaaatatggtaaaacaataattcaaaacacataactgaaacttatgaaataaatttagtagctgtatttgagttcagttatggcattgtttttctttcatggtttcccaggtgacaagtggtgttactcaaaactaaagaagcacgccaagaacgtgagcgaacgaacacacgtgtttttcattcactgtattaaatctggtttctggatttcgaacctatttaagcaaaacttcccagcaaatcccggtattgctctccttttcttttgtcactttccgccaactgtgcccaccggaaatggtaggatatagaaaatgttagccttgtagtctctatataaaacctgtttgaaggatagacaattcactaagtattcttgtaacgttttattgttcaaggaagcaaaatacactcttcgaagatttttgtttgtgagttcatagaatactttcttgtacctaatctatgttattatcttttctattgcaagttttatgttgttgtgtgcatacattacattcttgcataatccttgttgttctgttaatcctatataataatttatctagtttctttcattctacctaatgattttgtagttaagcatgtttatggttcttgtgcataatgtacacacacacacgcatactacagaatctaaccaaagtacataaaatagagctaagtctcgattttgcttactgttcttttgagttctgttcaggcttgactgaagaaaaatggcaccaacatacttgtcacccagacaaatacgtgcaaatggggg

SEQ ID NO: 232026 - DNA, 914 bp, Cannabis indica
tacgcttttctagaagagctgattgaagctttctagaaagttgtagaagaaggaagctagttatagtgatggaaattcacaatagcagaagaagcttctagcacaatcatattaatttcatatgcttcccacttgtttccgttctcacattccaggccttttatcatttttttctttctttctctcttttttattggaaattatatatataagataatacaaatggaattacataaataattataatttaagaaaaaataaaataaaataacaatcaatcaaaatatttaggagtgtaagtaggtcgggtctgatccgactatgatttgacttgatccagatcatgtaaggatctaccccgcccgctcctttaaatcagatactcggattggatcagatccgacccgacttattcagatcgaatttgatccgacccgactctttttttttaaaaaaaaagaattttaatattaacttataattttatatctatttaattttgtattagtattattaaatacaatactatgtttggtattgacatgtataaatagattgtgtaaagatctgggtccgggtcctggtctcgggtcccgagtttggtcttggtccaggttcgggttccgatctcggtccgggtctgggtctgggtcccgggtctaggtccgagtccggggtctgggtccaaactaggttcgagttcgggtccggggtcggggtccggaccaggtccgggtaccgggcctgagttcgggtcccgggtctaggtctggattcgggtccgggtccgggtcccgagtccaggtcctaaggtatccgagtctggggtccaagtcttgagttaagtttttttaaaataaattgaaatcgggtcggatcaaatccgatctataaaaaaattaggcggggcagag

SEQ ID NO: 232027 - DNA, 965 bp, Cannabis indica
cttaataaagtaaccatttcagttgtactgtctaatcagacaatccttttaataccattgtctagtaagagaaccattacatataaaatcttacaacaattttacgtagggttataaccctttcttgtatacagtaataaccgtgtcacacatatatagatatgttttgaagtaaatttgtacttttcttaccttaagtctaaattcaagtgtgtcacccaaccagagtgaaaatcactcgacgattcaggccctatgtcgcattagtggtaaaccggtgaataactcattataacactttctagtacttaaactcatataaaaaaattttctatcgataaattgtgtcgtaataccctaaatatcgagagaaatgaaaattatggtacccaaaaataacctcaaatgggtgcacgaaattttaatttggctatcggtgtaatggccacaccagaacaaacgtgcaccagtttcccctaaataggcgaccgtttgagctgagaaattgcaactcaagaaactcgagttctaaacttccccacctacttaaaacacaaccaaacatatcaacacaagacaattagacattgtaagcatatttatcaactcaaaacacaaaaatacacaaatgaattaaaattcaccttgtgatagtttgagctttgaactcaaaagcttaaatctcactctccaacgaattcgacatctctataacaacaaactaaacatgattttggctcaaaaaccacgaaagaataatgcctaatccatcaatttctaactataacaaaatccctcaaataccatagaaatctagcttatatcaacaaaataaaagaaaaacactataacaacttacctcaaccttcgaaccatcctaaaattattggcaagcaattgagagaaatttggtaagagtttagtgtttattttcatgtttacgcttggattgaaagagaaacaga

SEQ ID NO: 232028 - DNA, 1629 bp, Cannabis indica
ggattagatggtttcttttctgtccagcttaatttctggtatccagactcagatgccttggatatgtttctcaactggtatcttggtatgataacatgggactttctcgggctccaaggcttgcacaaggtcagtcaatcaagatacagctatttgcttcatttcctgttcaaattgatggggaaccctggtttcagcaatcatgtacattggctatatctcatcatggccaggttctctttctctctctctctggcattaaataatttcttttatcttgatctagttgttattccattattgcttgtctattgcaagagtgttgacctatttcacttcgagaaaaatggttattactggtttctcagctagttttggtagttctgttttttttttaaaaaaaatatataattattattattattaccagtagatatctggtctcctgattaaataattttgcgccttaatttaataggctttcatgttgaagagggctgcggaggaaccacttggtcatgcagcagccataattacagatgtccttgacaatgcagagaccaacagtgttatcaatgcttcacagaagcgggctctccttcaagaaatggcattgaggctgtcttaaaagtcttgttgtgcaccagtaggagtgagttttgtggttgtgattttttttcatgagatttatattctcttcgtcgcggaatcgacacatgtaactttttttcctttcttttacaaagaaatattttactgatgttgatcactcaatgcttttaattgaagcatgattgtacatgaaccttgttcaacatccatggaaatgaaattttgtttagcgctttttttatttttcttttctttctcacttctatgttgagtgatgttgaactctgggtttatgcaacaatatgaaaatatcttttgttctatttcagcagccaattactattttctttcttaaacttagaaatagacaaattaaattgattctctagatatcttagtttagtaaaactgtaatggaaaactacataatatattataatattatgtatatattatatttaatgtttctcttagtcatttttgatttcgacttcagaaatcatggaggataatttctcaattgccatattaattttacattctaatatgtcatttgagacatagatggtatactttttctgatggaataaaatatgaaaatttaaaatgttgtttttgatctagtgtatctttatttgaatgtgactgcacatgatgtgaattgtctgttgttgttgctttaacgattcagtgaatatcatttatgggtggatgtcatgtatcatttttatttgaaaaatacattggagaactcatatttttcttgatcttatttattaacttttccgtaatttgatagattcaccgactcatattttctttatctttagttgaaatcaaaagtatttttcacaccaaatattaaatttataatgttagattaataagataaatatgtatgatttggaaataaatgtacattgggaatttataaacttaatcttgacaattcaagtaattcagtaaatacaatattttttgtgtaattttttgtaagtttctgagatgatactggtc

SEQ ID NO: 232029 - DNA, 1375 bp, Cannabis indica
tccctccgctctctcttccctctttccctcgctttctctcactgaaacaaatgctcccctctcatttttttcatcccgagctctcctccactatacacgaaggaacactacattcccttctcttaacttattctcttcacttctcttcactacactataagttatattacattatttcactcaattttggacagagcatcatacacgaattcaatgggtaataatttttctttgtttaatcttgtggtggttgttatatttagtttaaaatgttgttttgatgcttgatctgttgttgaattttattgttttgtgtgttaaaatagttgttgtctatgaatattgtattttttttctgcattttttctcgtctagttcgatagggcttgatgatagttcgatatagtgctgggttccaaggatagggatgatggctcgattgacccaatagtcgggctgatggtagtctgatatagtgttggattctaaggtagagacgatggcctgatatggcccgataggcgattgtttttcgatgtcatatggatccggttatctagtttgattgtttcgatgttgtatccgatggtagcctgattatcagctagggctttaggtcatgggtgatgtgctcgatggggctcgatgcttgacaaatttaagtcatttaaggattttgtatcactcttctactagatttttgttttaaatttttagtagtattttttaatgtttgtgacaggttcaactgtttttgcgttcgttatgtataatggtatttgggaacttcagggtcaagattgggtttatgatcgagcagaaatttgacatttgagattgatatgaacgtaagctactcatgtttgattgatcttttatacgaagaactcactattgacaaagtacaatattacttgaaattagaagtgaattacaagtacatgaacgacttaatgtatcgccctaaaattggaaatgataagcgtgtaaggctatttttgtctatgcttgtgaagaagccagatgaatctactcccttgtttgtgaatttggtaaagagaaatgtttgtatcgatcgtaatttcacaccaagtacataaaaaagaatgccccgtagagaaaattgtcaaacacccggtactagtagtagttgtccagacgaaactagtaatgatagaggaaccactgaagatagaggtcctagtgatgctagaagaaccagtgaagctagagggaccattgacggtataggtcctagtgatgctagagggaccaatgaaactggatttaacaatttattttcttcttcaacaagttacggtaaattcaaggagaaaatatatacaagagaagacatcgaggatcatagtcatta

SEQ ID NO: 232030 - DNA, 2464 bp, Cannabis indica
atggtttcatctaatggttatttctattatgtccatttcactgatgcctactcaagattcacttgggtttatttactaaaaacaaatctgatgcaattcagacatttatcaattttaaaacccaagtggaaaaggaattaggcttacccattaagaaccttcaatccgattggggaggtgagtttcaagcattcacctcataccttgttgagcatggtattcaccatagactttcttgtccaaccacacatgaacaaaatggtgtggcggagagaaaacataggcatctaatagaaactgcattgactttgcttgcacatgcctctctcccattgaaattttgggatgaagctgtgcgagcttcagccttcctaattaatagactgccttcctctgtgcttaagggagacactcctcttcacaaacttcacaatcttgaacctgactatagcatgttaagagtgtttggatgctcttgcttcccaaaaaccagaccttataataaaaataagctcaattttcgatctgaggagtgcaccttccttggctacagcttgaagcacaaggggtacaaatgaacataaattcccttttgctgtccaatatcacaccagaaactctccacctccttattctccactcaacacaccatcaacctctgttcctgtcattcctcaaactcaatcccttcccagtacagccaatgacatccataaccactcacctatgcctcccccatcacctatatcccacacaacatctatatcacagcaacccgagtctgcatcatcacctgtgaactctgctgcaacatctcaagagccacctgtcaacaagcatcctatggtaactagagctaaagctggagtatacaaacctaaagtgtatataagctctaaaacacccttaactgtccaagaagctttaaaagatcccaagtggaatggagccatgaacattgagatagtggcactcaaaagaaatggaacctacaccattgttccattaccaccaggaagaaaagcaatagggtgcaaatgggtctataaaattaaagaaaatgcagatgggagtgtgtctaaactcaaagcaagactagtagccaaaggctttcaccaagaatatggctttgactactctgaaacattcagccctgttgttaaatcacccactatccgaatcattatcaccattgctctttacaaccattgggacatcaaacaacttgatgtgaacaatgcctttttgaatggtgatctcattgaagaagtttacatgcaacagccgcctggttttgaagaacaaggtccaaacatggtgtgcaaattgcacaaagccatctatggcttaaaacaggcccctcgcgcctggtttgacaaactaaggacttgtctattacactacggattccacagttcaaaggcagatgcctctctctttattcgatttcagaacaaccatacaacctatgttcttgtttatgtagacgacatcttaattactggaagtaattcaacagaaatctctacactgattgctcaactgaactccaaatttgcactcaaggatctcggggatatcaaatacttcctaggaatccaagtgactgctacagcaaatggccttcacctttcacagacaaagtatataacagatatactctgcaaggccaaacttgaatgtgccaacagtcttccaactcccatgacaggtggggaaaaactgtcatgcattggcagtgatcctgtcaagaatccccagcagtacagaagcttggtaggtgccctccaatatgcaaccttgaccagacccgagattgcctttgctgtaaacaaagtatgtcaatttatgcactcacctcttgaatctcactggaaaacagtaaaaagaattctgagatatttaaaaggcacactcgactatgggcttgacatgtctcgatcaacatccttagacctggttggtttttgtgatgctgattgggcatccgacatcgatgacaggcgatctaccactggcttttgtgtttaccttggctccaatctcatctgttggtcttccaagaagcaaaacactgtgtctcgatccagcactgaagctgaatacagaagccttgccagtctcacagcagaaatcacttggatacaaagcttgctcagtgaactaaaggtaccaattcccaggcctccaaccatttggtgcgacaaccttagcacagttctcatgtctgccaatcctatcctccacgcaagaataaacacatagaactcgacctgtactttgtgagggagaagatccttgccaaagctctgactgtcaagcacacccctgcatacgatcaaaccgctgacatactcaccaaagccctgtccaatgctcgatttcttcttctcagggacaaacttaggattgtatctctatccaatctaagtttgaggggggatgttaagagtatagaataaat

SEQ ID NO: 232031 - DNA, 1134 bp, Cannabis indica
cgaacccacatcgcacaaccccccacacaacccactccgatcgagacccaaacccaccattccgaccctcatcaccgcgtcgcaaaggagacccgaacggtgcccaaaaatgtctaaggttcagatatgcgatttggggaaattgcagtttagagaagacgatagcctgatggggtccgatgcatgtgaaaaaaaattctatttttgggtccgacgggtctgatgggacctcgattgggggttccgatgcatgtgctggaaaaacttttgggttcgacgggttcgatggggaccccgattggggtccgatgcatgtgttgggtaaaaaactttttgggttcgacgggtccgatggggaccccaattagggtccgatgggtatgaagaaagagagaataagaaaggggataggggataatgtaaaagggggtattttagggatatagtaaaatgtgtcatatcccacaaatattacatggtatgtgtttaggagaaaaatattaggtgtttgtaagtataaaaagtcaaatttctcattattaaacaccatagttattcaaataatgagctcaaagactttggtggactgaatttggaagctttgaaatcggaagctaagtttggaaattgagaacctgaaacacacgtgtgtatataatattttatatataaattcaaatgataattttttaaataaaagataatatttgatatagtattacatttttgaggaattctattttttttatgatatagtattacatttaaactaacattatttaatgatccaataataacagttttaactaacattttatcaagtgggactccactgtctcttaacgcaaatatttaaaaatatctcatttactaattttaagattaaataaatatcagaaattttatttttaaagtaaaaaataatagtctaacaagataaaaattcactagaaatatcatttttactgaacactccatctgaacaataaaataaaaatctctattaaagttgtgagttacactaaaaaacttaaacaaaattaaactatatatatactctgtttttatgatctataacagcaggtgttgggttttatgccctaaataaaactctttacaatctgattagttatc

SEQ ID NO: 232032 - DNA, 1645 bp, Cannabis indica
ctcagaaagatttctccattcaagtgaatagtagtgatctggaaagagtgagactcagtagattttgtagaaggaacagtagaattggtttggatggggttgtttttggttgtacctgactcagaatctggcatggtgcaaataggacagaggtgattagggttaggaatgcgattagggtagagtacgaatttttttgtcttctttttctggcactgataccaagtcgacagatttagggaaaaaaatgtttttttctgtattattttatttctgatataaagcagtatatataagatgtacaataatcctataaagaaaaacatatcaaataataaagatacaatgaattcctaaactaattccctaaaatatggtacaataaaaacagaattattatatacagctttactgtataataataataattaagaatgttgattttctaacagacgcgcagtgaagggtcactaaattattttagagtcactcaataagggtcactgaaactagtttttgtagaagtaaagatatcttgattgtatgcttgtatgtagatgacttaatcttaagtggaagcaactcaagtatttttgaggagctaaagaaagatatagcaaaagagttcgagatgacagatattgggctcatgtcttattacctcgacattgaggtgaagcaagaaagccaaggcattttcatcactcaagaaggctatgctaaagaagtaattaagaagttcaagatagatgattctaatccagttagcacaccattagaatgtagaacaaaatagcccataattggtcgtacctttgatgtatcgaagtattgtaagaagaaaagtatttacatcaaacaagaaggctatgctaaggaagtacttaagaagttcaaaatggatgattctaatctagttagcacagcattagaatgtggaataaaaatttcaaagcatgacaaaggaggaaaagtggatccaactattttcaaaagccatgttggaagtttgcgctacctaacttgtaaaaagttagatattctctatgttgttggaaatcgttagcctatttatggaagctctaaaaacaactcatttaaaatctttaaagagaatactttagtacatcaaaggtacgaacaattatgggctattttattcatcctgtaaccattatgagatagttggatatagtgatagatattggagtcgagacttggatgatagaaagagcaccactggatttgtgttcttcatcgaaaacactacatttacttggatgtcaaaaagtgaccaatcgttatgctattgacttgtgaagccgaatatgttgttaaaactctatgtgtttgtcatgctattaggctaagaaagttgctgaagaatttgaatgtgccacaagaggagccaactaagattcatgttgatagcaaatcagcaattgtactaggaaaaaatctagtctttcatgaaagaagcaaacacatcgacacctgctatcattacataagagaatgcattggatcaaaagaagtaactctggaatatgttaaatctcaagatcaagcaacaaacatttttacaaagccactcaagagaaaaacattcataaaactacaaggtattattggagtcacaaattaa

SEQ ID NO: 232033 - DNA, 1616 bp, Cannabis indica
gtatttcccatacaaccggctctctttctcgaatttttattcttagcaactcctatgttcgaagaaaaatgttgtctaattaaaccacgaattacaaatgtctggaaaagttctattgctatctcgcgcggcaatccacatcgatgtaatgaaagtgaatgacctacgacaatgacagaacgtcccgtgtgtgataaagtccccaaatatctatgtgtattaaatcaaaacagtgtttagagatgttgtgattagaaacaaaaggtagctttctttgtttagcaaaatggccaatggagctgaaaattttgacaaggagagtattggaactgtaaacttttattaatagaataattttttacacatgaggcatgaccaagcctatagtgccacaaagtttcattgttgatttctgaattaaaaacagatcaagctgaagaaacaggttggtcatgaaggtagtaaagattgtcaatcctttcacccatcctaatcactcgattcttggtaatgtcctgaacaacacatttgtttgacaagaaaagaaatgagtaattagatgagtcagatagagcacaaattgagaggagattgaactgaaaattaggaacatagagcacattatgcagcaggatattatgcaatttaatagttccaacaaacaagactttgacactaacaccatttggcagtccaacagaattaattctagaatttttctgaatagaaataaagaatgagggattagaacaaacgaggtgtgtagcacctatgtctataatccaactacttttaggtatagaattaacattaccagtaatgcttgaaactgttggttgctgatggttatggtcagtttggcactgatcagtttgtgtgggaggattacttggttgggatgatgaagcctgagcttgagattgggattggaacctctgtgttaacatggccatcaacctttgacattgagaagccaaatcatgatcatcagaaccaatttctgcccaatcacttcctataaaatagtttgctgaagatccatttggctgatttccaagcttgttaggaatttcttttgaaaaccttccatatagtctatgacatggtggatagccatgaattctataacacttagcaacagtgtgaccaggtacaccacagtgtgtacaaacaggtctgttgttgttgttgttcctatttccaaatctatttccagaaagctgtccagcaaattgtcctgcattctcatttgagttgccaggattttcagtctgaggtatgattattcctctttacttctcttcttggatcatagctgcataagctttattgatatttggaagaagatcttgaagtaagatctgtgatcgaacatttatataggaatcattcaaactaattaaaaattcaaacaccttatcttcattgagatactcttgtatagttttcatagcaccacaattgcagatcagttgtggtctatattcctgcaacaaatcccaaatacttttaagtctggtgtagtatgaagtaacatcattcataccttgagtcatagtctgcatcgatcgtttaacttcaaaaattcttggtgcatttttctgatggaaacgttc

SEQ ID NO: 232034 - DNA, 1185 bp, Cannabis indica
tgcccgtctgagggtggctgctactcaccggacatttaccaacatagaaatcaagaatgctggcttaaattcgtaagaaccgagttattcttttattgtttttattttccatttatttgcagaatcatgcaaaaccgaagtttagaaagtccctcgcctctactcattcagtccactctaacatcaacattgcttctctttcctaaaacaatatcaaattacaggcagagaagccaaaagtaaatttcaaggacaagtattcggagtcatacagaaactcccatccaactgcaccactcattgttccatgggtctccggcgtcgttagtgcataaattgtgttcaaccaacaaatggggaacacacatattattggaacaccattattacacactttgaacaaagtgagttgaattctgaactggctgaagggagaaagaagtaggactatgctgctgctattcaatcccatccctccatccttttttgaggtttttatttttacaaagttatataattttttgtaatacgaacgattatgggaatagcaagtttcaacattctctttggtaatcaaggcgagcttatcagattagattgtttgagaagtgttatgtggattgattgctgcttatcaaactagatattacgaaggaattgatttgatctttgtacgatgcccttattcctatatatgatggattattagaagaaaacgatgtacaagattgtcaagtaaacatatttgctgaaaatgtgaatattttctattaaatttttatgtcttttagtatttaactctaaaatttgtttcaacttttttttttctcttaatcttttatacatatgtactttttggaaaattattaagttagagcattatttttcgtattgtcactatatagaggaattgtaaactatttagccgagattttatcagcaggttttgcagctgcaatttatcacatttgaatacaattgtatgtatgaagattatacttaaagtgtggctcatatagttgaaaagattaaaagagatggttgtattcagaggaaaatgaaagatagagaagagatttatgtttagaatctacttgatgtaattgcttgattttgggccagactcgacttgttttgtattggctttggtttggaataaaagtttttttttaacatgttttttat

SEQ ID NO: 232035 - DNA, 715 bp, Cannabis indica
agaaaaagactcttatattaatatgagagaattacataacatggagatgaaaatgtctccaaccatgaacaattagtatttaccgtaagagcgaacttagccaaagtgtgtccagtcgactgtagccaccgctcggtcgagccttgcccgcttcagtgtgcagctcctttgagtattggttgacttttggaaccaagtgaatttccctccttgacatcccaaatcaatcacaccagttccagccaccatacgcataaggtcgaaagagtacctagctgagttgttttggtgagtgtaattgatgcactcatgatcctcaagagtaccattaagatcgcctaaaagcaaaatgggttgagacgccttgaggatataatcccccactccattccagaatacttctttaaaatgcagagttggtgggccataaacacccataaggagccaagttttccctggcagattagactcaatagcaccaacaataagatttttatcatggtctaagatgttacacttaacttcaactttccaacacaccccaaatcctccaaaaaagccaatcggagggatataagtgaattcagtaaaatgaagcttgttagcgattaaagcaaacttatccaagtttaacctggttttcgacacaatgagaacctcgggatttgattggcgaatctgttggaatttattttaccacgatcttagatctact

SEQ ID NO: 232036 - DNA, 861 bp, Cannabis indica
cacacgtttaaacgcaagaagggaaaggaagtctttttcgcgatcaagattgatctggttaaagcttatgataagctcagttggagttttatagatcacgtgcttagtagctttaaagctccagaccttttccgtaagtgggtctcccagtgtattaccactacatccttctcaatgggagtaaggttagcagtctcactcctgagtgtggtttacgacaaggagatcccctgtccccgtacctctttatttgggacgcggacattctctctcggattctcgagaaggccatggacattggcaccattaaatgcatcaaacttagtagagatggccctagtttatcccacttctttgctgatgatctcattctagtgggtagagcaactattgatgaggccaaaggtttttggagatgccttgagaagttttgcagttggtcgggacaatgtgttaacaagcttaaaacctctatctttttcagcaacaataccagtgagggtatgaaaagggggatcatgcaggagctggggcttaacttggtgactacgaacattaattacttgggactccctctttttcgatctaagcgcaaggatgcggatttcaattttatcctggaaaatcttgtgtcaaagttgcatggttgaaattaaaattattgtctaaagcgggtcgtgccacgcttatcaaatctgtgggcctggccctccctgtgtacactatgcaaactaccaagctatccaagaatcttgcttcgagaattgacggaatgattagagacttttggtggggatgtgaacaaggaaatcggggattgtatctgaatgcctgggatcgtatttgtctacccaaatctag

SEQ ID NO: 232037 - DNA, 640 bp, Cannabis indica
aaaaaatctaattttattattgttaacaaagttttcgttaactaaattaatagcctttttgaaataaatatactactgaaacaaacatataattaataaaaactagatattttacgtgattttgtagttaaaatctacattcttcacgagtccttattattagggatctttttttagtatagaatacaatatcagtatttaaataaggatattttttctctcaaatttgtcgtccctttttccatagattctgcccctatttctaggcacataagttcgtagttattctctttaggattggttcaaatataactgttcatgaaacgtgtataatccccacgtttcatttaatcacacatgggataatatctaataactacccaaccgctctttattttcattctctagacggttattgttgacttggaaggttgtatctcgtcagatgtgagttttccttcttgtccatcttgtcaggaaaaaatgctaagtgttgaagaataattcatctcacaatattcctttattggtattaataatgtgaggtgatctccatgctatgtgtatcgcgaggcgactgagtgttactacatttactctgctcgtgcaggagggtatcctcttctaactgagtttatcc

SEQ ID NO: 232038 - DNA, 1145 bp, Cannabis indica
ctcgggatgtcagtgtaatgacctgggaggaatttaagaatcatttgagaaaagtttcaatattgctgtgagaacttcacacatggaggacattgtgaagcttactcaagggaaaatgtcagtggccgaataaccatggagtttgatcggctatctaagtgtgctggtgatctggtgcccacagatttcaccaggaaacagaaatatgtgagaggcctaaatgccacaatcagtcgggacttgaagattaccacttcagatgacactttgtacaagaaagttgtagagctagccttgattgctgaagaggctgagcaacatgtagaaaaagagcagactgcaaaggatgtcgtcacagtatcgaaccctcctgctagtggtaatgtcagtaagggggccgacagtggcaaccctgatcacaaacagaaggctgaggcttccggagcatcgggggtaacagaaagtttcggggaaacagaggtggttgccagggccgtaggtcctcattccgatcatatcccgagtgcctaaaatgcaagaaacaccatccgggtgagtgtcgggccaaaacatgtttccagtgtggcatggtggaccactttatcagagattgtcctcacgctaagaaggaggagcctaagaagaatactacccagaacttgggtcgactttttaccatgactcaggttcacgcggatgctagtccgtcagttgtgacaggtcagttatctattaatggttgttcttatattgtgttgtttgattcgggagctactgactcttatgtgtcgagcagagttattgaaagtttccttaagccatgtgatatttatgcttcggggtttggaaccctgttaccctcgggagaccttattgtatccactaggtggattcggtctttgtccttttggattgacggttgtgagttgaccgccaatctaattgaattgcaattgtctaattttgacataatcctgggaatggattttctatctaagtatggagctacgattgattgtaagcagaagatggtagtgtttgagcccgatagtgctaatccagcgatattcgtgggtcaggttcagggggcacgcataccaagaataacattgttgaaagctaaggacttgatgagtagaggttgt

SEQ ID NO: 232039 - DNA, 1337 bp, Cannabis indica
ccactgtcttgtttgttgattctacttgtccattcaattgaggatatcttggtgttgagaatgagagctgtattccccatttaatacaaaagttttgaaagtctaggcttatgaattgtgagccgttgtcaatcactatttcttttggcataccgaatctgcatatgacattcttccaaataaagcttttgacttatcgatccctgacttgtgcgtaggcttctgcttctacctatttggtgaagtagtcagttaccaccaacatgaaaactctttgtcccggagctgtaggcatcttcccgacgatgtccattccccatttcatgaaaggccaaggagttaatgttgaatggagcttttcaggtggcatgtgtgatacttaagcgaacctctggcatttgtcgcatcttttgacgaaatcatacgaatctgtcctcattgtcggccagtagtatccgattgtaagagccttgttgcataggcttcttggtcccgagtgatttccacattcacctttgtgtagtcttgtcagtatgtacttcatttcggatggacttagacatctaaggaggggccccgagaatgatctcttgtataatcgatcattgtacaaggtgaacctggaggctttagtcctcaacttccttgattcatacttgttggtaggtaaggtgtcatggagcaggtattctttgattggtgtcatccaagactgatttttgaccacgttcaattattgttctggttgcttccatacggctggccattgcatatatactacatggattgttaccccattcttggtctgaattgtcgagcccaagtttgtgagtgcatctacatggttattttctaatctaggaacttggataattgaaaatttggtaaagcattttaccttttctttgagtatctctaagtacgccatcatcttggaatcttttgcttggtatgatccattgaacttgttgactaccagtgtggagtctgagttgacttcaatattctttatgttgagctccttggctaggtccagtccggctatcaaagcctcgtactctgcttcgttatttttagcttcgaagtcacatttgatggatcgttgaagaatgtctctagttggggttgtgagtactatttcgagtccacatcctttgctattactcgatctgtcaactgacaacttccattttgaattcggttgttattctagacaaagcaattccttctatgcttgtacctgtatatcactagagaagtctgcaataaagttagccaatgcctgttattttgattgcggtccttggttggaatgtgatgtcgtattcactgagttc

SEQ ID NO: 232040 - DNA, 718 bp, Cannabis indica
gtgggggggcgatacttttttttataagtgaaggggcgtctttttttttttctacattgtataacatgttaaaaattaatgcaaatttatattttattataaatgtagtgtaaagtaaaaaataaagtaagaataaaaatattgggttcaataattaagaactcgtgacctctattatgtgcatgatatagatttacctttataccataacttgttttatgttcatagatatcactttaatttaattaaaaaataatatgttgtaacttgctaaaatacatatatatatatttcttaatttttttagggggcgattgtccacctcgcctatatgtgggttcgcctctgccctgagtacataattaagagaagcattagaaattttagacaaatagaacacaacatcttgtacaacatctgataaagatgatttatttttccatttatgcctaaatttattcacaagaatttgagagtcagattgaacaaacacaattagaaaatctactagatcacaccaaagaagagcttgtcgtaaagccacaacttctacaagaacaggggtcatcttactatcaactggagaagataaaccacaaattacctgccatttacaattcttaaccactgccccaatcccaaccttatttctctgatagctagtttaatattcagtttaaacaatcacggtggtggtagaatttccaattgatttcga

SEQ ID NO: 232041 - DNA, 1727 bp, Cannabis indica
ataatgatatagattaaatattgtataaggtgattatgcatttatatatatatgttgatatattgtgaatggatgaaatttttatgcatgaatgtgaatcgttaattatatggtaaatttgggtgaggaattttttatagttttactagaaaaattgtataccatatttgtggtatgggttttgatataatttttattttaaattatttgtaaattttggttaaaaattgtaacataaaaaatccacaaaaacatccattgatgagtgagctcaggtttaaggagtaaattccaacctcattgagataacgagttttggacctcgaatgacaaaccacaaaccccagagggttgcggttatgaggctcagaagggtcaaagcatgtgattctcatgtgtgcatgcaagtcgtgcaaccccatgcatgtgaacaaggggagttgaacccatgtgtgtttgggttgcatgcaactggccattgcagggactcgacgatcccgtggccggagaggaggaagtcgactggccattatgggcccaaggtcgatgtcgacgaccaaaaaggaggaccatcgtggtcattggccgtcgagctccttggaggggcaatcgggtctcacgcccatttcaccacaaacaaagcttgctttgtttcacctcctcctgcactgccagcttgcaccggcgtcctccctagaccaccagccaccatgcagccaccaccatccacgaccaaagcttggctggccccacctttgtatatatatgtatttgtgtatatatgtataaatattatattttatttattttaataattagattattaattagaaaaataaaataaaagataaaaatatgagatattttgatatgtgcattattttttttattttaatatgttaaaataaattattttttcaaaacttaattttattaattttggagtatatatatttatcattttttaaataaatatatatcaagatattttctttttaaattatattttattataaaaggatataaatatatataccatattaaatataataatttttgaaaagtggttaatgatacttttagatagtggaggtgagtacaagccttttacaaagtttttggcagatcaagggattgtcatccttgtctgcatactcatcagcagaatggacatgctaaaaggaagcatcgacatatcactaaaacgagcctctctctacatgcacaagttagtttagatcaaacctactggtggcatgctttctcttatgctactttcattataaataagttacctacaccagtcttgtctaacattaatccttttcagtatatttttggacagaaaccagattatgctatactgaagccatttgggtgtacttgtttcccatatttaaggccttataactcacataagatggatatgagatctcgacagtgtttattcctggggtattcttcataccataaagtctatctagtgaaaccaactaaggaagaatatacattgctcgcaatgtggtgttcaatgagtctttatttcctggacctcacaatccaagctcctttcatgatcaggtactttgtccctctaatgcctttaattttcctattgccagtttcaacacagctagtgctaactctggtttttttctataatacctattgttgctacccctggagtgactgagaacatcttgctttttagacctagtcctcctcaa

SEQ ID NO: 232042 - DNA, 828 bp, Cannabis indica
aattccttcgaagactttgcgtgtattacattgctgagatattgaggcccaagcataacaatcaaagtgagtcctgacacgaggatgctgatagacctttcttgcaagagtagttttgcccaaaccacccatcccacatacagagatcaccttatgcttatgagggttctctttttcagtcaaaagggcaaccaaatctttaatatctttgtcgaatccaacaacaacattgtcttcaacaaaagaataagcttgccttaactgtctttcttgttgaacatagctgcttgaagaagcttcagttgcattgtctattgatctgtgtactccaagtgcctctaactgtgaagtccaagtatcaatgttggatgagatcctctcaatctctgatccaactttgtggacatcaattccttttctaaagatgcaaataaacctcttttgtaagccttcatttctcttcaaagtcaccttgagaacataagtttcaataacatcctccaagtcaagagatttttctctgatttggacaaccaaaaggcgaactctctcatcaccatttctaacccaaacatcagcatcttttaagaaagcactcatacattgaagcttgatctgtgcattcccaacttgggcttcaactccacccaagaattgagcttcagaaatcaccaagtctccaagcctttcaatcacaaacgaaacaactgcatctgccatttgatgatcttgttcactctctagtatttgttttctttctttttgtttttgtgttttctgaattgctctctagtattgttaatcggttcaaacttcaaataatgtctt

SEQ ID NO: 232043 - DNA, 986 bp, Cannabis indica
agtgattattttcatcaggctcagtaggattaatccttgtcttttcagtttaagttttctgactaaggttttgttttttacagctctctcaaaaagacctgtccctacccccaagatggtcaatcgacataggctcctgctgactcttccccacgaccttaggttgtgcgagttccttctaaatgaggccaatctgagatctgtggacctccttactgacaaggagtatacttgtgattataagtttcccaagtattcttcttggcagcaggttcccgttccagtggaggataaggtctaggatcgtgtggctcatgtacaataccttcaaaacacagcccctcgggaagccggtgaaggagcatcctgaggtaatcaatgtggttggtcacccacaatacttagggctgaacgtaacacattagttacttttcgagatagctgccttaatttttatatttggaattcccttctcgtagactgaattgcacatagattttagccgccttaatttttatatttagaattcccttctcgtagaccgaattgcccataggtttgacaactggtaccctagattccacgttcagattaactgtaatgagtcgtattatggtatagctgaacaatatggcaccatgacagatagggccagtcatatagacacaagttgggatttagaaccaatcgagccctttaatatgttcaagattacaggctgtagggattttaggggatacactacggtccgtctaccccctcttatagcgatagctcttcttctagtggttttggtaaattttttaggtggaaaattacacttcatgcttccctttcatttgtctttaaataatgttaacactttattttgcctcgcagacatgcattttgaagatgttatggatcggaaagggaagaaaaggggaacctgttggaaatattttaccagaatctagatttactaacaagtatgtttcattaacatc

SEQ ID NO: 232044 - DNA, 2982 bp, Cannabis indica
aacggaatgtcgattttcaggcaatgcaacataaaattgcatctctatggcaaccgggacaaggcatgtatgtgaaggaattgaatcccaaccatttcttatttcaattttaccatgagattgacattgaaagggttatagatggcagctcgtggacatttgatcacgctccgttaatttttgaacgactgaaacgaggagagaacccacggttggttccgctgaatagactcaatttcttggttcagctacataatttggagtcgggtttcatgacggagtctacagttagaaatgtggcaaatcatgtgggtacttttgttaaatcggatcccaataattttgttggtgtttggagggattttttgagggttcgggtgaagatgaatattgataaacccctaaagaaaaaaatgaaacttgaaaagaagagtggtcaatcttgttctctggtttttaagtatgaggacctccctaccttctgcttcatttgtggtgttcttggccactctgaacgtttctgtgagaagctctttgatacgccaccagatttgatagtcaaggaatacgacctgtccttgaaggcagccccaagacgacgacagcacaccatgggagcacaatggctaagatcaggggcggttatgaaacaacctgatcctggaactccggccaatactcaggcaacattgaatggtgcaatcaatggtgtcaatgtgcagatgcatcatatctccactgatttaggaagattagtacccatacgtaataatgagccgttaatggagatggagacaatgaattcagatgggattggggaagtgtcaaatggaaagtcaaaggcttacgtggagaaggatttgattggagtgaatagtgggattgattctttattggtattggatactaaaagaagaaggactttggatgggctggataattatgttgatagtgggtcggaccttaataaattggatgaacctagtttagacaatttacaaaaacaacataatggtactaatcaaaagagtgatggtgatgtggctatggacggtcaaggggaggatagctcaaaaaacttgtttgggacgggttctagtttccagacccgccaagcattatgaatgtcttgagttggaattgtcggggcttgggaaccaacggacttttcaattccttaaggagcttgttactcaaaagaaacctaattttattttcttatgtgaaaccaagtgtaataagaaaagaactgaatgggtgggtcaacaattgggctttgaaggttctttttgtgttgaggcccaaggagtgggaggaggcttagtgttgtattggaaagaaaaagaagagggtgttttattgggcttttctaataatcacattgatattaggattgacaaagtgggctacccaagctggagactcactggtttctatggtgagccgaatagaaatcgcagagaacagacttggaatctccttcgtaccatagccgcttcttcatctcttccatggtgtgtgattggggatatcaacaacattctcagtcaagaagataaagaagggtggacaaccttaccctggatggcttctggaaggctttcaaaaatctctcgtcgattgtcatttgtttgatttagacctcacggggtaccctttcacgtgggagaagagcagaggtacaacactttgggttgaaattcgcctggacagagtaatggtcaccgaagcttggtctctcctttttcaaggtgcaaaaattttttaatcttgaaacctctacttctgatcactctcctttatttcttgagccaattttcgttgaacaaacttcaaagaaccaccgttttcgtttcgaaaatgcttggttgaaagaacccatgtgttttcaaattgtggaggattgttggcaacgggttggtgtggggagaattttaaataaattgaatgtgtgtgctgatgcgttatctcaatggggtaaagagataacagggaatttcaaaagaagaataagagagtgtaatgccgaaatgaagcttttgaagaagaaaagagatgacatctctgtggctcggtatagtgaggtccgaaaatagctttttgcaattatcgatcaacgtgagattttttggaagcaacgagccaaacaattctggttgaaggagggcgaccaaaatagcaaatatttccacaaggctgcaagtaataggcgatggagtaaccttatttcgaagcttaaaaatgaccaaggggcgtttgtggattgggagaatgggttagctgatgttgtggtacagtattttatgaccttattctcagcttctaatattgattatagggaagtaattgactgtattgatcatgttgttcctgagattgctaacttggaatttacaagaccagtttcggaggaggaagtgaagacggcggtgtttcaaatgcatcctgacaagagtccgggaccagatggtatgaccccggctttctatcaacgatgctagaatattgtgaaaaagatgttgtggatgttgttcagagattctttgctacgggggcctttgatgaagcttgtagtgatgcaaatgtagtcctcatccccaagaagaagggtccagagacaatgaaagatttgaggcctatagctctttgtaatgttctttacaagattgtcactaaggtaatgaccaaccgtatgaaacctttcatggactctattgttgctgattctcaaagcgcttttatttcgggtcggctcatttctgataacattatggtttcttttgaagtactccactatcttaaacgaaagcgccaagggaagactgggtgtatggctttgaaactggatatgagcaaggcatatgaccgtattgagtggaatttcttagaagcagttcttacgaagttgggttttgtggacacttgggtacaccttatcatgcaatgtgtgtcaatggcaaactacaaggttatccatggttg

SEQ ID NO: 232045 - DNA, 1865 bp, Cannabis indica
ttactgaaccgtgaaccgagctttctctgatgaagattgtacatgtcttggcaagcttcggcagacaaacctggcggctctaataccaaaattgtaacgccttaatgctaaggcacactacagtgctttttcaattacagtgctatctttgctaatcaaagatttttctcagaaacgtgtaaaattaaaactctataataaatattaaactttataatttacaaaactatttacaagtaccgggatcccattttgaaacttttatacaaaatataccaaaatacataagcggttgcacagcgactacaaaataaatttcccagatgtcccgagattgcacaccccaggtcacgctgccacgacatgtacaatcccatccttgccagactcactcctgttcagcttttgcctttcctttacctacacatggaagcagaattgtgagtcaacagactccgtaagaaaagcatataacataccatataataccgacttgtatctaggcgcccatacacctatttacaaggctcaacagatgagtaagaacatttcatactagggtacaaccactatcccacattcactacgtaccttgtacgagtgttggtaggatttatttcgtaccataagtaccactaagtgatataccacagacaccatgtgctttcctgtacttgtgtaaacaatattcactataccaatacactttgtaccataactgtaccagtgttggtagtgcgactaacacataagcatgcatatacacttaacacatatatatacactcagatattcatattacacattatacacagttcttaccttctttcccgattcaagtgtgctggccgacttgaacggaaagtcttgcgctaaatggatgccctaatcacaaaatgaaaccgggtaaatcacatgatcgaaaccctaatctgagaaacctgaacccaccactctaggttctgttatactctctagagatcacactagttcaggaaatagggaaacacccaactacggcactagaatggacgagaattgagaaaatggcttgttcagggatcctgccaaaatcggctagccggttttacaggcttagcaaacccgctagccggtttgcaccaagtttccccaaacaagctccaacttgctcaaaactcatccaaatgcatccatactttccagagtacctaaacaggcataaacaacattttccaaccagtaattcatagaaactctcactgaatcacaatatgccattgaagatcaaagtttagttttttaaatccaaacttgcataaatcgaacattatatactaaaaccagctgcaagaacttggaatcaacctaaaatgaacataagagctgaaccaaaacctaatcaaaccctaacatcccttactcatacaaaccatacttgaaaccaactaaactttgaaaaacacatagctaagtagtgtctagagtttaccttgattaaatcctcctcctaaccttgctaaaaactcaaaatccagcaatcaaactccttgattcccagctggttaagagagagagagagaaaagagaagagagggtgtttctattttttggtgtttcctttgtttttttttttaattatttttctccaaataaaactaaaaatagcagctaggtgtcaccacctaaggcagccaccaaatcacttattggcaaattattaaaatgcctttaacctataacttaagcatttaaaaactaggggtaaaatagtcaaattctacaaccccgctaaacctcggtattttattttctccaaaatatttcccactaagaaaaaggttctaaacttacccatgtgatcaaactagccatccatcgcattt

SEQ ID NO: 232046 - DNA, 1383 bp, Cannabis indica
tagggcataacttgcctctttttacgaaactctttatccccttcattggagatactcgtaagaacacgtgatcccctacttggaactcaacatttctgcgttttggatctgcataactcttttgcctactttgagaggaaagcattctaactttaatcttctcaattgccttattggcccgctgtactgattctggaccaaggtatttcctctcccctgtctaattccaatggatgggagatctacatttctgcaatataatagttcatagggagccattcctatcgtactctgataactgttattatacgaaaattctatcaacggtaggtatttactccaggagacttcaaaatccataacacaggcttgtaacatatcttccagtatctgaatcgtcctttcggactatctatcagtctgaggatggaaggttgtactgaatttcagtttggtacccatagcccgttgtaaactttgccaaaacttcaaagtaaacttcggatctctctctgaaactatggtttttggcacaccatgcaaccttattatttccttgacatacaaatctgcgtattgatccactgaaatggttgttttaactggtaaaaagtgtgcagacttcgtaaactgatccactacagcccaaatagaatcaaacaaacctgtggttctaggtaacccaaccacaaagtccattgtgatatcttcccatttccattcacgtagggttaaaggttgcaacaaccctgccggtctctgatgttcagccttaatctgttgacaagttaggcatctcgatacgaattctaccacattcttcttcattccgctccaccaaaattaaggtttaagatcttgatacatcttggtggttccgggatgcaaggaatatggagtagtatgagcctcttcgagaatttcatttatgagttccatactattaggaacatagactctggtcttaaacaatagcattccactatctgagacattgaagtctttggcttgaccagctgaaacctcttctctgacttttattagctttagatcagttagctgagcaactttaatacgttctagcagatcagattacagtgtcaagttatgaagtttgcctacaacaaacacgatgcttgatctgatcatttcttctgctaactaagaagaaatttgaatcatgctagctacctgcccgggaccctttctgctcagggcatcagccactacattggctttcccaggatggtaaaggatctcacaatcgtaatccttgaccaactctaaccaacgtctctgtctcatattcaaatcttcctaagtaaagaaatatttgagactcttatggtcagtgaaaatttcacacctctctccatagagata

SEQ ID NO: 232047 - DNA, 940 bp, Cannabis indica
agaatgcttttaagagctaaaaagacaacttgcaaaatctcctgtactctcaaaacctctggacgtagaagaactaggaatatatctagctgttacagaacatgctgtaagtgccgtgctgatgagggaagaaaacaatatccaacatccggtctactacatcagcaaaagacttgttgaagcagaaggacgatatctgctaatagagaagctcatttattgcctaatcttagcaataaggaagctaaggccttactttcaagctcatcattttcgggtgtacactgaccaaccattacacgaggtattacaaaaactttacgcctctggacggttactcaaatgggtagtggaattgggccagtacgaaataatttttcaaccctaaacagcaatcgaaggacagactttagcagattttgtagttgagagtacgggcaaagaagaaaacatttcaaaaagcaaccttgagctagtacaaggacctcagccgagcaacaatgaagataaacctacctggaagttacatgtagattggtcggctacagatcaactatccggtgcagggattgcccttgtcacacctggggggcaacatttacacggggcagtcaagtttgggtttagagcatctaacaatgaagcagaatatgaagcccttattgccagcctaaaacttgctcgagaactacatgccgaacacattgagatctacagtgactcacagttgttagtaaatcatgtatctggggagtacgaagcttgggaagaaaaaatgatagcctatctaagcaaaatacatgacctacttgcacaattcaagagctatgtcctcaagcaaattccaagagaagaaaatacaactgctgatgccttaactcgacttacaagcaacaatataactgatgaggctaatctaatcccaattcaatttcttgaa

SEQ ID NO: 232048 - DNA, 1306 bp, Cannabis indica
cagtctaaatccagtgaactgactaatcatgggaattaaactttttaacatataatcatgttatattccactgtgctgacgatactataatcatgcacaaatatatatacatatttatatatgttctagacttaatagaatttatacatttaatataatcataaaataaatcatatgaaccatgcaacataaaaccaatttttgatcttatattaattagtaaatctgattatattgaaatgtattttatttagagcacaaaacccaacagtacgctggtcattgtgtcccttcatcctcacgcaccagagcaacactgtctgcatgcttggtgatagccatataaatgaacaactctttgccatctactagttttgataggatcgaagactttgatagatgatgtttaagagctttaaaggatttctcgcattcatcaatccatttgaacctcttgttatttcttcattagtaggttgaagaagggaatatacttgttagttgacttgcagacaaatagaatcaaattcaatatatttatccaatgataatgtggtagtcttcggggtctggcactacattatatggagggtctcgttcatatgacttagcctaaatagttgaatgagatacaacgtctataagagttctagaacatgttgcacttacttttagtgcatgtgggagattgttaagatttatgccctaaaagcaagtaattaatagataatatataaaatacaattataagataaatgatacattaactataagagtataattattaaacatctaaaaattccttattcctatggagaatgtataatcttgtaaggatgtacaagagaattaaaattatacaaaatgaatcaaacaaattggtagtgtattaaagtattgagagtctttaatatgaaactactaagtacggattattatacacaatacttctagtgtgtgattttaattcggatgtacatatgtggatggacatgtagtaaatgtgttgtgtataattggattatgtatgactagaccgatatgtaataaacgtgttgtttactacgaaagagttattcatatcacaatgatgatcattagtaaatcaacctgaaacctgagtatacatgaactcctatttgtgttcattgaaatctttgattcacttgttaaattttctcaaagaaagattcttacaacttctatttcagaagcttaataacatgagtagctgggaacatgtcatataatagtagaatctaagctttcctaacagatcaaatattacttcccttagagtattaat

SEQ ID NO: 232049 - DNA, 1176 bp, Cannabis indica
gagtgtaggaagttacaattcaaaaatcaacaaaaacactgctaatattgcaagcactagtgatgcatctgacgaaccaatttttattttagttgatgaatttgtaaagttctcgaggtatcaagaatcacttaagtcttcatctttttctgtcattgcgatagctaattcaggtaactctaatgcatgccttcttaccacatcctcaaaatggatcattaattctggtgccacagatcatatgacaggtaattccagtctcttttccacttttcagtctcatagtcccacttttactgttactttagctgatggatcgccatcttttgttcttggatctggcactgtttctcccacacctttgctcactttgtcattagtcttacatttatctaatttgtcctttaatttactctctattagtcaactcactcgtaatctaaattattcaatctcattctttctcgatcattgtttgtttcaggatcttatgacgaagaagattatggtaaaggacatgaatccggcagcttgtatgctctttatccacttctaccaacctttattacttgtccgagtgttacttctacttttgaggctcattatcgtttgggccatccaccctttcttctgcttaagaaactttgtccctagtatcgtatggtatcttcattagattgtgagtcacgtcagttttccaaacatcatcgtgttagttcgagtcttcgagtcaataaatgtgctagtattccttttgagttagttcattctgatgtttgggatccttttcctattttgtctcaacctagattcaggtattttgttacttttatggatgattattctcatgtaacttggttatatttaataaaaaattattctgagttgttttctgtattttgtgctttttgtgttaagattcaaaatcaagttaatgtgtctgttcgtactttgcaaagtgataatgccaaagaatatacatatgctcaattttaatcttacacgacctctaatggcatgcttcatgaaacttcttgtgttgatattgtaccttaaaatagtgtagcagaacgtaaaaacagacatcttcttgaaactacacatgccttgtttcaaatgatagttcataaacctttttgggtcgatgcagtttccacatcatgatttcttattaat

SEQ ID NO: 232050 - DNA, 1652 bp, Cannabis indica
agttgtctacatgaaacaacctcttggatttgaagacaaggagtgtcctcaatatgtgtgtaaattgcataaggcaatctatggacttaagcaagcacctcgtgcttggaatgacatgctacggcaaacattggtttcatggggttttcacagttccaggtcagatacctccctctatgtttatggatcaggatcaaacttagtcatctttcttgtttatgtagatgatatcttggtcactggaccgaatgtcaatctcatcactaagtttgtctcaaagttacatcaatgtttttctctcaaagaccttggacaagttcactatttccttggagttgaaatttatcgtgatgacacgggaatgcacttgagccaaactaaatacataactgacttattgctcaaagtacatatggaaggtgccaagccgtgtgctaatcctgctagtgccaacacaaaactgtccttaaaagaaggagaaccattaccagctgctgccatcactctgtatcgacaaaccattggggcactgcaatatctctctctcaccaggcctgacgttgcgtttattatcaacaaattaagtcagtttttacaagcccccactactctccattgggaagcttgcaagaggttactacgctacttaaagggtactataaaagagggaatctgcataaaaccagctgctgcaccagtcattcatgcttactccgacgctgattgggcgagttgtgttgacgatagacgttcaactggtggatatctggtctttctaggagggaacctgatcagctggtccgtcaaaaagcaacaagttgttgctcgttcaagcaccgtaagtgagtttcgtgctcttgccaatgctgcggcagaagtcaaatggattcaatctctgcttggtgaacttcaggtccctattgctcaatgtcctgttatatgggttgacaatcaaagtgctactgcacttgctgccaaccccgtcttccatgctcgatccaagcacattgaaatcgacttacattttgttcgcgatcagatccttgccaaataactttcagtctgctacgttcctgccatagatcaagcagctgatattcttactaaatccttaaccactgatcgtttttgttacctgaaatccaaactaaagatggtttctactccctttagtttgcggggggatgtaatagacagttagtgtaactgaattaggtggttaagttagttgaaattgtctggttttaactaacagtttccctaggatttagctttctgttattactattctattctttgtataaaaggatctgtatattcattttaatgaattgagctgattttattttcaatactctctgttctctctgttatttttggttttcttgcttgtcttctcctacagattccaaccaccagagaaatgatccatttatgttgttgtttccaatatctaaaagttccaactctttatagttgaccaatgattttggcaatgacccttccaaatgattttcattaacattcaaaactcttagactgtttcccttggcaaaagctggaggaacgattccatgaaacttattcttcctcaaatctagcacttcgagatagcttgatgaatttcctaggcatggaggaatgttcccact

SEQ ID NO: 232051 - DNA, 1575 bp, Cannabis indica
atctctctcagctcactctctcataatctctcaagctcccaatctctcggtatctctcgttggtggacaattgggccatccaatctcaagaatcattcatcccaataataggtagttttcttttttccaaaattttcttaaacattagaaatagtatgtaggtttttttcgttatatatgtgcggtgtttatttgtactagtgttattttgctattttttttatctgaaatgccgagatctagttttctcgcgatcactttgtttttacatgatggtttatcgatagtatgttgatatattgtcgatgataagcaagccaagatgagggaagactattattgatattatgttgatagtttatcgatagtttgtaaaataatgttttggcacgaattgtcaattgtatatcgatagtatgttgataatttttcaaaactattttttttgcattaattgttgatagaatatcgatagtttgttgtttgaatgttgataattttttctaatttttaatttctcaacttcacgcttgtttagacgtgtttgtcaatttgatatcgatagaatgttgattgtttattgacatgcctctcccttaaatattgaaaaagaaaaattaatgacacaagtaaaaacttttaaacataaataaaaagaaaatgatgatcacgataacaaccataaaatttaaaagtttcgagagttagggtgattcatgcaatgcataaacataaaatttaaaagtcttcggagttagggtgatacatgcaatacatgcacaacgaaccatacaccactgattcttctctaaccatggtcattttgcaacgatagcatccttcacggaaccttggaggagaaaagggaacaccatccattcgattgcgttctaacctactctcatttgccaccctttcacattcatattgttcctcacgttccctttttgtctctttcctgagttcgatgatattgttgcttacatttttctctcaattgaatagtttgacattcaacatcgataataacacaaagggtgatgtcatgtccttcgttagcatataagtcatgcagtccgccttcatcagatagcaaaccactcactggcctagcccaataacgatgcattattctacgaacctactcgtcatggcttggtctgttatgcatagtgaaagtacgaggatagtttggaaattgagctcctatgtaagaattaaattcatccccactagaggaaaatggtagtggagaactcaaaccactagacatatataacttagcagagaagaatactctaggggttaaagaagaagaaatatatacaacttaggaaataggagtttactttatagaccaaaaaagttgttgggaaggtgaagtaataaatacctaatattaattagcattaaatgctcaactgaaaatacgttattgtcctacaaaatgcatttgcctttagtatgtcgatagtttatcgatgatttttcatagtttattcttagcatgttgtttgacattatgtcaatattttttttgtatagttggtagatagtttatcgttaattaacaat

SEQ ID NO: 232052 - DNA, 780 bp, Cannabis indica
acttgcactactacaacaacctatatacagatactatctaatatcctaacagaaattaacagaaaaattaaaatctacctgccagctcatctatccaagaccagttcctctgatcctttcccagcagtataaaggactgcatctggactcattttatacagatctgaagccttagagagaaagagagaacctgtaattgctctgagttcaaagataagaactcagagttgagaaaaagagagaaagagtaagaaactgtgagaagagagagattgttcttgagagagaaggaagtagaaaccagaaagaaaataaatagcattaggagatcgagacttaccagttgatctgtagctggaagctccaccaatcgtgtattggatcttgaattctgatagtgcaagggccctgcttgttctgaggcgagctcaaagaggactaccccatcaactaagggggaacctctataaaatactgtgtttgcatcttctctactataactctcatctgcatatcatttcactctcatcattgaacattgcatgcatattttgataaaagaaaaccctagaatctaagcaagaaagacctgatcaatttttcattgttttgcattttggagtaaagctaaatggttaagtgtatgctgtgtgtcaaaaatttgagtgagatacgtggacagtttgtgtccacttgctgaagtgtgaaaggtcaaggttgaccttgtgtttgtgtgtgtgagttgactttgtgtagggataggactgtaaaatcccaaca

SEQ ID NO: 232053 - DNA, 1943 bp, Cannabis indica
tagtaaaattcacaaataagacagtcttatccagaattctaattaattaattaatattaattaattaagtctacaagacaatattatattaactagtgttgggaccatgcgcctgtataatcaagctcccaataagtagttctagaatttactgagtaaattctctatcttattaactcctcctatctctactatagatttgaaattatactcctgattacatagaacactctattcaccaagaatagatatgctataagctgtccattatttcaatctaaataatcaaagatcctatatatatgacttacattgagtggggacaaatttactattccacccttcaatgtattttatccttaaaatacttagcttcttatgaatgatatttctaaaaaactaatataattactgaaataagagctcttccatctatgtctgttagccaagctctaaggaaattattatttcacttctaaatagttatagaaggcatagattcgatatctatgattagcgctcctactcaattgcagtaccatgttcccaagatgtaagtattgggccgatccaagtggtcagctttaatgaacaagtcaaagaacatatataatacaattaagccagaacctaaccatctcaaaattaagatcttttgatctaagatcaattaagcgatattgaattagaaaagatataacagtaagtttatgatatattttccactatcaatatcggtccagtctgatgtatagccaatacatttgatactagtatactttgctaatgcattggaaaggatattcaacatatcattgtgtaagtaaactttatcgctaattatcacgtcagtgtaaatctagtgcactgataaattatgggactaagtactttgaagcatataatcattattactttccactatgatgacatcactgtaattgtgagtaactatatgttctaaatttaataaaaattgtatattaaaaccataatcatgaaaattacttataaatttaaatgacttttaatttcctttcgatagtaaattagattatattaaaataggtttatttagggcatacaataccaacatggatgtgcttagcaaagtctatttctcagggtttttccagtatgagactaatttaggtcgacaagatattgcccttatgctagagagaatgtcccttatactaagataaatggtttagatctttctagcatattatctggtagcttatttttgtggttgtatttattgtgatttagcatgttatgtgttttgtttactttttgcagagcaaacttccactttccaaatgggtctcctcaatagttttttggacgccatcagttctaggcccaatgatgtccataaagtggccaaggaaggcaagaataaaggaaagaaggggcaagtctctaggagtggatctcagaagctagcacctcaggcctcaagccaggagttttccctaaaggctccagctttgtaagacttaatttcttttgtcattgacctgacagaaccaattcttgatgttgtgccattatgacaagtgcccatggggcatgttaagaaggatagttttgattgtgatggactagtcttggttcctaagaagcggtctaaaactgtagatggaggggccaataaaaaggcgagggtggagagtaaggaaaaagtgcaataatttgtaaagaccgcttagtttaatttggaaattagcagttaatcatgtataattatgaaaattatttatagctatttaaataattattatactgttattattgaattctaaaatgcattttatgtcatttagtaattttcataagtttgcatttccggtgtccggtaacatggaactcggtgtttggctcagtaaaatcacaacttagtatattagtagattgggacggtttattagacattggga

SEQ ID NO: 232054 - DNA, 1086 bp, Cannabis indica
tagcaacaaaagaagaagaaacaagcttggtttccatgacaaaaagagctggggctgatgctgcttcgtgaggagggagaaattttggaatgctcgggaactccctaatccgcgagcattccaactaatgagactcatttttctcggcgaggttgctgagcaacacccgccgtttcctcgttgtcagacatagatggaacaacaacaaagtcagagtgagaggctcgggctcttttcagcatgctgcgaaccgaagagccaacttgacaggtctgcctagcaaaagacctcttcctggtggaggaagggatagcaggggaatcattgatatggagactggagaaaggcgggctgctcagggaaaccagggatggctgtgggtacatgggtgctttgcctttggaagtggtgggaagggtggtggaagtcataatggggtgagttgggagagagcagtggagggtggagtgcacagtttgagactgagtggaacaggtaatgttggaagtagtagcagtggtgagttggagaaagttagaggggagggggcagccatggtagtcacaatgaaccggtttgtttggtcttgaaggctatggtgaccaaggttggaaagggaaggttgttcctcaaaaggaatggagttggatagctcaaagatagtcttcttataaatggatttggcaggggcacggagggcatccttgtagcttaaactcggaggaaaaggatgatggtcacagtgatggagaaacttatcacacttgttgaaggtgtgtcaagcttaccacaatgatagcagtagttttgaataccctcgtaaaagaacttcagccacttagtgagggatagttttctaaaatggacattcattccacggtggaggggtttggtggtgtcaagaaggacacgaacatgcataaagggagtgactgaatcatagagagaaatgagatggacctcaatgagatcaccaatagcatctgcaacaaactgtgccagaccataggatcgagacccaaatggaataaaattgacctgaacccagagaggaatgtatcgaagttgagagggaaggatggtgtc

SEQ ID NO: 232055 - DNA, 1123 bp, Cannabis indica
caagttgatctttagccacatccattgttaaatattaagaataagcaacatcaatattaagaatttaaagaacattatttgtcattaaaaaaattatactgtataaattaaaaattattttttcttaagagaaaagcaattcattataagtagaaattaaaggtgtatggattcacttacaatattgccaagagagatgacataaaggaaagtaaaatcttgtggcttggaacagctgaaggtgaaattctcatccatctcttcggggagtagggtgacggcttggtgcattgaataaagataacctctatagatgggcctaaagacaaaaaaaaaaaaaaaagtaattagaaaaattatatttacaaatcataacttgcatcgatgacaaaataaaaatatacttgcatataaaaattatatatgccatgcttaaaaaatctatattgtaaatataaaaccaatacattattagcacaaaggacagtacaagaacaatataaaataatcgatagaggaaagtgagaagaaagatagaaaagtgaatgataaaaaataattaagtttaaataatatggtgtatatatagatagatattttgtttttttaaattatattattatttgaaatgtatctagttagtgagaatatatagtacgaaaatatatatgtaaataatttaattatttaatataatataattaatttagtttatattcattatcatttattttagtttttttttttgttttgaaaaaaataattagaattaaataatgtggtgtatatatagataaatattttagttttttttaaattatatatttaatgatattattatttaaaatgtatatagctagtgagaatatgtatagtacaatatgaatatagggacaggatttggtcccgttatgccaaaacagggaatacaatccgtgattgtactgtagccgttggattaaattggggcatgatctaatggctggggttaagtaggggtatttagggggggaaaatggtaaccggtggtttttgtattttaaattaattaattttgaaaaactgacaccgattggcgattgacgtgtgaggtgtgacgtttgatgtacggtggacagttagc

SEQ ID NO: 232056 - DNA, 1434 bp, Cannabis indica
ccctccctctaagtgtaaaaataggcagtacttttttcacaaattcctgctcagtgtaaatactttactctaactctctatttcccccctttcttttctctaactctccattttgttcagaagattgtactgaaaatggaaaaagtagaaacctaaaaccagtgagaccaaaagccaacaaccatgcatgaatcaacttccacctcgacctcatccccggtgagatgattttgacttcctctctctctgtgttatactttgatcttatccccgatgagattctaacttcctccctctctctcagttcgacttcaaccttgtcatcgtcggtgccaaccaatgaccaaccacggtttatttttcctctctctctctctctctatatatatatctatctctctcttaattcgtttcccctctcttttctgttctcattttggttattcccttgctcatagacgagtcaacgacgacagctcctccctcaatcacaggcggcaaggctataactcctcccttatgcagacaataaaagcaacgagtatggattttcatctatttggtgttttgtttctttttattattatttcaatgttgtgtttttgactatgttgagagtaaggatgaattttttgagtgattttggaaaatttatcctgggtttttgtttagagatttttgtattgattcttaaagtagaattgataggttgaattgtatcgattttgaatatgggtgtggttaggtcattgaatgatttatatgtttgggttattttgagtagttgtatttttcttgtctaagagtaaattggtaaattgtattagagaaaatggtgaagaacaacagagaatagagaaagtttgtatatttctcatacttcaactcatactagtgtgttgaatagggtgatgagggtcgttgatgtatgagaaaatataatcgaagtacaagtgcacagtgctctaatggttcttatttatggttagatttatgatgacattcatcataaaatgtcatagagaggagacggttgttcattggcttctcatttcaattttgagattgattatagactaaccatttcaattttgttagtttgagataggagttgtgttgtttgagctcctagataattttaaaggttctacattttggtttatgtatattaggttagcatttgagatttctaagcttgaaatgattggattttcttgtttacttgttctacaagggtttagatagggggccatgcgagatttttcggacaatccctgtcctaatgcacgtgcagaccgagagatcactcgtgtccgcgcgcgcacgtgggcatccctttcctgatttttttcgattttcaaaaaattataactaattcaaataaaatcgaaattaaattctgtaaaaaaaaaataaattgcttaattttttcta

SEQ ID NO: 232057 - DNA, 807 bp, Cannabis indica
cgggaccaacaattacacatatcaacttgtataacaccaacacgaatatgatgcaacccagttagctactggatgaccatttccgtttattttaaggttggatccatatagtaaataatttgcataaacacagcatagatatcattggacatattgtcccacatgtaaaaatattgagctacatataagaatggctactccactcattaccaattgattttgagatgaaacctcatgattctcaacatggtatcagagtcatatccttagcgggctttcgatccacacctatcaaagagttagccagccacaagcgagcaaatggaacttccaaccgcaaaacaaacaaaaataagtgagcaagtggcactacttatgataaagtgattcaagattggtaagtaaaaataaccaccatcttggaggggaaatattggataatattatcccatatggatcaaatgtaaaaatattcagtcatatataagaacatggcataattctcaacacatatcaatctcttggtaaagtgagtatggtgtgaactttagtttgaaccttttgatggtgtatgaatgtattagcaatggaaaaataaggtgcatcacaatattacattactaattgatttaaatgttgttgttgggccttgaattttttggattattatcaatcaaaagtaattgatccaaaggttcatagttcatattgctattaatggtaatgatgatgtgttgttgttgcatgggcattctggtcggcgcatgcaaacttcacccttgagattgcaaaagctaagggtatttg

SEQ ID NO: 232058 - DNA, 1013 bp, Cannabis indica
atagtgatcaaatatagatggagaatactaaaaaatcgcgaggatggataaaactcctaatccatttgtaaagtttctgaaaatagtataggttcattgcctaataaaaatacctcgtacacccaaataatggtgtgtgacaggtttaagaaactaatcattattggacatagtgtggaccctgcataaaaaactctaaactttcctaaaatctttgtcagttaacattgttcaatggtagtgtacatatcgaattgtgtcctagccaatgttgtttctcaaccatattttgaggtatgataaggttggaaagtgaatttatgatatgtatagattttagaaatacacgtatacagttagagtataattatcaaagaaaagatctgagtccaaataccataaatgagcatttcatcataaaagctataaggtctaagagttacatattttattattcatctcacaatactagaattttagaattaagaattgacttgatcagtaggagcgatcaatctgagaacctattttttagaaaagatcatttattttcacaaacttctacaccaagtattagataaattatgcttcacaacaatctttaagttaatggttattgagaatccataacttatcattaataattaataagtcattgataaaattctaataagtcatgttatttagtaagttctcacaatttctaaacaacatgcatgcatgttgaaacattttctctgaagaaagttggttcatccttaaaatgacttattagaacaataatattaatattttctagtgattacagtatgtacaataagagttcaactacaattttaatttgtgacacaaattaaaattatggaatgcaaagaattgaaattgtggtacaatatgccatgaatgaagatatgaacatagcaatgaaatctatctgctttagtaaagttgcctaatggggtggagaacattaattaagtatagggtttttactaataaatactgattaggca

SEQ ID NO: 232059 - DNA, 2321 bp, Cannabis indica
attatgcaggctcgatggtgagttggtttgaagatcgcttctagtttgtagttgtctttgtcttttgggttctttggtagaacctgaggcttcatttgcctgggctacatgttttttagatcttttatttacaaggttggggctgttgagcatgtcttccaaatcgagatccatatctgcgaggtaaaagagatacatcaacacttgctcaaaaatagataataaaaagatagaaaataaactcccacttaaaggaagttaccataattatcagaagatgatgaggaagaactatgataattagtaaactccctagacccgatgattaaatatatatcatgagggtttattagagacaaattccaatctgaatccagatgactcgccctatccaagttggtgccatattgctctgcaattccgaagtacgaactagtgcaactaagttgtacgtgaaacctaggataccaactatcaaacctatgtgttatgcgatctatgcagaaattatctcaagtatagaagttatattgactatcctgaagggttacgagcaaggtacgttctgttctaagtgcggtaggtgaccatccacattgatcacctcaggatgcttcttctttagctacccaaggggttactttcttgagatagtgaacgcgagcaacgtaatcctagctttcctaagcggttgatgggaccttctcccatgaagagtatttcagaaccttatagtcacaggtgaactggtccgagcaaaggaggatgaaagtcctcagattggcctcatttaataggaaatatgttgaccgcgatccgaaaggaagacccaacaagattttatgacgctcagccatctcgagggtggggattggtcttttggtaactgttgtcaacacaataaatgtaataagtaagcgacctcaatttaataaatataaaacgaactcaaaaccaagtttttgagacagaaatttcttacgtataatgcgaaacacagtggtgttgataagggaaagaccagtagtccagaaaaaatcatccttgaactcggtcatgtttggtaacctcgcaatgatcctgtgatcatttgtgtgggtacaaaggtaataaaaacctcctgaacctcgcttccttgcgggaacatctttgacggattaaaaataaactatctcgaggggagtgggacactcccagcctaaaatatggtataaaacttttacgcctggtagaattctgtaagaacttggaatatattgaaaaggggcaattctaagataattacagaattctttgtagtaccctttcgatgggagaactgcttcaaccttgatgtgctcgaggctccaagtgcctattccaaaccagccactacaactggcgccaccacactcttcatgaattactcgatttggttgaaagcagctgaattccccaggagcattggatctgatgcggcatcctcacccttgcttgatgctgcaagtctttaatacaccaccaacatagtctccaatggcccttaccttggattcaataagctcgacctcaaaagtgacattaggatcctagggggtctttgatctacgagtcttggtggacataatttcaaaatctaggtcacctgatgaaaaagcaacagcgacttgaggtaaaaacaagggtctctcgctcaaggaatagaagataaaatttaaggttcagggcaagctgcatctcacaaatagtgacgtttaccctcagttatctcttgtaaaaatttcctatagtgattggaaatttcatcatgattggtctttattaaatggtcactacttttggcatcattcatctcaagtttggatttagatttttggatttgggtttgaatggaagagctaattcattaggacattctatttctagaaaatcaggagttgaaatttcaaaaccagattgggacatattgacaaagaagaaaaatccttatttctggaggaaattaattcaatataaaccagaaaccaaggaatataataaagctattaattttttccttaaaaccctataaattacccagaaactaaatcggaaaatgcctaaaccaaacacaatgaatgaaggtaaaattgaaagcaaaataagattacgaactctgaaaaaaggaatagcagaaacagagaaataaactaattactgttttggcaaaagtttctaggaaatgaagaactcgtcgagtaagaatttgatgactgaagtgatgagttctgagattctctgagattgaggacgaaatctgatgaaacacacagaaaataggtcaaggataatgagggcatgca

SEQ ID NO: 232060 - DNA, 807 bp, Cannabis indica
tttaatattatctcatgtgcaaaataaaacgtggggaatgttcatgtttcatgagcggttacaaatgattggattctaagggaataactgtcaccctgtgcatctataaatagggacagaattcagagaaaaaggggacgacgaatcttgagagaaaagagatacaattgctaaattatatcattgtattttgtattcaaatacatttgtctttaataagatggacccgtggactatgaagatttaatttcaaaacctcgtaaaaccctcttgttatttattactttacagataattaattgctatataattaagtctataatttttattacaaaaagactaatattttagttaatgaaaatctacattaccaatattaaattcaaaatttaaatcaatatatatattagtttgaactttatattttttaaataatcatataaattatatgattataaatatataattaaaatatatataaatccttttaatctggttggtcgggttagttcgggttgattgggtgggttggtattatttttaacccacccaatataaagattagacaggttatatttttgtcagatttttcggtttgtattttttgtcaggctatctcagtttgatttggacgggttatttgagttgggcggtttacaaaaatttatatacaactctcttatttagagctcctaatatattgagaatttgaaatatgtcttatctaaaattctagaagattttaatacatgtcttaagtgatacaaattaaaagtcgcgcccactatatgacaaagatctttgtat

SEQ ID NO: 232061 - DNA, 1748 bp, Cannabis indica
tttatctctcattcttatatgatttatttctcaaatttaatttatttctctctcattcttattcttatatgatatatgatctccatcatctctcataggtaatttattagtatttctttttctttttgcagattgagaaaccaaagaaggcgaagaagtcgccgccgccatcaaattagtacgtactgtattagtgtattatgttattaattagctcctttctattttaattttctctattatcatatgaataaatatttaattcatcatattatttataaattgttattgttgttattgcggtactttcttccaaaaaattaaaatgataaaactttgaagagatcatagtttgtgtgtagtaatcgaatcagaataagcagattatattcaaagattttttcaaattgagaaaccaaataaggcgaagaagttgtcgctgccatcaaattagtacgtaatgtattagtatattatgttattagccccttttctattttaattttctctatttatatatataaatacacttttaattaagactatgtgttataatgctataaatggaagctttgaatgcagtccttgttgatgcccaagcaaaatcttcttttcatggaaatctttaaaatgaattttgacattttgaagtgcaaaaattcaatttttatttaggtgagaagatataattttgtcatgtcggtatcaaatattaaagcattgattctaaataaatatattgatttatataaatcagaaaaagcgtctacattaatttaatacctatatatagattttagggatttatttggggtgtaattgattaatggataattaattagtatcattgtgagcaaaaatggtcccactacattaatgtttataaagatattaaaaagatgtgatacaataaggtatcccactaaagaatttaagatatttatctatgttatgtatattattatgtattgtatactactaaaaatatttataaaaactgaaatatttttaataatttgctttaggaaaacttataaaaatattaaaattttagttaacttttacagaaatactgtcacataattttttttcttcaaaaatattgtatttttataaaacaacagtgtaacacaaaacagaacaactaaaaacaacagtaaaaacttaacacagtacacagtataaaacttacacaatatttttgaaaaaaattctgcaccacagtataaaagtaaaaaaattaaaaatttcaatatatgatgtaattatctcttcgcttttttattttacatttgaattagttgattaaataaaattacttttatgggctagttaattgggcttttagaatctaattttagatttctaaagctttcaaagcttagaggattaagtgtataaaagttaaaaaaaaaaattgtagatgattacctattattttaattgaaatattgtaatttccatgcttcagcgagtgctcgtaaacgtcaaaatacgattcataagcttcaagatgacaatgggagctggcttgattgggagtcgggtttgggtgatcatatggttagtttctactctgagttattttccacttcgggtagtcttcatactgatattcttgatggtattgctcctgctattacttcagaaatgaatactgatttgttggctccagttactactgaagaagtaagaaaggctcttttccagatgcatcctgacaagtctcctggtcctgatggtatgac

SEQ ID NO: 232062 - DNA, 971 bp, Cannabis indica
tggctgcctagccatacaaccttccagccattgctttttaaagggacagatttcaatttaacagtcagtgagactatcaacagcgatcgacaatggcatataccagcactcaagtcttttttctggatattgatattgagaagattcttgatattcctttgaccttttttccaaacgatgataagatcatttggcaccacgaatcaacagggatttattctgtcaaaacagggtataaattggcttcagacattgcagatcaagaaactccttctggttcctctcacgttacccatttatggaaacaattttggaagctcaacctcccttctaaggtaagaattttcttatggaaagctatccgtgaatgtcttccagtggctgcgatcttgcagaagcgccatattgcaggttcttcaacatgtcctctctgccgtgataacaatgaaaccatttgtcatgctcttttcctttgtaaaagagctaagaaagtatggagaggatcctctttttctatggatagattgcttgctgaatcttctaatttcaaggatctattctttaaagcttcagagacatggtcgcaacacgatctggaacaatttgcctgtcttctatggtgtatatggactgaaaggaataaagaaaaccatggaaccaaggctaagccgcatgaagttctccttttttctgcccttacatatttaggagagtaccaagctgctcgtaaagctcctcccagcaatctcagtcacgaggttctcaataacacagtacctactgtcacacctaggtggctcaatcccccttctggtcgactgaaactgaatacggatgcaggtgtggatgctgtgaatcgtatttcaggttttggagcaatcttacgggactctaatggtcaagtggtggctgcaatgtcaaggccatatcctagttgtttcaagcctaaagtaatggaagcattggctctc

SEQ ID NO: 232063 - DNA, 1469 bp, Cannabis indica
gtttatgatttatgcttttcttactgagtctgtcggctcacagttattacgtagtacgtgtaggtattagctagaactgaaatgggatgagtctaaagctaagggtgaagattgtacatatcaagacggttagacctggagtgttcagggtctttgggacaatttaggctcacctttttaatagtcatattaagacaattttagtatcgctagtattttatagacttatgtatgtgtgtatgtgttctctgtcattgcgagaaggcctttgtggatgtctcgggggtcaacctatcctaggttgatttctagtatttctcccatcatattgggggatttcctggtttcttggtcacgactgccttgcattgcactcatgcgagatgattccagtatattaagttgtccattcctctggtttgcaaaaccatgggaagtccttgaaacatcacgctgatgctcttgatttcttgtattgccagtatttggtggattttctctatccattgggatatctcttgtattcccaggctgttcttcctaagtatttatgggattcccttgattattttcttgtctcctggtctgggaaccttaaggccttccctgtggtcaccttgcagatggatcaggttgagtttgaggagtggttccctgtgcagccttggctgccgcagcctctcgttctaactcggcatttcttagtttgactcaactaggcattatcgaagttgcctatttttttaattccaccactgggacatatctggtggtatcataggagtcttcactttgccactatgagatctgttcaccagttgagttaaaatttccatcatttcttctagatcgaggagtttcaatcgtgttgggtctttgtgatccctgaggttcctttctagggtgaaggttggtctcctctagatggtttcttcattacgaggggtattatcctttatagatacaaatttgtagttgtgtctataaggagggtattttctgagtttttattacaaaagctctcaatgaaagtgtcaaattgttaccgcagattttcattaactataaaaaaaaagccttttttgtaataaatatactacagaattaataacaaagaaattataacaatactaaattaatactcaaaaaaatatatattatgctaacaaaattatatataccactattaaaatatgtatacataccaaaaaatttatatataatcattatatataataaaatagaaataaatatcatcttaaataaatgatatattatacaggggtgctcgcggtgcgggtggtgcagtttttgacctttttttaaacaaacctgcagatgtggtttttccaatttctcaaaccgcacccgcaccgcgaaattaaaagccatagaaatcgcagaacaaaaaatggtgcggtatggtgcggtttatgcggtttggactatcatcaataattaaactatca

SEQ ID NO: 232064 - DNA, 653 bp, Cannabis indica
ttctatgaactgacattataagtatgtacttgatgtacctaggaaactttgtttatacaaagtcatatttgtcattttcatcccatttagatagactcatcacaatcaactacattacacaccatgtacaacacatttatataaaaagtcataatatatacataattatgtagtcttatttcttccaacactatttatttccttcacacacattttggttatatctatcaaaaaatattttagctaagagcattagtttcaatataaccaattgaaagtattatttatgatatttcacctgcaaccaattgcacaatatgataagagaggaattgaagcaactcttttattgtgaatattgcaaaagtacagaaaagtcccaaagtataaaaacttcatactcttacaaatttttacacatattttcatatatatatatagggttattctacggtgggccgagctctttcttccctatactataaggccattatctcagtaatgacaaaacataaaatctaacattcatttagcataaaatggactctctctacacaattattttgtatttaattataatatctattttcttaaacagaattataatagggacaagatgcaaaatgaccctaaatctaacaattaagttaata

SEQ ID NO: 232065 - DNA, 967 bp, Cannabis indica
ttttttttttttttatattacgttgtatattgtaatagacataatgcttgtttttaaaaaaaaattacgatttcgaaaataaaatttaaaataatttattacgcgtataaaataaaataaactaattattcattattttttttaaattgacaaaatacttaaaataattataatatataccatcatataacaaaaatactttataattgtttgataaaccaaaaataaaaaatagtccgaacaaaagtatattacaatcatagatggcccaacatatatgatacctattgtttatcacataataataattattattattattattttattttttttattggtaagtttatcacacatttgaaattaaaaaaaaatcaagagaacatgtatgaatatgaataaagggattttatgctttagaaatatgaaattaattataggcttaatttatataattacaattagatacacccaacttgagctgatatcaagtgtaacatataatactattttattatggtgcattgtagttattagttaataataattataaatatttgtcaacaaatgtcaaaactatatgcatataaaatttgtttataaaatatacaaaattaaactaaaatactagttaataacagaacagacttgatccattcaataaaatgtatcagtcttgtcctataaaaaaatttaattaatcagtcaataaaacaaattagtgaaattatacagcagattattataaattaataaagcaccatgtgattttaagagtatatatatattattttgtatattataataataattgaggaataagtcatatatatatttatataattggggtcagtataactgtataaaggtcatgaatatatgtttttaattattttattttattttatttcactttacagcatatatataaatgtatattatatttgatataaatgattgcaaacat

SEQ ID NO: 232066 - DNA, 835 bp, Cannabis indica
agaaaagcttaagcttttagtagaaaaacagaaatccaatataacaaaatttgagtattgtcctttgattacctttttggataagctcagcttgataaactcaatgagaaagtgaacatctttaatgtaaatcttagctgataaacttgtaattgcatgatggagatcttggttcaatgggtttgactctttcttaccaaccaagaacttttgaggcataatctcttctatatggcgcttagatatttctttattaatcgagcgagcagtggacatgattatggtttcttcttctcgcttgatatctctcaaaatatatatttttctttttgttgtgataacttttgcatcataacaagaacaagaaactaatacaacttttattcttagtttctctctctttctatgtcactattaacctcctttttatacatgtatttcctttatatttggaatataactttaaattcttaattagaataagattagttaaattaaatattcttttcaatgaaattactatttcaaatattcttaatttaaaatttatgtgacatattattgatccttaggtattttaaattattatttcattataatttgtgagcgactcaaggattatttgtattattttaactattgtaactaactagtaactaatcttactctaaattattaactagtaactaattatagtatactaaattactaactagtaactagtcctaatttcaccgaaattttggtagcataacggctataatttaaagttccaaaaaatttaaagctactaataacaatttaaaacaatccaaaacaatataaaataatcaca

SEQ ID NO: 232067 - DNA, 2872 bp, Cannabis indica
tataaataagtgtaacattcctcctgtaaattcagaacattacaatcaataaactcttcttttctctctctgaaatactctatcctaacatggtatcagatgaaataaactgaagcttcaagcagtccacttcgagcttcaagaatcaagatcttccttctccgatcatggtgcgtactcgggccaccagttctgcaacaacgtctgacgatccttccagagttgaagcaccaatggctcctccaccatcaaccacttccgctgacaaccctccacaaacaaaccaatcaattcctgctctgcgtcgatctactccagtcgacagaccagcttatgaagacattagatcaccctactacatcagcacagctgatcatccgggcctctctcttgtcactccagttctctcggacaagaatttccaatcttggaaaagagatttcaagctatccattggagcaaggaacaagactccattcttggaaggtactcttcttcaaccccctgaaaatgactctctttttgatcattggactcgttgtaatcaacttgttatgtcatggattttacattcggtttcacccgaaatcaagagtagcatcatgtactttgatactgctcatgaaatgtggaccgtgttaaataatcgatttaaccaagctaatggtcccagaattttcgaattaaatgagacactaacctatctcaatcaaggagatgattcggttagtgcctattttaccaaacttacagctatatgggatgaaattcaccaattgagaccttgcattccatgtacttgtgctgctgctgcacaacacttggctcatcaaaatcatgaccaagtattacaattccttaagggcctcaatgattcatatcaggctgtgcgagatcagatcctccttcttgatccttgccctgccttgaataaggttttctctatggtaatcaaccaagaaaggcaaaggtctctcggccatcgatttcttccccctttggctgctgcttccagttcttcgaacccccaagatcctgcacctgcagccaatgcagtttcaaagaacaaaagaccacgaccacattgcacaaattgccaaaagccaggccactataaagacaaatgctacttcttaatcggcttcccacctggctatggcaacaaaaaatcagattccacttctactaaaaaatctgatttgaacaccactcccaccaacaacccgcaagcttctcaagtcacatcttcaacacttgatttcaacacacagcttacaccagtacaatgccaacaattgatatcgatgttagcacaacaactccaaccaacagatgcatctacatctgacaaagctataatcaacaatatctcaggtattcttgaccctttcttgtggataatggatagtggtgcaacacaccatgtatgttgccacctagaatgtttttcttctattgaatccatccccactgacctttctgtccatttacctactggttcaaaagccaagatccataaaattggtactgtggttctcaactctcatatcactcttaaaaatgtattatttgtacccgatttcaagtataatttgatttctgttagtgccctcacacacaacacaaatcttgctgcaatttttaaatctaacagctgccatatacaggaatctacaatgacatcgaagattgggatagctaagagaattggcaacctatactaccttcaacaattagacaatgaggacaaatattcagtccaaacttgtaatactcaattgaataatctccaatggcatacacgccttggacacccttctgtaatggtttctaataaagtcaataaacaattacaaattcctcatattccaagttcatttaattgtcctacttgccacattgccaaacaaaagaaattaccttttcaatcaaataataactttactttggcaaattttgatcttgtccatatggacatttggggaccatattcaatcccttcaatagaaggctataaatatttcttaaccatagtggatgatcattcaagacacacttggttatattttttacgttcaaaatcggatgccactttggcgattcctaccttttttgaactcatacatacacaattcaaaacaaatattaaagctgtgcgtacagacaatgccaaagagctcacacttactaatttctatgctactaaaggcacaatacactacacttcatgtgtaggaagaccacaacaaaacgctgtggtcgaaagaaaacatcagcatatattaaacgttgctcgagctctaaccttccaatcaaatgtaccactgcaatactggtcttttatcgttgctactggtgtataccttttaaatagaagtccttctgttcttttaaaagaccaaacctcatttcaaatactacacaacaaactacctcaatattcacacttgaggaatttcggttgtcttgcatatgcctcacatgtcaagacagccaccaaactctctcctcgagctagagcttgtgctttcttgggctatcctcccaacatgaaagcatacactctagatctccaaacaaaacaaatatttcagtcaagagatgtcctcttctatgagcacatttatccttttggccgtgtgtcccaaactgcacacatcgacaacttcttctctaaaaattctgagattcatcatcctcaacttgactcgatccccttaaactctcctgagaacagtctatctcagcaacaacatcacgacaatcccccatcctcacctattctcgaggatatatcaccaaattccaacccatctccactagtttcacctcccaggcacaacaaaacacgcaccaaatcaggtcgtgtaca

SEQ ID NO: 232068 - DNA, 691 bp, Cannabis indica
agccatctccttcgaaccgcattcaaagcacacaacccaaactccatttttacctgaaaccgaagccactacgaaccaagcctgcctccattcgaccaccactcacaaacccaacttccattcactcatatcagaaccaccaccattgttcacacccatccactcccgtgaacccaaccaaccttcgaaccacctgaaccagcaccatcctcgaaatcactaaccattccacctccaagttcgaacccaaaacttcatctccattcaaccgaacttccaccctcactcgataatcacccagcagcttaccgttcgacctcacccgcaccaccaaaatcaacaacccaacaacatcacggcctcaccagcaacacagcagggctccctccactaacccagttgtcgagcacaagaagagaaggaaattcatagccaacacatcttgccatactcgaatcactagctcggttgcacagaaaaaaaatttttgagccagagaatcaacactagcaaatttcagccagcccgagctacgttttggtttggtgaggtaaattgtaaatcattttggttgaattgcatagattggtgggtgtaattggactgctggtatatgctatattaaactggtgttacacattatcattgtgcttcacgggtggtagccgagtgtgataatgctgggttggac

SEQ ID NO: 232069 - DNA, 932 bp, Cannabis indica
tcatttgaaacatttaccgtttagggaacaattggatagggaaaacctcataagagtagcatgatgataggtgagttaaggcatcttcattgtgtcggagagttccacatcattatcaccattgagatacccgaacactttttgacgatcaaatccacatcagttcgctcaattctcataggtagatttagagcttcagccacatccttcacaataaaggaacactagtgtcccctggaaaagactttgccaaacataaaagagccctcatcgaggcactcatcagtgatattagcataaaactccttgacaattcgatccacatagccatcaaaatcgatcaaagtatccacccattgtctttctttcaacatattatagcactgacttatctttttttttttaagaaacaaaatcttaattataagtggattcatctatctttttaagtactataaatagaaccttttaggcttcgaattttagaactttagagctaccaaattgagatagaaacctagaaagatagagagagcaaaaaagagacggacttcgaagtgttcttcatcatagttcttttcttcgccttaaaatcttactatttattatgattatcactataaagtctagttctgagtagtttccttttagttaaggattatttcaaaacccgagacatgaattcttaatttcattattgaatgttaatttctagtttctattatatatcaatttgcttatattcttctatgttcaatgttatgattattgttttaatcttatttagaaggcatttgacggtaagtaagaatttgaaatgcctcccctacctttagctaggagacaattggtagaaaaattgaataaaattcaattcaagcttggaaagcgaaagtcaaaatcaaagaaaagaaaaggaggtgagggtgtca

SEQ ID NO: 232070 - DNA, 1026 bp, Cannabis indica
tagggcataaaactcaacacctttatctcccaaatcctcacttcgctcgatccaaaggcaagaagaaattaggtctgactttgccacttttatggaggcaaatgctcaatgtagcagtaacatcttacaaggtaaatcctccattcctcctattttacgatttggtaatattcaaagatatttggataattcttttaagaacttggagaaagagaaggtgaagataactgatgaggatatagaagaggaggttgatttctggaactcatcaatcgtttgctatgctattagagctaaccctcctctatttgttatcgatggattcgcaagaagggtgtggaaaagataggatttataaggtaggaatgatttcatatggagtgttcttgttttgttttcacaccattgaaggcagggacaatgtattaaacggagggtatatttttttcaataatcgccctgtagtcatgaagccgtggaactcagatgggaactttaaaaaagaaaatctcagtgtgattccaatctgggtgtagttggaaaatttggaattgaagtactggggtgaaaggtcattattcaaaatcatagggcaattgggaaagccaataatggtagactcaattaccaaagagagaggtaaactaatgtatccacgaattcttattgaagtctcgatacatcaggatttacctgatctcattgagtttgaagatgaacacggcttcaacacttcggttggagtcaagtatgagtggaaaccaatgttttgtgagtattgtaagggaatggggcataaaacaagtgaatgtaggaaaaagatagggggcaaacaagaatgggtggtgaagaagaggcatgaggagttaccaggaacaaacaagttgcaggcagtagactctaatggttttcagccgattcaaaaaggctggaaaccaaaggaggttcgacaacctgctatgactataacaaataatgcatataagattttagaggaaactgatatggaggccaatattgagaaca

SEQ ID NO: 232071 - DNA, 1673 bp, Cannabis indica
gtctatggtattgtaaagtttgtgcaatatcatcattgggaaaatactcttactggttttgagggatatgttgatggaattgtcaaagaattttatgctaacttgtttgatgattttcttgatgagaattctgaattctttcgtaaagtgtatgttagaggatggttttcctttgtgaaaaagacatttccaaggctttgcaactgccagaagatgtgacaaatgctataatgtctatggatcgccatctgatgctcactgaactcactggtgcacgagttgaatggaaatctggacagagtcttcgtattacacatctcacttatgctcatgcataactcatgaggtttgtacttagcaattggattcccaattccaacaaaaccgtggtgtatcaagatgtggcttcttttctctttcgtatcacatcgggaacatccatcaatttggcttcctatatcttagatcagattgtgtcattttgaagaggtaaaaagcatactcataagcttatttttcctaatttaatcttcaagtttctttcctctctgaaggatgtggcatattctcatgagacacttgagcctcccctcactggcaccatcttccaaccctcagagcattttgatggatcttttcccaagtgtcctaaagctggtgctggtgctgctgctggtgcaagttcgagttctgctcctgtagatgtccatgaggttaagcatgaggttcaacaggtgaacaattgtcttgctgccatggaggaggttcagcaagagatgtccaagcaactgtcctctttgatcaagctctatggggcccataagcatctatatagccgagtactctaccattgagttagcaaccagaactaaaataatttgaatgtatagatactccatgaatctaggaacttttgcttgcattgtattatttggtctacgtaccggaactgataacattcgagattatgcaggattatacccgaaaggggagttaccggaactgataacattcatgtttttttggacatatttcaatattttcattacttttttgtctttggcccttagataaacaaaaagggggagttatagtttgtttttaatttcttgttttatcaactctggaccctttttccagggggagttgtgtttggtacttgtgtttcattttggattaaaagttagcttgttattgtcatttcagtttttgattgtgtttctcagggggagtttgtgtttgttcttgctaactttgatttgcaggtacttctttgttaaaaaatattttgattatctaaagtgccaaagggggagattgtaaagtcttttttttggcaatttagatgccaacatattttttattttttattttatggtgagatttatttgcattcctaaccgattttctcacctttattattcattttttaattgctcttttctatcttaggaaagatgtattttcagctggacttttcttgtatggaaacttcttgtaagaaaagaaattctcttatagaaagtttgttgttaaaggaaactttgactcttgctattttccttattaaattcgattgtatcttgatacaatcaaattatacacactgtttttgacaagtatcaagacccaatacaagatcggactcgttatggcaagtttccttttctagt

SEQ ID NO: 232072 - DNA, 1258 bp, Cannabis indica
tgtcaacttgggcactaggtgaagccctaggcacccgggttgattttttcgtggtgttgttttgtgtatttttagctttcaggccttggacttgaatgctccatatctttatggtacaaaatacaaaaagatagtgagttggaaattacttggcgggatacaaacacccattctggagttcccaaagtcaacccaggcgcagggcaagggacctttcccaaatcgactgctatgacttaaaactactcaactccgaattattttttttcttaccacatgtcaaacattgatgttcacatcactatggtaagtttctgggctaacaactttatagagcaattacgctaggaaaatataacttgtctcaaccttcggaaccttcacgaccaaattgctcaaggtaagctagtgggcacaccatactcagtctaagacggtttgctatactaccacaaactctttattagccaattttcgaacttgaagcagcaactgttaactgagtttcatgcttctccttttggggtcactcgggtatagaaggcacttacatactactggaatgtgaagcaatttgttttttagcttgctttgtctgccaaaccatcaaatatttcccaacagccccatatggactcttatagccacttgagatacccaagtgagtttgggaaaatttggccatgaattttatcaccgggcttccactatcacatggtgtgacctatatttttgtgggaattgattgtttcaccaaatatgctgattttggagctttgccgactcactattcagcaagtaaagttgcatatctctttaccaatatggtgatttgagttaataggcaccacattgaagatgagctctacttaccaccctcaatcggatgaggaaacagaggtcaccaatcattatttggagcaatacttaagggctttttagaagaatacacgaagtaatggagtaactttctgccgtgagcgcggaacatcactacaacatcagctatcattcagcgattggtatgaccctattccaagttgcttatggtcgcaccccacctaatattcgtacatatacttgaggtatgaccagggccggccctgaaaatatatgggcccaagacgaaataaattttggggccctcaaaaatacataaaaaaaaatataaaaaaagagtgttatgggatttgaacccatgaccttaaacattatgccatccacctcaaccaactaagctatgaatatttattgttta

SEQ ID NO: 232073 - DNA, 788 bp, Cannabis indica
tttcattcacttcaaagaacactattcatcatggctggaaatcacgctaacgaagccaacaacgggtccttgtcaatagaaaacatagctgattccacttctttagtcgtgtactctgctaataaaatttccctgtgacaatcatttattttcagaccaaggtccacaatggactgataaaccttccttctgcctgttattgttgatcctaaaagcctttggtaatactcaagaaaagcattttggactttgtcaggagaatcacaccagtccccatgctcatcttcaattgagaaaatcttattttgcattctcctcaattttagagaagcatgaaaaaggtgagagttgtcatctccaaacttagcccaattgagtttagctttttgagtcatgaaactagcataagccttgctgattgttgcatactcttccctggcactctgttcttgcatcatcaaattttcattccccgggttctggttcaaatcaccttgaatctctgctaactgtagtcttgctgctgtttctgccttatgaatatcagaaaaatccgttctattgagttgctttaatactgcttttaaactcctcaacttatggacaattcgaaacattttcgtgccactactctcctcttcccaagccttagcaaccagtttgtcatactcaggagccatcttccacatgttgtagtacctaaatggttttttcccatagttcttatcttcataaatggataccaagataggactatagtcaaaggtcatttcaggcaaaaaaacggc

SEQ ID NO: 232074 - DNA, 753 bp, Cannabis indica
tctattattctatgttcaatgccgtgactattgttttaatcttgtttagacgatcgctaaatcaagttttactttaatttgttgtcatcttaggattattattcacctaatagtctaggattctaagtgtttgtgataaattgtaatttttaatattgtcaaaggtattttaattgggatgaagaataaatactaggttaaataaaattatatgcttcattaatttattgcttagattagtctatcttcataaatcttaaagctttatctaaattaaataaattgcatgcttcgtgaatttaatacttaagtaaaagagttagttattgagcatttcaccttaaatacatgtaatagggagattagaataatttgactctttcagctttatctgcaaaatcaatagtttgattgaaaaattaaaattacttcattaatagaagttaagaataactgttgagagtggagaataaccttgaactatttatctcatatcaaagtatcacatttaattcgtttttatttttatttatgttattttattctcatcatctaaaccgtctattttctaatttttcacgctataatttttgaataattgaactaacatagtcattgtaggatcgattcttacttacatttatactaaaataattgaaagtattggaatcaaaacaatagtaaatttgatacgacatatgataagtgatgtgacacgcatgtctaacacgattaataaacaggttgtgtccg

SEQ ID NO: 232075 - DNA, 668 bp, Cannabis indica
ggaatttaaatttctgaaacacctagcgtttaaagtttttatttgaaaatattaattacattggaatttttttcatactttagaagggttactaaaagaaataggatactaaattgaatatatatatatatatatgaaagttattattgatatagtttattttttattacagtaatgcagattttattcaaaaaagttaatgacataactgaattgttattaaccacttaaaaatgaattataacaactggaaaaaaacataaaaacaatagaaaaacaatatttaaaaatccaaaaaagaagaaatataaaataagaatagtaaaccatttaacataacaacttgtttatatataacaaaaccaaaaaaaaacaagaaaatcaagattacatattgtccaccaaaaacttaaaaacataaaaagaacaccaatgtttgttccaaaaacaacataaaaactactaaaaactaaaaacaagcaaaatctgattgaaaatgacatatcatttcttcggaaggctaggaggggcctcagattcactttcaatgttctcaagttgcttcttcatgccataatgataaaatgacacagccaaacgatcgcggtgaacttccacatcaaaattagaggatgggaagggttcgccatcaataaaatactcagcaa

SEQ ID NO: 232076 - DNA, 3424 bp, Cannabis indica
cagaagtcattgataccttgttttgttttgacatataagaccaagactagaaatccacatcatcactcttcctttgtctcttattatgtctccttattagtattactttcctgaggcttttgtgaccaaacttctcttctgttcaatcaatttttgtcttttcaatagaaaccctcaaatatcaaaagaatactatattattagtcaaactcatacggttggttagtagcactgttaatctgcatcttcccagttgtttaattttccttttaaacaaaagtaattaactccttattattggtttcattaataattatacaagtcattaacttttcacactataaaaataaagcacactcatcatcaagtttctacttcccctatttctctaccacatccttgttttaaaatagtggctttccgtttaaacaaactcagttttttataagatttaagttttgcaatgattaaataagtctaggccaaatattagattaccccaacaagtttttcacttatatatagttttatcaagagcaaaaacaacatttattattagagttttgattttaccagtcactactgcacaacaagataagaactccacaaagaatacggtgtacactaatatattgcatccggtatttacttttaattatcgaaaattataaattatagtatttagatacacataataataatttcacctaataactaattatattttttctttaatttttaattgtatcacttttaaataatgtagaaaaaacttaacataaaatttagtatacgtgccacgcataactttttgctagtatatatatatgggtatgtattttttttagtgactattcatggcaatcaatcactgagttcatgcattcataaatttgtgcacgtttttattaaaaaagaaaaaacaatattcatgtacatataataattagtgcaattctcttttaagaaaaaatgaataaataaaaaacaatatagatttatgaaggttcatgatgagacggtagtggtgatattgtgtgtacagttcatatataatttgtttccacccatgtgtaattaattatttaattataaagccaagctagtaaagactacaacacttcacccactaaagttgaacgagacaataattagtaattaacattatgactttaatcaaatatatatttatatattttaatcataaacgacaaaatgctgaaccattatcgggacaaagtaggaattgattaatttattttcttcttaattagtctctcactaataataaaatttaattcgactaaatactaagaaagtagtacagtaatttcctcatccgcagtgattatgttgtagctaattgcactcaaaaaaacacttatatttaattccaaatcaaaattcttgattaattaaacaaaacctacattcacttaaaaataaaaataaactgcattttcattgatgtacataagattaaataatcatactatacatctacattaatttaattaattaggagtcaacgctttgtttattaattaaatatttgaaacattaatgcttacaattctccaatttaacatgtttttttaggaacatcatgttgattaaactaagaatgatcatgaatgggaatcatatataaggggaatttcttctctaaaaaaaataaaaaaatcagcacttaaactagaaactgtagcacttctagctagttcataagctaaagcatgatgttgctgaaaatacaattactaaagtgcttagttaaatctaaaacctaaaaagaaaaattgagaaaattctaatgaggatatctttgctgcgaaaaggacttcacaacctgcgcatcttgacaataaatgaaatatctccccattggttttgcttggcccattggagcgcaaacagaatttctcaagtcttagctttgagagtaaaattgtgactaattataaattatcattcctgtattgtgactaaaagatccgtcgctaaaagtactagtcacaaaaattacaatttgttgtgactaaatgtatttttagtcacaatactctttgtgactaaaactaaattagtgacaacttgtatctaaatactgtccaagaaagcatcactcaaaagaatagtggtgcccgaccctttacctaatctcaagagtttgtatgactagaacaaggcaaaagaaaggtatcttcatggtgttgctgaagttctgaataattgtccattatcaagatagagatgacactacaagaaatgcgacttttgccagcacatttttatgttggcaaaaattagatattacgctggtaaaataggttttacttttgccagcacattttttcactggcaaaaggggttggtaaatctatgttggtattggaacttttaccagcacaaaacgaaaagcattggcaaaaaaaactttttccaccgcgtaaatgtgttggtaaaaattagacttttgccagcacaaatgtgcgctggcaaaagtctaacttttggcaacaaaaaagtgcgctggaaaaactcttacttttaccagcacaataacgcgctgggaaaagtacttttactgacacaattttgtgctggtaaaaagtattaagggggagggttttatattacttgtaatgccaacacaaatatgagttgcgctagtaaaaatatattttgtcagcaaataggtgctggtaaaagtgtgacctttttgccagcgcagttcatgagatgtgctggtaaaagtaacttttaccagtacattttgcaaactgcgctggcaaagaggtcaaagttttaccagcgcacatttgcagtggctaaatgttcaccatggtaataccaattagtataacttctattgaaacctcgtaaatattacacatggtccttaatcattatagaacttttgccagcataaaatgaaaagcgcgggcaaaaaagacttttcccagtgcgtaaatgtgctggtaaaagttagattttagccattgcaaatgtacgctggtaaaactttgatctctttgccaacgcagtttgcaaaaagcgctggtaaaagttacttttaccagtgcggtagcaaactgtgctggtaaaagtgacattttttgtagtgccaatgattgtaataggttgtctaaggctcgtttcgagcttcgttgatcgctatctgagttatattaacttttcgagtattttgggtataaatttctaatcacaacattgtaagttttatgtataaacatctaattaaagtgtgattagagatatgttttaaattgttaatgtaattttataggttgttttggactgtacaaataacttgcactttgttagataccttattctagccaagaagttatcagttcgatatgtgcatgcacttgatcaaattgttgatgctttaacaaag

SEQ ID NO: 232077 - DNA, 874 bp, Cannabis indica
aggccaaccgaaactagcccagcaggctttggcaaagtcgcaggttatgagcaggtgaatggcagtttctggatgtgctttacataccggacattggcttgaaatagggacatgcttggtgacgagattgacacatgtggggagagaatctgagatgacacgccacaggaaattcagcacctttggtgggattttcaggtgccaaagctgtctccaaaaaccagagttgtcgggttgaggagttgctgctggtttgtgttgctggagcagggaataggcactgcgcacggtgtagcaacctttatggtctgctgtccaagaccagaagtcagcccctgcagaactactcaaaggtataccgagaataacattagcctcatgtgaaggaaacaaatcaatcacaacttcttcatcccagtttcgttcgttgaccttgaaaagagaattcacaaaggtattttgaagacttgggtggctagacacaaggcacttagtatgttgattcggtagccaaggagtaccaaggatttttgtgcttagtccatcaccaattgtacgaatagctccaagacgaaccacatgttgggcgccccaaatactacgccaaacaaagcttggattattaccaagttcggctgatagaaaatcagtttgaggaaaatattttgctttgtaaactctagctgcgagagaatttgggttacacagaagacgccaaccttgtttagcaagcatggcaaggttaaagtcgtgtaaatgtcgaaaccccattcctccttcttctttaggcttagcaagcctgtcccaagacatccagatgatacctcgaccattgctattattagatttccaccaaaaacttgccattattttt

SEQ ID NO: 232078 - DNA, 656 bp, Cannabis indica
ttctttttttttcattatctttttgaaacaaaatttttaatgggttttgatcgaaaatttttcttttccgttttaattgaagatagtagcattagatattctgcaaatgaacttattttggaaatgtagccccattgttcagaggctttcagctgtgctttgcagttggttgtgtttgtcatttttctctagttgattatgcttttacaattaaggagcttcaaattcagatgaaaacagaaaacataaattcacaatgagagattggccattgaaggcttgaggcaaataaatagaccttttctttttgtgtcataatctcaaagttggttggaacttagaaaaaggaaaaaccagtcaagaaatgtcaccgaattccttcatttaatccgaccaacaattctcactataatcacaaccggtatggttcttcttcaaaatttgttactaacagactatcagtaaggtatataaattagacttaatcttaaccaagttggcaagcaaactctttagtcttaaactacctattcagaagctttggttcagcaaactgtgtcttccagttcattttaacatgattctaataaggccctcttcagctctttctctcttgatggaacttttaagtcacttgacaccattataaatttttt

SEQ ID NO: 232079 - DNA, 1232 bp, Cannabis indica
tctaaagttgtataagtcaattgtctttgtaattgttgatactttattaattgatttcattctctggacgtgggctcgcggtttaggagtgttcgaaagaacactaataccacgtacaaatctcttgtgtcaagttatttaattttctgcaattatttttatattctttctgttctgttttgtcgctggaaaactggttctgcagtaacagaattatattctgcttgtgcaaacgtatacagttttatattttcatatatattattgacatttgcaaaaatttagtttttccatgtgatcttagagctagtataaatttaatgtcactttaggtatttaaaaagttgggtattggtgaagtaaagcccacaacaattttgttacaattggcgaatcgatcattcacttatcctagggaaataatagaagatgtgctaataaaaataagtaagttagtatttccagctaattttacggtactagtcatggaagaagacaatgatatgacgttgatccttgggtgccttttcttagtaaatggtgatgcgcttatagatgttcgaagaaggtcacctaaccttgagtgccagtgatgaagaaatcatgtttgacatttataagtcttctaatcaagctactactgagaacatatgcaatatggttgagcctcgtgactccaataaagataatagagagactaacaataaagaaaagactaagaagcctagaggtaaaaagaaaccaaaggaggacttcacaataggacaacaagtattgatgattcattcaaaattcaaatccttgacaagtaacgttatttcaaggtggaaaaattctcttaaagtcaatgaattatttcattgtggccttgtaagtattaaaaacgataaaggtaatattctaaaggttcacaggcgtaaactgaaggcatgcactactagagtgatgactgaacaactccgtaataaagaaacttgaagcaacaacaatatctagctaaagacgataataaagcgctttatgtgaggcaacccatacattttttttttcgttttttagttttttcatttttatttttgaaccgagttttattttttttgtaatttttatattttatttagtcgaggaatcatgaaatatgtgaaaaaattagcgacgtgttggccacagtaagtgacatgtcacctggagattgaactaaaaaaaaaagctaagtttaatgctacttttgc

SEQ ID NO: 232080 - DNA, 1267 bp, Cannabis indica
ttctctctcctttgtggtggctttcccatggcctcacctttcatctcttttctctctcctctatggtggctctcccatggccgcaccattcatctcttttctctctcctttgtggtggctcacccatgggctcgccattcttctcatttctctatcctttgtggtggcttgcctatgggctatccacacctatcttttctccctcctttgtggtggcttgcctatgggctcaccactcctctattttctctctcctccgaggtaacccaccttccttagcctacaagaaggtgattttcccaccttggacaccttgaaagtggctcacacacctagtcctccaagaagctggctcaccttctttagcctccaagcaggtgttttgcctacctcggaccttgtagatggctcgctcacctagccctccaaggaggtggcttgcattccttagcctcaaagaaggtggtttgcccaccttggactccttgaaggtggctcacccacctagccctccaaggaggtgtctcctgttggtttgaacactttgtaaatatttcaaacacaaggggaaaatggtgaggaagtatgcgtatttaagaacgagccagaagatacaaccatacttcctagaaaacttgaggaagtgtagtaaacatacatgaggcacatacgagacaagtagtggaggctgctctccgcatgttaatatgacctgacgcccgaccaccactacctccgctccactaccaactgaatctgccacttgacaccatcagagtagtagatggtcctcataagtaccgcataaatatcaacttgtaaatttctaccaatagacctccccctctataaatacccttctcttccattggtcatcattatgatataaatcaaatctttatagtcaacgacatgtttgataaaaatagcttaattacatatcagtccttgtcatatataatctctactatatacaacacattcacttagatgtcatgctacatcagtaatccgaatcaagattacttctaccgaataacaagcatcaacaaatcgcactatcaaccattaattgaagattcataaactttaatatgttactgactgtttaattcatggatatatgatcttaattctccgtacaatacaagtcgcggtctcatgtatgaataaagaattttttatatttatatttaattataaattattcaatataaaatattaataatttaacaatcaagcatatatgaaaatattcaactcttat

SEQ ID NO: 232081 - DNA, 1192 bp, Cannabis indica
tgaatgaatgatggatctttattcaatagaaataatcagtagtacacaatagaatgagcccaagattacaactcaacacaataaagtattacaaagaaatgtctcacattgagggaaatcacttaaagagtgatactcccttttacatttctccacacacactcactatgatcttggactctctctctctaaactgaatatatctaaagtatgatcttggagattagagatcagaatttagaactcagaagctcctttgtgaataaaggaacccctatatatagttgttggtgggtcccctttaagttggaattaaagctaactgttataactaacagcaactttctctagattcatttgataacatatagatagacgtactaacttgacaagttaagtgagtttaatcccgacaaaggtctatctctatctcattgtagtaggtctaagaataccattgctcattcttgcaaagaggacatttgggttagatggttcctatgttcggtagttggggcttcctttagattttgttacttaatcttctatgcctcttttacattttgagatcttttaggctttatgccagatttggctagctccctatccattcattgactttgtgcaatactctctaaagagaaaaggacattagaaaaataagtgttcatgacttttcaaattcatttcacaaactgggcatatagcactttcaacatacacattcttgctatgatcaaattatcttaagtaagaaaatttgtacgaattatctgccacaagataaagtaaagtttaggcaccatgagaacacaccaaacagctttaatactaaaaatgttctaaaattatatgttggctaaatctctggtcctaaggatggatattaataataatatgaatattattatatttaataattacatgtccttttttctttggaactatttctggatttgttggaaaaccatatactagaactaggggtgtgcataaatcatccaatccaatgacaaccgaccgatccaattacaattgaccgccaaatattggatatctaattgtgatcggatcggattggatgctatttttgaatatccaattggatcggatcggatgttggatggggtgttcaaaaatccaatacatccaacatccaatcgaactaataatcagtattttcatttagttt

SEQ ID NO: 232082 - DNA, 1003 bp, Cannabis indica
cacgatatggaaagcacaagccctgataaaagatattgatattccaactagaaaagtattagttcttgatgatatgggctaattcgttggcaattctgaaaatttttccccgctatggaggttgatagatcaccacctccacaagcacaatgagaggtatcttttagaactgtagagggttggggcaaacctctatagttttcgaactcaaataccttattcggacgtgctcaccagacttcatctttcttattgaattaaaagtggacacgtctcagttggtacgttctcttaacaagttacatttcaataataatgttgttttccctgcttgggggtgtgcacgtggaattattttggtctggaaacataactttatctttgaaagcattagagtgaagaaaaatcatattttgggtctagtctattcgggtctggctcattatccgtggctcctctcgtgtgtttatggcccccttacttccatgagaaaaaaaagattctggaatgatttgatggggttggggaagaggtttggaggcccgtggttgattttaggggatgttaattttgtgctctctcattctaagagagttgtctctaaagaaaaagatcaatttatcccaattatttctaagctgatatactctagtggtctaattgactatcaaaggggacaatctgacatgggacaatcactgtgatggataagcatacttaatcgaattggatacggggatggctaatgcttcgtggatcagtttattccctaaggcggtcattaattccctccacacaaccaacttaaatcatagattgttgtatttttacgcaaggtgcttggaaacaaactttaaacgacaatttaagtttaaagcttggtggactagagatgatcagagtaaattagtggtgaatcatgcttggtctactatctaacatcactgggcaccgactagaatgttcaaaaatgtgagtgttatgcgggtgggcctccttcaat

SEQ ID NO: 232083 - DNA, 1655 bp, Cannabis indica
attcttaccgttgccaatcattgataaaatgattccctcaatcttcatattattgtgtgggccacatggaatatatttctgttattgtattgtccaatagggtaatagcttctagcatattccattgtctatataagggaacattccctactgtaattgttgcagagaaagaggcattaaattaaataatattcagagctttattcccttaatttcctctgtttttctcctacttttaagcttggtatcagagcgggaaatccgcaagcttgaccatggaaaaccccaccatagccgaaatgtcatttgcatcaaatccagctgatgctacgcctgctgccgaacctatcaatacaccattaaacgcctctgccacaactatacagccttcaccctttcaaagcttagcccctcttaccataaagcttgaccgaaccaattacccctactggagatcacaagctcttcctgctctgcgtgcgcacgatcttgaaggctatgtgttaggaaccagagtgtgtccaccacagttcgtggacaacacagttggaggtccgattcctggcgagactcgtcaactcaatctcggctatgctatgtggaggcgcatcgatcaatcaatactcagttggctccttaattccatatctgagtccatgtttggacatgtgacaagttgcctcacatcatgtgatctttggatcactcttgaacgtctctatactactagctctaaggctagaatattgcaactgaggtttcaattgcagtccctaaaaaagggcagtcttaatatacatgattacatcttaaaaatgaaaatatagctgatggtttatctgctgcaggacaattactttcagatgatgatctcattttatacatcttgggaggccttggtcatgagtatgaagctgttgttgtgaatctaacctcacggcatgaccaagttactttacaggaggtgcaatatatgttgcagagccaagagattaggcttgaacaactcaactcaacatcaagtgactatattatgcctgctgctcatctcgcaactcaaatgcgcagatctctcaatatcgacaatcatgctcataatccaaatcagccctctggaggccgcacctacaactcccgaggtcgtggtcatggaagaggtcgatccaacaacagcagaccaatatgtcaactctgcagcaagcctggacatgtagcatcaaaatgttatcaccgttttgacatctctttccaaatccctggttcaagtcagtcatctgcctctcataacatcaacaacaaccactcgaataatgatcaacaagcctatttcgcaagcacagagactcaagttgacaattcctggtacattgacagcggagctaccaaccacaccacttctgaagcttccaacattcaacacaagaatgacatgaaaggtacaactcaattacttgttggcaatggttaccctctagccgtgactaaatcgggctcaagtaagattcacaatactgctggttatttggtgctaaatgatatactttgtgtacttgaaatttccaaaaaccttcattccatatctcaactaaccaaagataacaaagtatatgtggaattttatgctgatttttgtgttgtgaaggacctaatcacga

SEQ ID NO: 232084 - DNA, 1678 bp, Cannabis indica
aaactaattacgaaccgacacaatgggggctaatcactataattgatcatatcaatggacactttagtaaaaattagtatatataattctattaagagttcaatttcatatttatagtggagtaatcatagaattaataaacaagattatttgattgatgaaattcaataaataaatctagtttattggagcttagaagtatagattcatggtcctcagatcgccacattgaaacactgtcaaggggtaggataaatgttgtatatagaggtttagaaaaatctattttgaattagcaaaatagtaattatttattttgtaataaataatttatttatcaaattaactaaatagaaaaaaaaaacaaaagttatcgcgacaaaaggcacattcattgtcttaaataagacattggaggcaccacatgcactgtgttcagacacagtgcatgcatcccacatgtgtggggagtccttattggctttgtctttttggattaattaattaattcaatgaataaatatttaaatttgaaaagtagttgagatattctcttaagtggttgagagattctctcaatgagttatttgttatatttatataaatacctataatcgaatcagttatattgtaaattcaaataattaaatacgctttaataaatatatttgaatttaaataattaattaaataaaatctatattgtgtttattcaaatatatagtataataaagttctgaatataagttttagaatagaaattttcacgtaacttttttgaaagcctaaaaaagagtttttaccaaaaacttttttctctctatcacatgagaaattattcttgctcatgtgttgagatatatacaagaactattgaccctctttgttttgatgattaacaaatatttgattattattttctactaatgatttgttgattttgtagtacaaattaaagataattaagcattttaaagcaaaattaactccaatggaaaaatggtaatttttaccaaaattctcgaaagtgattcaaaatagatttcaagactcaaggaacttaagacaagacttcattatagtttatttacaaatcttagtcttgtgctatgatttataagtccacatttaaaattttctaagtatgaaatttggctcactaacttgtgcagcaagttattttacaaaaataatatttaaattttctaaattaatttttaagataacatatcatttaattaagagaaggcaactgaaatttttgaaatcggataaatgagtaaaaagttgtgcacgttttagttcaaaaaaaatataaagccatccaaaattatggtttccattcggtattccggatcacggcagaatgcaccttgaaaattgtgttaacaactataaatgattatatttcactccaatactatataaactcgttttttactcaaaaatcaatgttggttgagcatttattttatataccaaaaatattcaagtgattttaagagctcctaagtctaaaatctaacaaaatatttttcacacactttgagctaaaacttgtacttatttcttctaagtgtgcttattaatcattctaggttcttaattgtatcattatactttaagagtgagtttgcttgtaattctaaacacattttcaaattgtgattgaggtgag

SEQ ID NO: 232085 - DNA, 1375 bp, Cannabis indica
aaaccagattattcagcaaacaaaagagatataaggacccgtgttttggtgctttggccgaaacaaatcaagaggaaggatcaagattggttttccaatttataagatatagtaagtagcatggatgtaaataatgatataattatatacggttcatataggtccttgtttctatgacgatgctattttgtttgtacaaaagagttttatgagcgatacaactatttgattcataaaaaaaagatgcaaacatatccatgctaaacaaagcatataagttggcaattgtagagatcagtctcgccgcctccaagacgcaaagacaatccctataatcatgggattgaataagagaataaaggaaacataccttattttctcattccttacattgtaattatagaattaatgtagttttctattttattcattatagattaaggaaaatcattctttatgtattaagcccctataaatagtggcgtaatctcactatggaggggaatgaaagaattaatccagaaacacactcaagagagaatagtgatctaagagagaaaataacacagagatccattgtaagagctttagagaggaagaacacattattccttctctcaagtaaatacaaatacaaggggagtaggctattaccattctcacgggaccgaacctctttaaaatctggtattcttttttactttactatttttgctttcttttatttatcttatttaatcgctttattttgactcactattgttggccagaagcgaggtcaatattttgatgctttcattaagagaaaaaacacaagcttttgtcttgatcttgacatgtgaacatgatggttgtacaaactcaaaggggaggccttactgatcaaggcaatccaatggtgacagatccaaacgtgcaaactcttggaaactcgagaggaccaccatggactaacgccgaacaagttaatacacaaccacctacggtaggcatggagtgaattcccctctgactgggttcacaccaagtatataagagactgggaacactagtagggctaccgattagaccactcccagcaccgaggtgccgtaaaatggagtggagttgcagaaagaagaaatcgcacgcttttggaaattgttaggtccatgcttagctactcaactctacccacgtccttctggggatatgcaattcagatggcaactgacattttaaatgttgttccatctaaatcagtccctaagacacctttagaattatggaatggtcgtacacctagtttacgccattacagaatctggggtgccctgctcatgtcttaagaagaaagatggcaaacttgaaaagcgaacagaggtttgcatgtttg

SEQ ID NO: 232086 - DNA, 1991 bp, Cannabis indica
ttttgtatatgtatttttttctatgtatgtaattttaaataaaattaaactaatatttagtaatataaatacattccaaaccaataaatcatcacataaacttttcaatgtattacttaaatattatgcgtcttgcatttttagatgcaaaagtattaattaaatttgcataatcaagttttgcaactaaatcatttttaatggataacatagctaaaccgcttaatctttcttgagacatggttgaacggagataagatttgatcaaggtcaatttggaaagggtgataatatttaatttgctattaagagagttctggatacttattattgagcttttggtcaagtcctcaacctggataaatcaatctgtcatgtctttctccccgaacactactttggcaacccaagttttctttcatcgacatctctccatgccgatccaggaatgttatgaaaaataccttagctgtcattgtattctggaagagataagaaggaactctttagcaacatcaaacagaagatttgaaaacttatgcacacatggagtggaaagatattctctacaggtggaattacaagaaatgttacttttgccagcacatttttgtgttgacaaaagtttggtattacgctggcaaaataaaatttacttttgttgtgttggcaaaaggggttggcaaattaatgtttgtattagaacttttgtcagcacaaaatagaaagcgctggcaaaaatgacttttcccaactcgtaaatgcgctgataaaagttagattttagctactgtaaatgtgtgctaataaaactttgacctttttgccagcgcaatttgcgaaataacttttaccagcgcaacagcgaactgtgttggtaaaagtgacattttttgtagtgtggtcgagaagtccttctcaaagctgtggtgctatcaatttctacttatgctatgagttgtcaattttaccttttatgatataatatgatatgataataactagctttttcgattaaggtataatttaatagtgtcaaaacataagtgcaaaaatttagaagtattcgtcaaatttaatctgcaatattttgcttacagtgcatcagcacagtgtacaaaaattatatttgggattcactctgcacaataactcaaattcaatccaattcgtaaaattgtggattgaattagttaccttttaatattaaactatttaatatttattaaaaaatatttatttcacataactaacaacaaaataaaattaattattgttgttttatgtctccagcaataaaattaaataaaaaataaaaaataaacaaattcgaaggaagaaaaaaaaaattgtgtaaaaagaatgtttaattttattttaaattgtatgtagaaaaatatatgggtacctattcaatggttatattttttttttgtaaccataatggttacatttttgttgacctgtaatagcaggttatcaacatgtaaaaattctatttttaaaattaaattagctataattaactatttcttaaaatgaataatttttaatttgaatatttaataagaccctttttagcaattaatattaataattttatttttatatttaagtctctattataattttttttaacaattaaaccatttaattataatatctacaataaaactctattaacttataaaatttaaactttcaccctttctaaaatatatttttgaataattaatcacaaaatctgaggatagtggaaaatactagaatataagcattcatgatttatccatcatgtctaaacctccattttatctgtaaatcgttttagacacaacttgaaaataaactaacaatttcatatatgtatatttttatcagtaacacatattggagatcaataaccagtaaataatgtactaactttgtagacgatatatagtcaaaatcaataattaatagggtaagtggcggcaaaacccccaaaacat

SEQ ID NO: 232087 - DNA, 1235 bp, Cannabis indica
gatagagtgtccttgggcggctaaaccagatggaaaagaagcaagaaaaacagttttgaaagacaagaacttttggccaagtttaatttatgctattaggtacacaagccctttagttgaagtgctaaggttaacaattttgaaggacaagaacttttcgccaagtgtgatttatgttattaggaccacaagccctttagttgaagtgctaaggttagttgatggtgataaggaactggctatgggatttctctataatgcaatggataaggcgaaggaaaagttagcaaataatttgggtggagaagaaaaagattacaatgagatatgggaaaatcattgatgagaaatgggaatttcaattacattaacatttgcatgtcgctgcctactatttgaatccctgctgtcattatgcagaagatttttccaaccatccagaggtcaagttgggtttgttacattgtatggacacttatctcagatcccaaaaaaaaaagagaaaaagctgaccttcaatgtagcatttttcacaaggaaggcttctttgaatttacccaagctaaactaacatttgaaaaacgatcactaggtaattaaatgtctaaatattttactaatgcttttggaaaatttcttagcatgttttctaaaatatttattcttttaatgtccaatttcagtggattggtggactcaatatggagatggatgccaaagttacaaaaatttgccatcaaagtattgggtcttacttgctcgtcataaagatgcgagcgaaattgaagtactttcaatcaagttcatacaaaaaaaaaaaaaaaaagaaagaaatcaattgactacccaaagaatgcattctttggtatatataatgttcaacaaaagattgaaagacagatatttgaggttggcatctccactgtcaaatgaagatgatgctttgttgcttgatgagtttccatctaatgatgaatggatcgttggtgataatgaaaatgaaaatgtgcaaaggctaagtgataaggagcttgagagattggaattaacccaattaaaccaaaaaaaatacaagtgctccagaatctagttcaagagcgggttcataaactctaattcttggtttagcttatatcatatatattacttatttcaaatatttattagtttgtatttttttctcaagaaagcgaaagaatctagaagtagacatggatgaagatgaatgggaggat

SEQ ID NO: 232088 - DNA, 781 bp, Cannabis indica
gagctttccattttcatctcaataaaatttagcattgtgatctattatcattccacattatatattttataagttggaaaattatttagtagaagcattacacttgtcataccatagagtattttctactttagatatattaaaattataaactatttttttaatataatagtatgtgtattatagttctagtagactgtctattttctctattgaaaatttaatatcatgatccatcgtcattctacttacattttataagttggaattatttggtataagcattacccttgtcatagcatggtaatttttgttttcaatatataaaaaattataaactaatttttttataccatagtatgcattataattatagtaggcgttctgttagtttaaaaaaaaattgaataatttactatactaaaaatatgattcaaatagtaagcagccagcgtgctaattttattttatacatatgtaattaaagtattttaaaatttatttttgatactatgaatttaaaaataaaaaaacctcaagcaaaagtgatctgtgactcattttaaaagtttcccaatttttattaggattaattcacaaatacacaaaaataataaaaaaattataaaaatacggtttcatgaaattttaaatatttttacgaatttttttttatttacaaaagatacggtctttttatgttgtagtcttgttaatgtattgttgattttttgttatttgtatgttattttttgtcgttattttgattgttattttcatg

SEQ ID NO: 232089 - DNA, 873 bp, Cannabis indica
ccaaatcaaatagaacaagaaccgcaaaatgcttgtttccttaccattaacttaaatatcaagttcattcttgctccaccatttgctatggaagatgaagcatttttattcaatgacaacacagaaaacccaactacttctatagaaaatgttgcgagaattttatacgacacattgatgaagagcaacaacactcaagcccaagttgccattcaagatatgtttgatgcagtctttcttccttctctctcttttcttactgatgaaatcattgattgcggtagaaaggtggtgaacaacaaagagtattataattcaaatgaagaagtcggtgttgatgtttctattaaagttttagttgatgaactacctcaatttgatttggattacgatgatgatattgatgttgatgatgactacaatatgaatgatgttcctattcgttttgtggcggcgagtgaagagtcaattgaaaaattagaaaaagtgcaggtaaaagataatcaaattttttgttcaatttgtttggaggatgtttcaattgatttggaagctgctaagctaccatgcactcacgcgtatcatgaagaatgcattgttgagtggttacaagttagtaaattttgtcccaattgtagagttgagatagtttaataatcatgtggtacttaacaaatttttagacaacatatatgtatatatatatatacatatatataaagattattttcattattatatagaacgttaacgtttattttttatcaagaagaagaatattcattattaatcaaacaaacagattatacatctcttctagtttgcttatgactaagcaaataaactctagcttcaaaagtacttcttatctgt

SEQ ID NO: 232090 - DNA, 894 bp, Cannabis indica
ttgaacttttcaaaagttctagacttcttagccattaggtaagtatgactgtatctagaataatcatcaataaaagtaacaaaatattcgtaacctcctcgagtttgaatattaattggtctacacacattagtgtggattagctcaagttgttctttgattctatttcctttagcagaaaaatgtcttttaatcatcttggcttctagacaagattcacatagcagaagaattctaacttttagtcctctcaaaggaccatcatttgttaattagttaattctgtctgggtcgatgttgcctaaacatagatgccatatcatcatcatcagaaaccttttgcttcttattttgttgagacaatgctactctaaacaattcattatttaaaattaatttctcgcttggtttgagcacataaagtccattctttgctttgcagaataaattggcgttctaaacttagaaataataatttcattattaaaaaatttaatattaaacgcaaaagcgataaagaaataagattgatatacaatcaagaatgaaatacacattattcaacaataaaaatttatttttaaagttcaaatggacttgatcaacacacttagtcgataatgtaaaagggaaatttacactctatattatttttctaattttatttcaattttactgtcactcacgcgttttgttttacttttttactgtccaatttattacactatatgccgattttgaataaaaagttttattattttattttaaggaacgtggcagcacatgtatattataatgcatttttagcatttgtaaagttttgtaaaatgtgtaatttgattgctctttcttgttttgtcacttttgtgacagtttctttctttttttttcttt

SEQ ID NO: 232091 - DNA, 718 bp, Cannabis indica
ttatttaattttttttttaatttatttttcaaacaatctaaaaattaaacaattaattatttaactctgatcgtgtttctaatggtaaagatgtctgattagaatttagaatattattttagctgattgctattaataaaattgtatgatttatttaaaaaaaataatcaatttcataaatagaatataaaaaagaaaaaaaaaagacttgatattaatctttcaatactgttaacttcttattacgtcttaattaatctcttgctagaaaatatatgtcaaaatattttttttatgatgttgtttgttatagttacaatattatctttgtaaatttttaaattttttaaataatttataatgacaaaaataagtttgaaaaaactggtagactaaaatatgtaatgaaaataaattttaaaaaaataatattttgacatgtgctttcagatataaatattagaggagtgttaattacaagctactattacaacctcttagtcaaccttcacgcttgaaatcacatgtcaaaatattttttttcaatttttttcatagtaatattcgttcccgttatagtatcatcccggtaaatttttgaaattttttaaataatttacagtactaaaaacaaagattctaacatttcagtttagtatgcgtgttcaaaaaacttcaaacctattttgggaacgataaattattcgaaatttttcaa

SEQ ID NO: 232092 - DNA, 1000 bp, Cannabis indica
acataacaaatgcaacaaatgtagggagctgaggcacaacaagagaacatacaggagaaaacatcaaaaataaaaagaagcagaacaactaaaaaacaccagtggaacaacggagaaaaactgaacatatattggagcatacgatattgaaaaaaataacttacatacaaattttattattttcatattactatttaaaatagaccagtataataatattttgaaaaatgtgataaaaaatgaaagaaaacaacattaaaacaaccttaaaacaacaataaaacaaaccagcaacagaaaagggtaagttggagaaagatggtggacttggaagtacggtagagatggagctaacgatttgagatcaaagacaccgaatgacataaacttagtggaagtttttgaaagatttatacaaaaagttcatcacagagcaagctctctatctctctctcacacacacaaccacactcttatctttcctgattcttcttcttcttcttcctctttaacatgctgttgtttttgttacctactacaaaacgagagggttagcttttatttggataatattgtagacttggaaaaaaaaaagcaaaaaatgaagaagaaagcaaaaaagcaaataatgaaagttattatacattaccaaaaaaaaaaagataatgtgtagaaatttaatttttcatgattatattttttaaaaaagaaatcacaaaagtgacaacagatcacatcaaaactttttcaatacaataaaaacttttataattagtttttttaaaaaacaaatatatgtcactgattgacgtgataattaattttcactacaacaaatttggttattaggggcggacctattaccggcgggaaaggtccgcccctaataataaggttattaccggcggatgtgggggccgccggtattattccaatttttcagatttttgttttttttaaattaaataaaataataattagcggcgggcatttggtaata

SEQ ID NO: 232093 - DNA, 1755 bp, Cannabis indica
attctttggactgcatcaggtctggtacctctgtacctcggtttcatcccaatgaatgggtgaacaacactttcttccatagagcattttgtatggtgccatgccaatagtactttgataactattgttttacgaaaactcgatcagaaggagatacttattccagtaacccttaaagtttattacacacgcctgtagcatatcctcaagtatctgaatagtcttcttagactaaccatcgatctgacgatgaaaggttgtactgaactttaatttggtacccgttaattatcgcaaactctcccaaaacttggatgtaaactttggatctccatctgagacgatcgactttgaagcaccataaagtcgaaatatctccttaacataaagattaacatactgatccaccgtatacatagtttgtactggtaaaaagtgtgccgactttgtatatctatccataattacccaaatagaatataagaaccctactggtttagaaaatccaaccacgaagtccatggttatatcttcccacttcaactcaggaatcttcatgggttgaagtaaacccgctggtctctgatgctctgccttgacttactaacaattagacattttaacacgtactctatagtgtcacctttcatacctgtccactaatacagggctttcacatcatggtacatcttagttgttcccagatgtaaggagtatggtgtggtgtgagactcatctagaatctcctatctgacacctttgttggatggtacacaaatcctacccttataccataataatccgtctgatgaaattgaaaagttctttctcgacccggcttcaagcctttctttatacttttgtatttcgggatcactctgctgggttaccttgattctttctaacaaatcaaactgtaagtgatattagcaagttttccaactgcaaactcgatccccgctctggtcatatcctcagccaacttcgatgagatcttcttcaattcatagacttactctggacctttttgacttagagcatctgctaccacatttgcttttctagggtcatagagaatttcacaatcatagtctttaaccaattctattcatcgtcgttgcctcatatttaaatccttctaagtgaaaaagtatttgaggcttttgtgatctgtataaatttcgcaccttttgccatacagataatggcgccaaactttcaaggcaaaaaccactgctgctaactcaatatcatgggtgggataccgctgttcatactcattttgttgcctagatgcataagtatgaactttttcggactacatcaatacgcaacctaacccttgtttagaagcatcataataaatcatgaatttctcatcactgaccggaaaagttaacatcggtgtagtaattaatctctacttcaattccttgaagctactcttgcacttgtcagtccaaataaacttacaattctttcgagtcaattctattaagggcgtagaaatcttaggaaacccttcaacaaaccttctatagtaacctgctaatcccaagaaacttctaacctcagttgcagatttgaattgaggccaatcccgaaccgctttaatctttatcgaatacaccaaaataccatctttattcaccacattccctaagaagattacttgtggtagctagaactcacatttcttatatttagcataaagtttatgctcccgaagacatagcaacaccatccaaagatgtc

SEQ ID NO: 232094 - DNA, 805 bp, Cannabis indica
tatagaaaaattacagttttacaaacattgggtacttatgccactaaaaataaacaaaataaacattgggattatgtgttaggctattttatgcctaagttcaaggtcaatttcataagtgttttctcagttaatgttgtcttttgaaatggttttacgcttgattttccttgtttcaggttcccaatgcattacagttcaaattgtatcgattggtgaaaagacggggcattctggagaaaaatctgctaaagctgtcagattagcattagtagtcgcgactagactgacccatggtcgcgacctgggtcgcgactaggaggcttggcagaaagggtgtattttccaattggcctatggtcgcgactagggctttatgtagttgcgaccatgagcgaaacacaggatttttggccagttttgaaatttcgtcattcagaggtagcaaccctaattcctatataagggactcgagttttatgacaaaatcatcaaagattagccccaaaaagtgaatgaaggaggagaggaggctattgtgacgatccggagcgcaatcaccaactagttctttcttaactcttgattttttttatgttaatttttgttctagatttgattatggatgttaatatggtttttatgaactaaactcccaattggggaagacgatgaatgtttattgacgttttgcttagttaatgacaattgttattccttttgtcttgtttgtgaaattatctatatttgtgtgtaattcatgtttaagattgatcaccttctacatgttctatgatctcaattc

SEQ ID NO: 232095 - DNA, 562 bp, Cannabis indica
gtgggacatattgttcgtccaagcccctccttctattcagatcatccctgagatcatgagctgttcctagtctgttgaatactaaaacaccaggttgtctcagtaactagttggtttggctagtcagttggccagaactgctaatctggccagagttattgggtataacccaacttgatgaattgcaagataaggtctggctgcctaccacttggcccataggtggaacctgtgcccagggattggactgctgaccgttcagagtttgggcagtatgcccagcaggaatatcttctgagccgcctagtgggatgctagaggctatggctggttgctggttagcaacttggtaggcccttcgtatcattacggtggcctatcttgtttagtcatcgatggctacctgttaagccttcaacatctccatctctcaatccctccatatagcgaactgatgccttttctcttcgaacgcaaggttcaacgtaacacggagcttttcctgatcatcatgaaaggtattagcatgaccttgcataagtccaagagcattacgaaggtt

SEQ ID NO: 232096 - DNA, 937 bp, Cannabis indica
aagaaaaaattgtacttttgaaaatggtcatttgacctaagtacttagttatttcatcgaaacctttaagcgaggtccgcctagaaggtcatctacttaaaagaaatatttttgcattgtgtacttaaagtggtcatccgaccatgtacacttactggtagtatttcctcaaatgttccccatttcaataccttggtaccagaacgagctccatgtttttgtcatatcgtcccagcttatatgctcccaagtctataacttcgaccacctgatatgttccgtcccagttaggtctgagcatgccaattgcgttgtcttttgtgttcaagaacactcttatgaggactatatttcccacaaagaattttctcaccctaacttgcttgttaaagtatcgagccaccttctgttaatgtgctgctaactttaggtttgttgaggctcgtttttcttcaatttcgtcaagtgattctgctagaagagcatgattatcttcttgattgtaggttaatcttctgtgggacggaggttttaattctatgggcaacatagcttcataaccatattccattgctaacggtgtttgtccagttgctattttttctgttgttcagtatgaccacaacagttctggtagttcctccggccagttctctttagcttcttcaagtcttttttccatggtgtctttgagtgtcttattgactgctttgacttgaccatttgattgagggtgtgccactatagagaaactttttatgattccacgagtcatgtaaaaatctgtaaataattgattgtcaaactatttgccattttctaaaacgattttgtgcgggagtctgaaccgacatattatgttcttcaccataaagtctgttgcgatattttgcacacgcaagtatacgcaatcaagtagtaaatctcacacaggtga

SEQ ID NO: 232097 - DNA, 1597 bp, Cannabis indica
tctctaccccctcgggggcctacccgttcaaaaactggcccgattcttggcattcctccagcgttctgactatcagccctgccatcaaccgggggtggtacttggtcattcctacccctttggggtggattttcaggttgatgttgcctattaggggcatacggccctctggcttgataaccccccaactcaggatttggttggttgttagcccgactttcagcttcgtcatcaccttgaccgtcagggtagtttggatggtagtcactgttgacctcagggtcttctcttctccttttggacctactatttcttgggcgatcattgccatctcgtggttggccacgttgatcgcggggttgccactccctatgctggggcgtccttccactatttctgccacgatcaccattattgtttctagagtttcctccaccacttcgccttagacggacattgtgggagtcatcgcgtcccatatgatgaccgatgtggaaaatttacagcttaccttacataccaaggatgtggaaaatttcacattgctctgtacactacagtgaaaaattggtcagtcaaattggcaaaacttatagcaatagaatttacgacaccaattgcgaagaaatctgtcttattgtgttgtgcaatcaagaagcgggcttcttgctgtttctcttgacagctttggcaatagcattagaaatctctcttttccgcttatgttgatgtcgttgtcattgttgttattgttagcattgccaatgctgttgttgttgccacccagacttgctgagcaggaactcttgccttgaatttctagagcatcctttacaaaaaactttagcctccacaatgtggattcaatctgcaaacggaataaaatacccattttgatatcagcatgatgcattggacacaatataacaaaaatggacaattaaatgtgaaatgcaaatgaccacctgagcatcaatgtcaaggtccacctcttcagcagtagcttggaacccggattattttgagcaacaatctccagtgccttgctgagatcttcaggagacaatttggtgagagatgccccgagctttcttttctcttcaactgaaatttttctacattaatggtttaagataattagattcataaccatcaataataagtgcaaacaaactcgtgtattttcagttatacaagcaatgttcccaacatcctgataataaagttaccaggaattggatattatacacacaattgtgtgcagactgcatccgaagatgagacattactataagccaccatcatcaatttaaaataattgttcatagtacgtggtactataagccatacaaactcaaaactcctaacagtgtcaagaaaaatttacatccttaaaaagttcgcacacatatcaggcatactgtagaaacagttcaaagttgtgaattaacaaattcctggctcctgctggttcatagaggcaaggtaagattgtaaatcccccaccccaactctgtcaaacattctactctcatgctcacccaatacaaatagaatttagatatttaaatggcatttgatcacacatgagaatcat

SEQ ID NO: 232098 - DNA, 1511 bp, Cannabis indica
agtgcttctcgcaggggcctcctcgtggtccctgagactctttgtcctcttccgactttattttgatcccttctttctaaatttcgataacggaggatttctcttgcgtgaattctcccgttaatactatgttatctaacatatttaattaatagtttatatttatatcatatctttgtattttttgatttctcatgtaatataacttaaagaagatccctttttgttgtcagttaactaaaaatttttgcaaactatattcattcaaattatacccattttagtaaggagattgtctaatatacctccacatatatcacaacccatatacacattatcctccacatatatcacaacccatatacacattatcctctatatcaattcttccaccagcgagctactatctttgtcaccaccactaagcataccatcaaattaaaactataatgaattttctctataaaattgattaaataatgcgtgtatacatataaatactaaagtgttattttttaaaagtgtttttaatatatatatatatgtaagatattgaaaaagatactatttaggttaatataaattatgtgctagacttaagtggtgggtgaatgtatatggagcaacccactcacaaaagtagatacttttaaataaaatataatataaaaatatttttaattaatggatacagaaaaaagggataattgcgacaaaagttctcaaaaatttaggattgatgcagattagtcctcaacctcaaaaattgacagtaatagtccctaaggtcacattttttggaagtccgttggtccttaactgatttgtcaaaccttaataaaatattacatgttgatatattattatataattttaattaaaaactaatttaaaaataaaaaactcattatctaaaattaaaaaatattattttttattttcttttatatttttttctttttttttactgtttctctcgtcttcctcacctcactacccaaccactcaccaccctaaccttcacccgacccccatccccattacccctccacacagtggttcaagcttgtacttacaagctctgcgattatgaaaaccccaacccaaaaatatcgatccccctctcagtctctctctttctcctcgttttttttctctcttttcgtgtcttattggccgacattgacgagctgtctccgaccattattagaaaaatgggagacaatagctggactcatcgtacctaaaacccccaactcagagatcccgagccatgcgtcgccgtcctccagtcgcaagtcaatagtcggagttgaaactttgcgattccgttatggccactttaagttttatttagccaaacaatttttagaaatgagatctactctaagggcccgtttggttggtgataatgggccagaaaggaatggaatggaatactaatgggcctgattattttgtttggttgaaaaatatcaattttggaatagaattccatagtaatgctattc

SEQ ID NO: 232099 - DNA, 1447 bp, Cannabis indica
aaatccagtgtactaacaaatcatgggacttagctttaaaatatataatcatgattatttttcatcgtgtagacaacactataatcatgaataactatatgttcaagatttaatagaatttatacattaaacatataattatgaaagtaatcatttgaaccatgcaacataaaataatttttgatctttaatttattagtaaatttaattttattaaaataggttttatttagggcataaaatcccaacagtcccaacttacagcacctagaacacctcagcagcatagtgttgtaaagagaagaaactagatcttattagacatagtcagattgatgatatgttactcatcactgtcactaaacttctggggatacctacattttgtatgtagtacactcaaagagcataagcaatgccccaatagaattatggaataggacaaaacccaatttaaaatacttctgtatttggggttgtcctactcatgttcttaaaccctagattgggaaaattgctcctagatcaaaagtgtgtatgtttgtaggatattcaaatgaaactcgaagtgcctatttctatagcaatcaagtcaacaaatggtactttttttgaacatgactatatgaaaagtcacaaaccccagagtcaagtagttatcgaggaaattagaaatgagcagatttctaaatgaccaattttagcaccattagttgaatgaatgacaacggttaccacagttcttaaaaaggaaatcctggtacattatcatagtgggaggattgtgagacaacatgtctgctatgaacatgaagtacatgttcttgtctctaacatagacaaggaagatccattgacttactaataagcaatggaagaccctgactcatgacaagtagaacaatatcatggatcgagaaatggaatccatgcgcaccaacaaagtctgggaataggaaactccaccagaagatattacgcccatagggtgtaagtggattttcaagaagaggagaaatactgaagaaaaggtagagacctttaaagctaagcttgtagacaaaagctacacacaacgagaaggcgtcaattatgacgaagccttctttcatgtggcaatgcttaaatcaatttgtatttttctttccatagttgccacttatgattatgagatatggcaaatgaacgtcaagaccgcttttttaaatggtgatcttgataaagtcatttatatggaacaaccataagggtatgtgttgccaaggaaagatcaaaagttgtgcaagtttcttaaatctatttatgaattgaagcaagcctctagttcatatggaatatcacctttataagactattaaagagtatgtctttgaaaaaagcaaagacaaaacctgtatacaaatacattgaaggtattgtagtgctattcatagttctttatgttgat

SEQ ID NO: 232100 - DNA, 939 bp, Cannabis indica
caaacttagaaacactgattaggtttttggtaatctcaggaacatgaagcatgttatttaaaataagaggagaagcattgtgagtagtaggcaaaatagtagaatgaccaatgtgtttaattaacaaacctgtgccatcacctacaaccagctgctcagatccttcatatggtgagtttgaggccagattgtggatatttggtgtacaatggtttgttgccccagagttcggataccaattggtatcattttatcttgaagtttgagccaaatttgcctgaggagatggagcagaaggattcgattgcactccagtgaaacttttatcgaatctgtaaaagcaatccacaacagtgtgcccaatcttgagacacagttggcattggggtctgttggaagagttgcttgatcgacctcctctattaaagcctcctcgattaacctgagtgaagtgaggtacagaagaatgtggaactccatatccatttgccctaggatgataaaaataaacaccccgattggaaggagaaccccttgctacagaatactgaggagaaaaggttccaaattgcagaggaggtcttgaaggatagttggttttgttaaaccaattttgataagcgagattcacttcaggctgttgttcagtttcagaagtggcaagattggctatgggttcaagttcttgttctgtctttttgattcttgattcagaaacaagcaataaggcctcaatttctccaatagagtatcctttgatttgagtgtttgtcgatatgacaaaagtgtcatagttactgggaagtcctttgaatattgctgctatatgagcacgatcactaaggacttcaccaaccgaggcaaggagatcaacatgctgtttaacctgttgggttttatgccctaaataaaactccatttcaatgtaatctattttat

SEQ ID NO: 232101 - DNA, 908 bp, Cannabis indica
ttaaaattaattaattaattaataaataaaaaaataaatttttatttaattaaataatttttctttaaaaaaattaagttacacctcacctgccgccacggattggtcggtcggacggcagcagcgcatgtgtggtggtccaatgtgtgagtcctcaaacatgtactatatatacacttctaatgaagtgttcctatcccacgtagaactccaatcattcacacacttaacttttcatttttacacaatttcacaaagttccaacagattctctttgaattcttatgctcaaggtactaaagagagaatgttaggatgttcaaaggtgtcctttaaccttgattgtaatgaagataatcactagaggttatagctagaaattcactcagaaagaaataaatttaacaatacacgagtgcaaatggaagagttgtttgcattcttttaaaatatttctctctttaatatttcttttcctgtatttatatagttcaaaggagcacaaattgcttgaagaactcaatttctaaaaataccaacactagctgaccaagaacttgccatcaacctcggctagctagtagtaagtaacatgattttgtaattctgtacttggggtttggatttcaattatatttttgattcatatcaataggtttaagcctatcctttttcttgtgctttttttattaatctattgttcattttttggtaatttgttaagtaagtaagccatcatgctaattgataggttctgaagaaatctatacataattgataggcttgatactgtggatgagttatgtccaacttgctctatcttgggctattttcttttttctatgtctacatcagctgcagcagtaggcttcttcttattttataagggtgcgtttggaagtaactgt

SEQ ID NO: 232102 - DNA, 1110 bp, Cannabis indica
aaaaaaaaaaaaaaaaaagtcatctatgataggtcatgtgagtacgtttcgaatatgttgtcaaatgtttgccaaataactggaattaatctcaattaccctaattttgtaaattacttaactttaggaccttatcagttttcatttaacagtgtctttgtctagaaattcgtaaatattttgttcaaatactataaaaaaggataagatgtaaataacatatatatctaaatatttcccctctcatcccctcaaaaaaaagcataaatgtattagttgtctaatatataatataaacttacaatataattttgtgtaaaactaatatgttcttattataaacatgtacaaattacataatatgttaaattagttaaacgagacaaatccaaatagtctgttaaagcatggcatgaaaccacatgcttaaatgttaaaagtactctcactctcttttactgtactcactaaaatacaaaacgtttcacattttgtacgactatgtacttatcatttttatatacatatacatatctaaatctatactggatttttagcactactcttctttgctagtgtaaatgaaaattatgaagcaatatttatgcatgaaatttattatagaaaagttacaaaagatgagaaaaatatatatatatattaaatacatatatacatatatatatatatatatatctttatttgcgcatatattaaatattatgcagaccagaaaaagaaaaaaaaaatcagtacacatatactgtacatgaaatcaacttatcaataatgaaaccaatagattttttcatgaagggcgaaattatgaatactagaaaaatttaaacaataacatgattaataaaacaaattagacgagagaatcccacaacaccaagaacatacaaatatattatgtatgtatgaagggatgaaatgaactaattaacaaataggtagaaaatagggaaataagaaaaataataaatagcagatatataaaggcaaaattcatggaataacaatgctaacattggttaaaagattttattttataaaaatgaagggtgaaagggacttgaaaaaaaaaaaaacatgaaataccaatta

SEQ ID NO: 232103 - DNA, 1340 bp, Cannabis indica
tgccaaacagtaaatcgtttcttgggatcccgcttgggagaacgattcaacatttccactatttttttctaaaaatcccaaagaaatttgattctcaactcaaatcaactccgaatcagatgcgactctccataacacctaataacatcccaataaatatattgtaagcattaacaacaactggaactcaaaaatttagaaaatacaatttttgagccaaatttgagttaacacctcaaacaacaaacaccaatccctctaacaggtcttaaacaacctaaattaacctttgaaaagaatccacaactaccctaagttcgaacaaaacttacttctcccaattgcatgcttaaaccaacttaaaactcacaaaacataggggaaaaggagctagggttcttacctcgagtttagtttttcaatcctccttgaattcaagctaaaatcccttgataaatgatgaagaaaagggcctggttcttgatggttttccttagggttgagagagctagagttaatgatatttttttttttattttgtctaaatgaaataatcgttgtttcctttgcttttattctgatattaaataaactagaaaacacttaattcctctactaaaacactaaaggacaaaatcaatttctcttaggtaaaattactctttcacccttactacatgcttatgttatcttaaggcttaggtgtaaaatggtaaaataccacaaccccgcccacacctaatattccaaatgtcaactaaggttgccccgttaaataaaaggttgtaaactaaacccatgtgactctaatggtcaaattgtcgcatttctattattatcgagcaaaaatcataaaaatattaattttcacatgtatcacatataatacacctagagtttaattaaatctccaaaattgaaaaattataatcctaatgcctatttcttgaaaatagaacccacaatataaaagaatcaaatataatcatataatttagttaattaatgctaattaccttactaattccatattctaagtatgcagtcattacaaccacatccaacttgtgctgaacgagaaactgaaggggttgaacatgcttctcatggagcttctggccgacaacttgctgcatgaaatcacgaaggtaatctttattcattatatacatttttatttagattatgatttgtagcttttctaacttgtctgtttctttaggttaatctccttattcacatgtgaaggctatgtccgcctaggccaccacaaacagtgccaagttaaaaaaggctcaagttggccaaaagagttcttcacagccagtttccatcaagct

SEQ ID NO: 232104 - DNA, 1352 bp, Cannabis indica
attctcaactaataacaattaatcaaagatcattccgtgatcctgaaatttttttctgtgtttggtagagatcttgatgatcttttcaacgcactcagaaatatacatacttcaagtatattctctgctatattgataacctattggtacaaattaccataccaacttatagtgagtctcccgttgatgatgctaatccatcaacatctaagaccctcatatatttttcctgtcattaccactaacgttttactccctagttcatacaccaccattgctctcttacaatcatcactatcttcatacttggttaaccactctaaaacttattttacacttaattatatagtttgttgtttaataaacaacttactttgtgacccaatattcaccaatcactcaaatacatgtctattaaattgcatctcaattcataagcttttctccattctgggtgagtatgcctttctataattgcttaataaagtaatttttttttcataattttaatggtctccttatataccatattgactatccagtcaattatgaagtactctctatcattaccatattaccttaattaattcaggtaatcatctttaccttagtgatacaattactcttcctgatgttcttttatacgttaccctggtaacgtccccacttcaggccttcattggacccttacttccacagagatatggctcttatacacgagtgcatcactgtagctgcttcttggatagatgactggccccacagacaattccaagggtttaacattttttttttgctttgacttgcatgcttcattggaaaattttctaatgaaatcactccaagtcaaggacaatcaaccatggtgttccctcatggtaagctatcaaaacatgatgcttcttgctaacataggtagacccacgcctacctaatctcaaaattactacacaatcgtcgccttcaattcacctagtattccagaccatactcataaatagttccacctttgctaatgctagataacttttaaacaaaagattttgttatttgaatcaagtagatcgatacctccattaactagtcatgtcctatattccacttgggattaccagcaaatttaactcatattgtcattttcttaccctatcagataaactaccactatataacatacaggcaaagtccattagatcttttgatgtccccccaattgagagtacaatgtttaataacaatgtaaattgaaataacaattataacgtttctcataaattgtaatttgagtcggtcgaaggactgatactcaagtcgccttaaatcataagcagcacttgggcaggacccataca

SEQ ID NO: 232105 - DNA, 621 bp, Cannabis indica
tataagcacaaactcaaatctctccctaattctttttatcctcctactattctgaaaataattaaataatcaaataacattaaaaacaaatcaagagctcctgtggtgagatctaacagatcggtggtcaaaaaggatgacctcccatggtggtgagccatcgacgttgacagaactagaaggaggagttgtatggtgtttggtttattgctagtcgaaatctgccattaaagtcaacaaggtctacccttatctgtcattaacgtcgacaaaggaggctggacagagaagccgagaaggaaaacttcaagaacgagagaaagagagagaaaagctcttgagagtgtgagatggggctttggggtttcaggatctctgaaagacgactgtgtggtggctccgagggttatctaaaggcgaggaggctctcctgggtttggatcgagtgggttatctgggcaaataggtaacaaattctggagttttttcttactttgaataaaaagtttagggattattttggatgtgtttgatgagtttgtgatgaggatgactctttaaaaatttctgtaacttttcttattcatgaatcagatttttttatttgttgaggatgatgaa

SEQ ID NO: 232106 - DNA, 870 bp, Cannabis indica
gagcaatggagattaccaccgtcgaatagtgtcaagatcaatgtagatggagctatttttgcagataccaacgagttcggccttggtgttgttgttcgtgatgacaaggggttcttagtggaagggaagacaaggcttttccatgggaaagtggctgcggaagtggctgaagctttgagcttcagagaagcgctcagttggataaaacaaaatccaaattggccacaagttattgtggaaaccgactgtttgcttgtggtacaatcattaaggagctcctttagaatgatttctgtgtttggtgatttgattaatgattgtaagttgatgcttaatgatttatcttttatttcgttttcttttgttaaacgatctgcgaatgtggttgctcatagttttgctagagcgtcccgttcatatcctgatcgtatcttcagcttgggggatgtcccaactgagttgttatcgtgtttggtaacagagtttgatgcttaataaagcttgaattttcattcaaaaaaaagaattgtcattctaccaaaacggtgaaaaggtcattctattgaaattagaatagaatggagattgtttcatttcttctacattctattgtattacctccaactaaatgctactttttttttttaattttaagtgtttatatattacaatcatattttatctggattcgaacctaaaacatccaacacacacacgcccacctatggtcacttgagttagcctcaagtggttaactaaataccgccttaattcatattaaaacttacaaacattgcttgtgagaaaaaatttgagtgattggtaggttatcatttataaaccaatgttaatttagatattttagtttta

SEQ ID NO: 232107 - DNA, 1001 bp, Cannabis indica
atttaattagctctctctctttacaaaatttcttcccatgtagccatgtaggaattaagatttggtgatgtttgatatatttttgttagtatctcttctctacacttggccattgtgtagtatgtggttttaaagtttaggttagttttttttttttctctttctctgagagggtcttggtcctcttggaggagtgaaaatggttttggtttgtgggtattggggttggttgtagagtcatgaattgttgtgatgaatcaatagtagtttcatcatattttcatttctttctattattacataattttgtacatgtcttgcattgctttatctattcaacacagctatatcttcctctaaaaagaaagcaggctggctactatttgttaaatgactagtgactagtgaatattttttcccatttaaagaagagaaggtcattgtaatttcatgtcataaaagtaacaagcaaaacttgacctcattaataaaaacatgcccctctctttaataaaagaaaaaaaaaaaaaaagaaaagaagaagaagaagaagaaaaacatgcccttttgattctatttgtcattttatatgctaataattggagcaatactctccctccgttatattttaaacagtattactaaaatttaatttttctatttttcatatatattatgctttggcatagtcaccttaaaaatagagtaattatgttactacaaattatttttattcttacataatttttaattttttccaataaaaattatatttttcattaatttttttttttttttaaaaaatggaaatttacatgatgtactaacttttgctatttttttttacaaaaatactgtcaggcggtattttttacttttttactgtgttttttacaagtttcatactgcagtatactgtgttaagttttcactggtgttctactgttattttgacttgtcctgctttgtgttttacttttattttataaaaacacagtatt

SEQ ID NO: 232108 - DNA, 1458 bp, Cannabis indica
catctactttatattattttatattattttataacataaataatatttttagaaatcattaaccaaaaatataataacatgcattttcactttaaagcatgacatttaggtataccctttagattattttttcataatcacgtacgttgtagtttttatggacaatctgttatttttttaaaaaattgaatagttcacattgccgaaaataaatttaaaactattacttaatacgtgtataagaaaaaacaggttcacacgtaacaaaatatttgaatcttattttcggcactccaaattattaaatttttttaataggcaattttaaataacgacaatactcgattatgaaaaaaatttggacaaaaatattctctgagatgcaatcaaataaaggtgtcttgaaatggtcctttagtgagtgtactattagggtttatgccctaaagcaagtatgtaatggataatatattagagaatacataaaatactagtataagatagataaatgaatatgttgattatagaaatataattaataaatatctaaaaatttgatattcatatagagtgggtatgctcttgtaaggaagtgcaagagaattaagtttatacaatatgaataaaacaagtcggtagtgcattatagtatgaaatcttcaatatggaatcaccaagtacggtttatttgagcactatactctagtgcgtgtgatttttgattcagatttacatatgtttatgcatgactggaccaatatgaactaacatcttctagcaacgtgtcatttatcataaaagagttattcatatcacaacaatgatcattagtatatcagtcttaatcctaagtattcataaactcctatttgtgttcattaagttctttgattcactcgttaaagtttctcagagaagatgattcttacaacttctattttgggaacttaatagcataagtgactgggaacatactatacaataatagaatctaagcttttcgaaatgatagaatattagttttcttatatgttaatttcaggagtgctaacagttggattcaaatctataatgagattatagattaattgttcacattaaattaatgacacataaggaattcaagaaataattagaagggtaaaataatatttttgactagctctaattatgagctaataattggaagatgaactacttatattgattatatcatagaactacaagtaaaaattctgtaaatataattttatattgtcaaagagtgtaatttcatatttatagcagagtaataatagaattaataaacttgattattttattaaagagttcaataataatcaagtatttattggggatttgaaatataggtccatagttcccatatcacctccatacaatactgtacatgggaaagatgaattgagaaagaatgaatttctataagaaataattctt

SEQ ID NO: 232109 - DNA, 1466 bp, Cannabis indica
tatcattctgaggttgtcttgggatcagacttaggtgggacgacatagagtgtcgtttgctgtctccaaggcatatccctagaaggactcaggcaactgctagtaactaataatagaccctaccattttcatcaaaatgcgataccaaagttctggggaggtaagtttggatataattcaaactttaacttaatgatctttgaactgcataactaaatatttcttcacccctatttgttcgcaagatttttaacgacttaccttactagttttcaccattgctagaaacttttgaaatttcacaaacatataaaatttctatgcataacgtaaatatctagaataatcatctaaaaatttaacgatgactcatatccacctttgaatgtacatttataagttcaaatgcagatggacatacttccaagtggatattggcacattttctctttgcagagaatcttgtcaaaactactatgaacaagatgtaaataccatagatatattattgacattttagtcttttgatgttttgtgattcctaggtctagttacacaaatgtttttagaatagttcaaatggattttagtcacaaattcaaaacttatattccatacatttaatactatttggatccaatgaaagaaatggatattaaaaacttgtgaaagctgtatcatagtgtttaatgtattttggaaactaaaattaaaattttatttagaatctaaaatactaattcaactcaaagtctaagttgccttgtatgtaaacatttttaagcagtagattttttctaagatttgagggtggttatcatttctcgatagaatatttagaatatgttcatccgcgtcactcattttcttggaagaaaatatagcaatatcataagcatacatttataaaccttattctctaatgatgtactttttctaagaatttcttaatgaaaaggataagaagaaaactaaagagaaatttcaattaaaataaaaatccaataatgtttcgtttaggcaagagtcaaagttactcttattttattagttctccattatttcagtattgtaaatactagtctaggttgtcatctatttgtgatgactcaactagattttgtatttacaaacatctattggtcgagatctaacacctttagactgtttaatggatgaccatctattggggatgaatcccattaaaaacaatcaactaagttagaccaacaatggtgttcgaaaataattctacatgattaataacaaaaatcaatgttggttcaatataaattcaaatcacatattcaaaaaattttgaacacataattaaatatgaaagatataaaaaaatactaaaaccaaacatatctcaaattttttaagatttttaaataaatgatatatagtgtcttgtattgggcacggtgcaaagatatcatcagttaaatagagtagttagctca

SEQ ID NO: 232110 - DNA, 2239 bp, Cannabis indica
gggtagagttttagaaggtcagccctggcactttgcccagagcatcactatttctgttgctcctgatagctcttttcctcttacccctgataatttacactatgttcctttttgggttcaagtgtatggaatcccttttatgtgtaaatctcatgatctagctaggttcatagctatggaagtgggtaaccttattgagattgataaggacaccattaaggagggaactggtccttatatgcgtatccgcatccttctggatgttaatttgcctataagaaggggaatgaatatcaaattcattcgtaatggggagagagttcatcaaatggctggactttaaatatgaaagacttctatatttttgttttttctgtggaaaattagatcacactaaaaagtattgtgttgcttttttacaaaagtgtgatgagcttttatctgaaccattatgcccttataatatccttctcagaggtaaggagaaaatttcagacaaatctcagcctttccaataccctcaccttccaaccattattatgatgaactaccaacctgtgaacttaaatttacccccacaacaattctttggtcatgctatcacttttccatcttttctgaatcttaatgctaatttcactagaccttttgctcatccactatccactgctgtcatcatgatgcctacaccactaaatctcaatctttcgagtgttgcccaccctacactagacccacatttgacatttcattaaggccctctgcttttacttcatattcgactgactctctcatagtggctgctacccaagctatccctatgaccactatgtcctctggcctttcttcccctgaggttgttagtcatgttagtcaaatggatactttgtctcatgcccctgctgatagttctaatatgggcgttaacctctcccagggtcagcctgatcctgatgtttgagggaagggtttggcctctgctttcggtgttaagagaccttccttccagccccaccatgttgtggttggaagctctgtgaggtctcaacttaaacgtgctcgctctagtgaaagggaagatgagtcttctgctgatactactaatctggaacaggcgagtgatgctttgcacacccgcccagaaaaatgagtttgttaagctggaatgcacgtggattggggagtacgcgtgcattcaggagacgctccctgttggtgaaagagcaatgccctgatgtggttttttttcctatgaaggctattgatcgagttagagttgctttgggttttgacaatggtgtggaggtccctaggaagcatagtttttttgggggggggggggggtccttattcttttgtggaaagcaactgtttatataaatattttatctctttctagtagccatattgattgtaatataagctttaaggataatcatatgtttcattttactgtttttatggttgtccttcttcttcttatcgatctgttacttggaacttattggataaaatcttttataactcccctaatctcccttggcttatcatgggagactttaatatttttttggattttgatgataaatttggtagtaattattataatcttactgatatggaacaattttctcaatttctccataaattttgtctttctcctctcaattttgaggggatatacacttggcataatagttctgtgtgtgagcgtcttgattgagctattggttctgagccctgaaggactttatatcctaatgctatgttgtatcatctgtctttttatggttcgaatcatcgagctcttaaggttgttcttcaccctaagaatgactctaataggcttcttgtttttaaaaagcgttttcattttgaaaatatttggcttgaaaatcctagtttttatactactattcaggattcttggcggaattcttctcatccttctgttaatgagggtgctcttggtctctttctttttcgtcaaaactcctgtgtctctgctttgaaatcctggaataaatctgttaagccagttttccagtctcaaatccaggatattcaaaaagagattgttaggatttaatctttggcctctgattgtagagagtctaatattccagttaagtaccttcaatctcagcttgatgctcttctttacaaagaagaagtttatttgtaacgccttaatgctaaggcacgctacagtgctttttcaattattgtgcaatctttg

SEQ ID NO: 232111 - DNA, 680 bp, Cannabis indica
ggcttgttagttctgaggcaaaaagagcaggagtaggcccaatgaagcggttgaaccattctgtcaaaggatccatattaaaatcctaggcgttcccggagtactcgctgcaagagaaattgtcctgggcctcccttaggacctttttcaaagcctccacctccgcattccctttcgtatattctgccatagcgaagttgtgcttggaaatccggagctactgtctttcctcatcaccaggaacgggggtcaggacaatactcggaagaacagtgtactcctccgcctcgggtgggagccctgaatcagagctgagagccagagtgtcagctctcctgagcttcttggaaacctcgacctccaccatcttgcctttgcccttccggtccagaggggtgagaatctcgccctcctcttcctcttcgacctccccatcctcgtcaatcaaaacaatttggcttaagtggaggctagaagaaggattccccactactataaaaaatatatttagcaacacttaattaacaacacttgaaacaaaagtgttattgctatgtttattttactaattgaaaacacttttaacaaaagtattactaaaagattgtacatgacaaattaaatatttttgttattcaaataaaatatcatacgacaacacttttagaataatagttgct

SEQ ID NO: 232112 - DNA, 1532 bp, Cannabis indica
gaaacagagttttatttagggcataaaacccaacagtcaagcacaataactcctcggcctctagctcctagagctccccgtcaacgctagcaaagttctactaatgtaattctgagcaaccttagtcatcctctcactagtgaatgaacaagctccccagctaaacctctggaccccttgcctgaatgcctacgagagggtggagttctcctagaaggagggtccataatcacaggctggtcagccagaacaaggcctagaagagggggagacagtatagacagggtagcatcggaagacctggcagtccgggccaccttggcctgaggatggcctaaggaagggccaccaaaaggctctcctactaaatccctcatcctaaaagccatgtctgcaaaaaataaagtaacaaagttagaatacaagttatcagtattatatgcaagacaaagtaaaaaagtattgctatcaactaccatctacgggaaaatcatcctcggaagatgaatcatctgaactactatcactaacagttccgttgcctttgtctctagagggaggcagtggacaagcaggcctggcagagccttggcctcatgtcctaacagtaagaaggcattgtcagtagtaccccatttgccaaatgttgttggagggaccgatccctcctagttgtagccttggcaagtctggcaagaggaacatcatcatctgactcaggtgcaagcctttcccccgggctagcctcctctatcattaaagtctcatttgggcctctggaaggaccctcaactccctcaattctaaacacaagtggatataaaccatacctttaaaagttagcctcacaagccagcatgagtatgtccctcccctctataaggagggataagacgtgattagctcgatccatcaatttaataataggaatagagcaagagtatgtcagcacactctgaaagcggtgactaacagaccgaacgttctacgaaatgaggtagtttcgcgagtactgtctaacctttaacatgaccttactattggtgttacctaaccactagtagcccagctggctaatatagaagtatccagacaggcctttctttataacggacttcaagttgaagaaatactcaatctcatagtgtgaaggctgaggccagcccaactctgtttaaagaagaaaaagtgtgggtacttgattcctttcagagttatctgaatcagacacaacctgaagtatttggcaacgtccctaaaatacggatgcaagggtagtatagctccttgctccaagtgtggatttgacaaggccatccaattgaatcccaagcattgtgccaacttgtcccttgtgggcctctcatagaaaactcctctcatgagtccccgactcatgatctcatcaaagttctcgaaagataaagaggatggaggggttatccatctctgttgctcccctcgcttaggaatccaatgctcaggagcctcttccaagacatggtctatcctggcctttgacagacgaccaa

SEQ ID NO: 232113 - DNA, 952 bp, Cannabis indica
tgaaaaccaaattcgacatagttgactatgtggttgctgaagaaatggtagaaaaacttgaaaacaaaagtaaaaaactagatccagaaatcggcatcaacaacgcgaagctaataacaaacaaacatcacccaaaagtagaaaaaggtcaggcatacgaggacaaggaaactctgaagaatgtcctcagctactacgcaattaaaaacaacttcttgtacaaagtgtggaagtcgttctcttaagagtatagtctgaaatgtgtttacgaaagttgtaattggtctctacgagcatccaaaaatggcccaggaggttctcaaaaattcacacctgcccccataaatattagatatgaagaccaaaggcaagcaacatcaaaactgaggagaatgcataaaactaaagtttctgaacataaagataaaagcaacaccgctggatataaagggagaattgaaatacaggtatggcatcaagatgaactacatgaaagcttggagaagtaaggaacatgcactaaatgacttaagaggaaatgctagtgactcatacagtctaataccgagtttcttacacatggtggaaaaataaacccaagatcagttgtcgatctgaaaacagttgtcgatcattagcttgttgagtacttgctcctcttcgggttgatcgaatatgggttctggattcccttgaagtcacacttgcttcttcacgctctgttctttcctctcgagaccggtttgtcgtatttcccctatcagggtatgtacgaatcctcgctctatgggtttgggaaagacgttggtgatttctagcaggtgatctctgttctcccagttgagtcccaagatcctcattttcatgagggatttatcgttcatcagtttccgattgtctccaatttggctgttcaacctaatttttagggggtgtctcattttccccgggt

SEQ ID NO: 232114 - DNA, 785 bp, Cannabis indica
actaatatggaggaactctgctttgggcaccttatcgaccgtacatggaggactgagttgagtcgtcgactaagggatgagcgtgaaaatgtgcgcccacaaaagacgaaaggctgggccagaatcgtcgactattcgaaaaaggaaggaaggtggcagaggttatcgtgttatttggagatgtaattgaattctatttctttttcattattctaagggtataacgggaacaaaatttagaaaagtgagtataaattaaagactactaaaagaaaggtaaaaattaaaataggtacaataaaggggcctttaaaaagatctctaatggtagggatactagtatttggagagatccttagattcctcattgtaaaggttttgtcctaaaaccgaatggtgctgttgtaacggatcacaatagtgtagctgatctcttgttatcaagtggagggtgggatgtccataagttaaacagtctttttgatcatgagactgtttccgcaatcttaaaaggtggccaaggtaaagatagatggatttggacattggaaagcaacgaacagttctcgtgcaaatcagcttacctgacacagactttggaaagagcccctcactgtgaggttgctccgtcactttggaatagcaaattttcggagcatcataaggtcctttggtggtgcatcctgtctaatgcgctccctgttagatctgagagtaggagacgatttcagattgaggatacaagttgtcctttgtgtgggctgagggatgaatctattgaacat

SEQ ID NO: 232115 - DNA, 1350 bp, Cannabis indica
atgtccttggaagaattcaagagcctgtttgaagaaaaatttataacatttccatcaaacacatcgcatatggaagattttgtgaggttgactcaagggaagagaatagtggccgattataccctagaatttgatcgcttatcaaagtttgttggtgatctagtaccaacaaacttcaaccagaaacaaaaatatgtaaggggactgaatgccactatcagtcgggacttaaaaattaccaccaatcacgacacattatactagaaagtgatcgagttagcattgattgctaaagaggtagaacaacatgtaataaaagagcaggcagctaaggatgtcgtcacgacatcgaaccctagtgttggtggtagtgagagaaagtttcagggaaatagaggtggccgtcaagattgtgggtctacattctgatcttacacagagtgtccaaaatgtaagaagcactgtccaggtgagtgctggactaaaacatttttctagtgcggtatggtgggccattttatcagagactatccataggctaagaaagaagaatcaaagaagaacaacaatcagaatctagggcatctgtttacaatgacccaagctgatgctgatgctagtctgttagtggtgattggtcagttgtctataaacgattgttcttgtttagtattatttgattcaggacctactcattcttaagcattgagtaaattaatagagagttttcataaaccctttaatgtgtatgcttcggcgtttagtaccctattgccctcttgagacctaattgtatcacctcagtggattaggtcattgtcttattggattgacagttataaattagctgccaacttgattgagttacaattatcaaattttgatataatccttggaattgatttcttgtgtaagtacagggaaacaattgactgcaagagaaagatggtggtgtttgaacttgatagtgccaatccagcgttgtttgtgggtaaggtgttgggttttatgccctaaataaaactcaaattcaatgtaatccgtattattcaatatcaataaagaaacagaagtatttttcattcatttgagtaattttttgttcacattatcaattacttgttaatttgatttataaattcatccaaacccttttcacatttatattcttgtttattgtgtcgtctcacagtggaaagtaatcaagactatgtgaataaagattcctagatttatcagaacactggattttactgatatgacaatctacaagatactttacttgcatcttggataaatgctatgttctttccagagcataggtcagagtaaagcttgggttggatgcat

SEQ ID NO: 232116 - DNA, 900 bp, Cannabis indica
attattgatattttatgattatgggtgattatatttgtggtgggtcttatttttttaaaaaatagacattagagttataatttttcaattctagagattttattaaactctatgtatattatttatgctaaatgtgaaatttataatttttatgatttttgctcggtaacaatggaaaatatgatagatgatcgttagagtcatatgggttaacctttgagttaggggaacaatcgtacattttatgttagaatatcgggattaggcgggctattggattggatccacgggttgttgctccaatggttgttgcctgcttgtattttaatttaactgattgtgaatatctatgcacagatataaattaatgctcgcatagtttaggttgtctacgatttaactactcacgaagatcagggtcacgataccttttgtcataattactcataaaccttattcttgagtaacttttaaattggtagctttgagagttactaagactctcctcgtcatctcgataataacatcgagatccaccttcatctcgtgttcgcctgtcatgggcatgagttctagttgatctgctatgcccgtgagtccttaaccttgatccattttggatctgtacatgagccagtttcttgtggctattctcgcattggccatctcctttagaagagatttgacacatgacccctactcaagtaagtagtgtgtattgtctctatcattgtcgattaggtccgtttcgttgggagtgtcttgggggttcgggacctactcacaggttggattttcttgcgatttctttgtcatcatactagagaatttactttagtttcctaacgtacactgttttgtcctcggcgatctgtattcatgcgagaagactctggtacg

SEQ ID NO: 232117 - DNA, 1430 bp, Cannabis indica
atttgttatagaggttcagcccccttgtaatagcaggtaatgacctactcacattttagttgtatttataccgagaaatcactatcaagatcactataggttggatctgctatagtacccttaggattacaaggtgtgaatcaatacttgcaaaactcaagtgttgaggagcagtagggtaggcgtgtgagagagagggagtgaggaaaagagagagtttatcagacacttagagtttaggatcaggtttctagcttagaggcaacttagattttctgtcagaggttaaggcctttatataagaagcataaaacccaggtttacaattcaaatcccttagcatttgtatagtttgttagatatttacaaaagaccgaagtgccattgattcaagatattattcaataattttgtggggcttttagggcccaatttgcagcccataattgttgtccacgtgtagacgtgtccagggaagcttgaagtgcactccttggctggccaggctagccgaccatggtgctgtcccaaggctggccagccagctcttgagagggagctagtctgtcacttgatacccgtttaagtgccagggtcttcatttattcagatgctaacttggccctccttttagtgagttgtactgcgacgtggcactaattctgtccacgtaagcatgccatgccatgaggataagaattgggataacacaagacaagatctccatacaaggtatgccaaagcatcaagaaacaagtgaaatgagtgaagtgagtcgtcaaggagctataccgacatgttgagctagccaagagaagcctataggccaactaaggtgagcttgtatggccagccaggatctgggcacaagctagtcggccaaaagatgaattttagactaaggaagttttcgttcgaccaagggaatctgacctctacaaggaaaaagtgtacaaagctggcctccacatccaaaggttggcctcctcatggtaaggctggcgggaacatgacttgcaggattttggcaggcacatgacttgccagatcctggtagaagcatggccgacaagacctcaacctgcacacatagcatagccgaccaggcctcatcttgcagatgtatggtcgaccaacttctccctggcaagatattgatgcgcaaccttcatttgtcgatagcaagccaagttacaagttgggtcttgacagtccactaagatgctacgaatatatctactttctaagggcaatttggtcatttgtatttattaatttattatgtaaatatctattattttatctgctatttagggtttatgctctatataaagagccttaactcaacctaaaggccgaagtcactctaagtctgatttaggccataaagttctaagtcagaaaccctagtcctctctctctctctctct

SEQ ID NO: 232118 - DNA, 1366 bp, Cannabis indica
acacccacaaacagaaccaccacggaaacattagaatagccggaaaacaaccattagttctggcgagattgagcaaaaatagtgaaatcgacgtcaaataaataatcatggctaaaacaactgtaaaacaacaataaaataaatcaaacagaacaaaagggaaaaaggattaaagaaaactaattacaatcttctgcgcagcttcaacaccagatgcaagcgactatatttgcaagtttagtcttgaaaaatcagaataaaaaaactagtaaaacaaaactaaaacaccacaaaaataaatgtagaacagtgaagcagatataaccacttaaaaaaaatataaaagaatcacacacttcaaaatcattttgacagttagctggtcaaatgtatttataggggaatcaaaataaaaaaaaccacaaaaatagccatagagaaggaagaagaaatgtatttatagcctctatctttcacacacatagacagaaccaccacaacaacacggcaacactcaaaaaacaatcattaattatggagagttggagcaagaacaatgaaatcaatgtcaaataaatacaacatggaaaaaacaaccgtaaaacaacactaaaaaactaaaataaaataaaaaacaaaaaaaaaatagattaaaaaactaaacatcttctgcacaacaataacaccagatgcattagaggttatttgcaaacccagtcctcaaaaattagaataaaaaaaccacactttcatcttctttaaaaacgtgactaaaaatttaaaaaactaaagaaaaaattaagaagaagaaccgaacaaaaaataaaaaaaaaaacttaatatgttaatgaagagagagagagaacttgaggatgatgagagtgaaaaaaaaaaaagatgtatcatcaaacacaaagaagacgaggggagagagaaaagatgtatcatgtattgtaagcttaacacacatgtattgtaagttatatgaacttttcatcatcaatttaaataaaaaaaaaaaaaaaaaaaaaaagaaagactatcacaaaaatgacaagataagacaatataagagcaatcaaatcacaccttttaattttcttaaaacaatcacatcttttacaaaactttaaaaatgcattataattactttaacctgtcacgttctctaaaataaaataataaaattttttattcaaaattattatacagcgtaataaattgggcagtgaaaaagtaataaaaaaacgagtatgaaagtaaaattagaaaaaatagtatgaggtgtaaatttttcttaataataggggagaaatcaggatttcatgttcctaaatctataggtatcggaggttgcttttttttt

SEQ ID NO: 232119 - DNA, 466 bp, Cannabis indica
atgggacaaaatcgtgtccctatatatatatatatggtggatattttaatgattacatcaaatacgtaatcatcatggttacatttatttttaaccattagataattgttgaatgattgtgattaatttaaaaattgaaaaaaattcaggaaaaacttgtaacttgatactttattttcttataaaaacttaattaaaattaattaaaaattaaattgctaagaattattaattaatttttgcaatttgttaataagtaaagatcttttagcaattttttttaacttaattaattgaaataattgtaacaaaactccttataatttaaaattattacacacataaccttaattaataaaaaatagtatgaatgacccctaattagaagtaattttacgctcaatcttattttttaacacctttaaatgccaaattagtgtgttagtctaagattggttcaagttat

SEQ ID NO: 232120 - DNA, 1727 bp, Cannabis indica
atattagaatattagtgtcaaaaaattattgtggcttctcttttgcatgaagctagtgactaggtttttttgggtgaagaagtattttagacatttgtggttggtgtaaattttacatttttcaccatataagtaatgtcgctaaatttttagcgtaaatgctattgttgcgagctctaaatcgtgagtagagtatttctgctcgtgctcttttaattgtcgagaagcataagctattacctttctagcttgcgtaagtacacaacctacatcttgtcttgaggcatcacaataagtaacaaaattttccttgtcagaaggaagagttaatactggagcagtaattaaatgctgcttcaactcctagaaacttttatcgcaccgattcgtctaattaaaattcaaattcttttgagtcaattctgttaaaggtgtcgcaatttttgagaaaccttcaacaaaccgacaataataaccagctaaacccaaaaagctcctaacctccgttgccgattttgatgttggccaatcccgaacagcttcaattttgcccggatcaaccatgatcccatccttgtccactatgtgccctaagaaagaaacatgcgatagccataactcacacttcttgaatttatcatagagcttgtgatcccgtagccactaaagtacaaattggagatgtaggtcaagcttggcttttgattctgagtacaccaaaatgtcatcaatgaatacaataacaaacatatccaaatagtccttgaatacccaattcatcaagtccataaatgtcaccgaagcattagtgagtccaaaagacatcactagaaattcatagtgcccatatcttgttcgaaaagtagttttcgaaatgtcctcttctcagattttcaactgatgatatcccgatcgcatgtcaatcttcaagaagatagtcttacccttcaattgatcgaacatgtcatcaattctaggtaagggatacttgttcttaatggtgagcttgttcaattcccaataatctacgcacatgcaaagcgacccatctttctttttcacaaataacactagagcaccccaaggagaaaaactcggtctgataatcccaagttaagtaattcttgaagttgaatctttaattcccttaactccgctggagccattcgataaggtgcttttgatactagttccgttcccagaagtgattctataacaaatttaatctctcgagaaggtggtaatccagacaaattctctggaaacacatccaaaaactcacaaacgagtttgtattatcaggtccaacaactgtatccctttcggtttcttcaactattacaagaaaccctaaacaaccttttctaataaatctttagctttcaaagctaaaattctaggcactcgagacccttgtactaaacccacaaacacagtcgagttggcactttctgccttaaaaactaccattttccgtctacagtttatcattttctctgtacttatataagaaatccatacccaggattatgtcaaagtcacacagttgtaactcaatcaggttggcggttaactcacaatcttcaatccaaaaagacaaagacctaatctactgagtagatatgattaggtgtcctgaggataatagggccccaaaccccaaagcatacatgttgagtggttaatgaaaattatctatactctacttgatacataggaatgagtag

SEQ ID NO: 232121 - DNA, 1117 bp, Cannabis indica
tgtacggcctagtgtgatttttttcccaatactttattctttgttaatccatataattcagcattaagccattgttgaaacactataaaaggaacatgatactctcactcatccacttgatgctttcaacctagatgagagagttcattccttagtgatttcacctccttcattgttcttcacattcgaaacccatagtgaatgagtgtcatgcccacacatatcaagtcaagtactcaatcatagtgagtgagacggtggtaaccaaacccgaaggagagaaagagatccaaattcagatcttgataatgctctttgattgtaaggattcaagggctagagatcttgaacggaaggagtcattatattccgctgcaatcaatgtaaggttttcttaaacccttatgtgtttattttcattattttagagaactcatatttagaatgttaatcaacatacttggaattaaatctagatcttggtaaaatattcccaacacaaggcacttacttcaaggttaatcttcgttgccgccacaaattgttgccgaaaactgacttgtaggttgttccaacagtctacagatctggactctaacttcttgaaccattcctcggtaaatccacccagcgtcagtgggaaacataaaaaatttgcatcaatgctagttctcatgacagtcatgaccctattgaattgagaaagatggtaactggtgttcgtgacccctgtgtatattgccatttcgggcattttgaaatatttggggagttccacccctaggatgttcctggcacaaggctcttgttccttaaagtcaaactccgagtcatctcccttctgtctccacgtgaccctagcgatatctttgcagaggattgccaattcagctaagttccctcattcagggcatcctccgacaccgatattgtatgcttctttttctccaggtgctttctcaagtctccatgcttgtcataagcttttgtcttaagtcagtaggatgatgcttgcggctttttctccctctctccccaggttcctggtgcactgatacgctatttcaatcctctcggtcctgagggccaatgctctctcgagggagccgactgttgg

SEQ ID NO: 232122 - DNA, 823 bp, Cannabis indica
tattgcttttgggggaaccgaggcgcctgaggtttctgaaatgattacccttttttgctgtttgcctataaatacaatcgagcatttgttcacaaactcattttcaccaaccttctttgctaagcaagttcagagcaaaaagagatagctttaagttttctgaagaatttttacgagaactgttcattcagctttgcgtaacctacacccagacgttcgatccttgagtaagttctcgatttcttttactttgcacatttattttctgaatgcgattttaactttgctgtagaagatatgtagaaaccctgggtttagaaactctgcgattttcctttgtaacgattcatgcaacttcgacattcgtaatgcttgctttttgaactgcacaatgcctgtctttcatcttgcttattctaagcttcatgaatttttttgccctaaatcgcaaaaatttcaaacttctgagttttggcttttcgtcaaatattttcattctttaatctattgagtgctcctggtcggaatatttgcctgtttaatgttcgatatcccgaccaaacactcatctcgtgtgttgtcttttgtagatgaacccaggttagttttggggaagcgaacaccgaatcgactaggatctgcttcaactcttgcacgaggatcatcctcgtctttgttctagtactccctcttcaagcaacatacattttgattcaaatctctcgtccatccaaggatgatggctcgtaccaaatagacaatgcgtaaaatcaactcgtttgaccctcacgtggcccaatacgccaccttgcccagtgccgaa

SEQ ID NO: 232123 - DNA, 653 bp, Cannabis indica
ttttttttttttaattttttaccaccttgaggacaatgggattttgaagggtggaaaagtgttacacttggaattagagtaggggctttttagtaatttaaaaagggtgtggaggactataaatatgtaattgtgaggctattgttggatatggaatgagaaataatactttggtttaattggagtttgacattgactcaaagagcgcattttaggagatttttcttggcttaatgagagcagcaatgacagataatagtcctcttcaaaacaggatacaaatttcctaaaatgcatttttcgagttagtgccaaacgctaattgaactaaagttctattttctcattctatatctaacaatagcttcaacaattacatatttatagtccttcacactctttacaaattattaataagtccctaaaactaaaatatttcatcgtatgacattctctcacaatgaaatgcacttagttaaagatatcaagagtattatttagtatagaatttatattgttagtcataaaacctttaatgcacaggaacaacaatttatacatagagtgatgaatttgtaatgggtatttgttctgggatttgctactgttagcttctcttgttggttttgtttgtaatttgcttgttgattaat

SEQ ID NO: 232124 - DNA, 958 bp, Cannabis indica
tgtagaacaccagtgaaaaataccgtctgacaatatttttgtaaaaaaatgataaaagttagtataccatgtagattttcttattttatatgaggcactcaattccaacatataaaatatatttgaggattgctaattataatttttaagtcaatctaaaattacatgttaaaatattgttttttttttaattttcttttatagtggtatacgttatagttataatatgtctctgtaaatttttgaaaaattctgaatagtttaccgtatcaaaaataaaatttataatatttcaatttatcactcgtgttcaaagaacttcaaacatatttttggcattataaataatttgattttttttaaaaaaatttactggaatgatgttgtaaatataacaaacaccgtcatgaagtttctttttttttaaaaaaattccaacatacagagattaactaagagtaatagaaggttgacggtagcactcctcttatatatatagacgtaactacttaatgagtattactgcatgaatgtgtagtattaaaaaaaatttgagcttttatacttaattttactatctaattagaaaattaaatctctcaatttaatattatataaattgaaattgtttcatcgaaaaaaattaaaaaaattaacctaaaaaaaaaaaaattacttattattataattttttttttataaaaacacatttttaataaacagtactaaaaagagatgtttttttaagctttttgcatttttttttaatttaataattaaattaacataaaaattgaaatttctttgtcatgatttttcattctattaaaatttaatgtttttattaagagttagtcccacattgctaatgtgtagaaataaattgtgatatataagatgaaagggctactcctcccattgccaattggttttgggatggaaccccattcatcttatt

SEQ ID NO: 232125 - DNA, 594 bp, Cannabis indica
agatataatgagccaccgtaaaatggggatcaccacattaggaaaagggggtgaaagtagtatttctcgacaaccatgggtcaatagcacatcgaacattctaccctgtttcaattttccacggaagtcctttcaacaaaagctctttactatcacaaatactttgccaagtgagggaatgtaagattcctttttgagccttaagaacgtcaccattcttatagtatcgggctttaagaactcttgtcaacagggaagaaggatcatctagaattctccaagcttgctttgcaagaggagcttgattaaagtggatgaaagaacaaaaacccaatcgccattagcttttgaagtacacaaaagtttttatttcttccaatgaatctttgacttattattaattagtgttagagcccaatcagacattagtcatcatagattcaagttggttgcagaatttcttggaaagactaattaaaacaaccaatgattaatttattaaagtatgattaattaattgaactaaagtctaatttaaatttaaattaagatttatataaaaaaatattatctaattttattgatacttttaaa

SEQ ID NO: 232126 - DNA, 2215 bp, Cannabis indica
agatctgtcctagtacttgagaacttgacgggaatcttccttaaagtggatccctatggagatcctgtcctcttctatcggttctctaattgaatcaacttattaaattgctggcctcctagttacgacgatctgattttgcctggtgagatcgaaagaccctttaagtcatcccacaactcgcccccagccgttaaaagatcggttgtgatccctgcttgaagagcagtaagctgaatactatcattcaagtttctaacctttgcagcggctgtgctgaagcgactcaggtaagccctaggcgactcgcctggttgcttctttatgttagttaaggatgatgcttcaggtcgtctattttaggcaatttgaaattgtttattaaagtccttggacagctgttcccaagacattattgaatggtgagtaaacttgtcgaaccagctacttggtgccccaattaaagacgttgagaataaaatacactgtaaattattcaaaacgttgttggctcgcattatggtattaaagttattcaggtgagcgactggattcgtagtcccatcatactgcgagatgtgtggatttttgaatccttgagggaattaagaattcagaatatcaggatgaaatggcttgatctcctcatccgagtcatagccaggtaatttcccatgttccccatcatgatattttctaaacttatctgccaactcaatgatacgcaactgcatgggatccacttgctgttggttggcattaagttgatggcgtaagttaggtgcattttgatttagtcgttcgcaaagattgggttgtcttcgattcaaatgtttacaaagatcaagttgtcttcgctcataattgctcacagatcttgtctttgatttactctcagattgatagcttcgcgtattgctcatgctttcttaatcggcataacgtcaatgtctacttcattctcgcatttgccttcctaatggattgtgtcctcaagacctcgagtgtcctaagctagaacttgcttcgtcttgtactggccttctccttcgaaggaggttagatacacatcctctatttaggtatgtgtatacaccttccctctctgatcaagaaggacgctgagggtgtctcgatggcaacccacttgtcctaggttgagccccagggtttctctcattatcacgaaggatttcctgttccttaggtcggggctatctcgtgtcctcattactgcaagaagcctctggtacatcattacgttcattcccttggtttataaatccttgggatctttgagaaacgtctcgatgttgctcttgattattttgttgttcatccactagaacatccctagtacccccaggttattccttctggatgttttggggatttccttgatttttttccagtctcctagttcttgaacctcgaagtctgcctcgtggccttctcaccccagaatcaggttgattctgagtattagttccttgagtcgccctagctgctacagcctctctttccaacccagcgttttgtcagttatagattcaactaagcgttgtcggagttatctatttttcaattccactaatggtacatacctagttggattatatgcatcctcacttctaggtacatatcctatagaattattggtttcttcgttccttctttctgagttttgattatcaccaccatagtttttccttgaacgtgatgttctagtagtatggggtcttttagaactcattggctcttttccaggaatttttccgagttttatcactaaggctctcaatgaaagcaccaaactgttaacctaaattttcgttaactaaaaataatgatcctttacgtaataaatatatcacagaaataataataaacgattaaataactctagatatttttatgtgattttgcagttaaatttgcatactctacgagtctatcttattatgatattttcttaatacaggatacaatatttaattgatggtcttttctctctcaattctatatccctttttctgtagaatttgcccatatttataggaatataggttggcagttatttacacttgggatcagtttaaaatataatcgttcatgaaacgtgaaaaattcccacgtttcatttaattgcatgtaggataatatttgataacagctttttgttcttatcattttcgatgattaatgctgatttgga

SEQ ID NO: 232127 - DNA, 964 bp, Cannabis indica
aatagtcataaggtcagagcatcactctctagtttctatctttagaaattagagcatctagatttggccatttttctgcaatccatatattgagaataaaaactcgaagtagacgtagcttcattactatcgcgacacagggagtgaactactataaattgttgtatctctctatctatacttaacatatattacattcttgccaatatagcgagcatgtgtggcttggaagtttgtgtccatatttctgagtcaatatttaagtgctttcattgggagccacaactcaagaaaatctcttacaagatggttgcaacacgctcctcaagtgttgataaaggagccccaacaactggccagacaattgggggaacactagttactgaagctagaactgagactactcttgcatcttaggtgccaagtggaggcccccgaaccagctccatagctcgtcccccaaggccaccaaatactcttagtactagaactgacgagcgaattccacctggagattcccacgtggaattagaagacaatgaggaggtcgatcctcgggttgaacaacttagctaaactaaggttgatctacaacaataagtacgagactttgtcaacaaacaacacaagcagttttaaagctggttcgtggaaaattggtgaaacatctagagccaacaagttgagttggagcaatagagagccaacctatctcaacgaattagagaagcctatcacctagtagcgagactaccccctgcaggggtctttccgagtcggtaaaagagattcctcgtcgggcaactagccacgtgggaattagtaatcaaggagaaacccttaatgcacagaacactactaccatgcttggtaaccgtgaaagtactaagcaaacaacaggtgctgaggctccccagggggaagcaaacttcgagcaagagtctgaaaggactcaaactcatgg

SEQ ID NO: 232128 - DNA, 560 bp, Cannabis indica
tgtgagttgtctgatgtgacatgattagaagcaccactgtccaagtaccagttggtgtcttcggctgtggaaggtgaggcaacatatgcctgtggttgattgttggatgaggcatgatgtaggttatcttcaggaccattatagctgagatcaaaccatttgtaacacctttgaactctgtgaccaactctgttacacaattgacagattggtctatttccttgattgggaattctgcctccttgagtgcctcttcctctggtctgtgtgttgttgccacggccatgatttcctgtattcggggtgtgattttgttgattgttgttgggaaatggaggctttttgaactgtgccatgttcgcagaagctccattaagatcaagtgaaagggcagtagtgggagattcaatcctgatttcttgattttgcagcaagaattggacttcgtgcaatgtgagttttgttgggttttatgccctaaataaaactctatttcgatgtaatccatattattcaatatcaataaagtaacagaagtattttttcattcatttgtgtat

SEQ ID NO: 232129 - DNA, 744 bp, Cannabis indica
gtcctggtcctggtcctagtcctagttcagttctagttccatttgcgatatcgagttcgagattgtgtttgagttggggtcgatgttcgagtactggtatgagttcagttcgggtacaaatttcaatcgaggtccaaatcacgctacgggtgtgggttcgagtcttgaatattggtctaggttgggaccgagccccaagttccaatcccaatctgagtaaagattcagtttcgggtctaagtcattggttcagatcttggtttaggttcgagtttgggtccaggtctgggtctagctttgggtcggattctaggtgtgggtttgagtttgggttcgagtctgtgtccgggtttgtgtccaggtctggaccgcgatctgggtctagttttgggtccaagtccaagttggagtcccgagtgagggtccaagtttaggtctgggtcaggaccttagtctagatctaggtcaagcatttcgatcccagtctgggtctttgtccgaacccaggttcgtatccggatccctatcaaggttaagatttgtgtttgggatcgtatcccagatttaggtctaggttcgattctcagttccggtcttggtacacaactttgttcatgcccgagtttcagtctcagtttgggtctgaggatagttatgtgttttgttctaggtccaggtctgggtcctggtcactatccttgtcttgttctacggtcctggttcggcgattcttgttcaggttct

SEQ ID NO: 232130 - DNA, 964 bp, Cannabis indica
ttaaaaggtaaatatttttttttgggcccctgggataggtgggccctaggcacaggcctagcccgcctatgcccagagccgggcctagtacacgtggacaatctaccgtggcacttaactgtaatttttggacggagggatacaaagcaaaacaaaatgtgagttcagtaggttttcccactaaaattttggtttttgtggttaagtgttacaaaacgtaaaatttaagtgatttagccgtcaatattccttttttgaaattaatttttttgataaaaggtagcaaaatttagtattggtcaaagtttaggggataaaaatgttaatttttaacgattaaagtaacaaaatctaaccgaatggaaatgaatatgtaactgttatatttaattttttttttaacaaatcgtatatttaaaagaatgatgatataatgttgaaaattgaaagacaaaaataataattattataaaatcattattttcatacgatcttttcctttatttgcatggtgcaaaatcctaatgatgaaaaaacaaataaattgagttctaataaaatgcacacattatgtgaaaagatcataataaatacacacaaaataataatcaccacctagaaacagctataaattttggtgatatttaatgataggagtctttttacacgaccgcaacaatacaaattacgacgtcgcttcttacacgaaaaaatttattatcaacttttagccgaacccgacgtcgttttaggcccattagaaaggatcagattacatgggatacttacgttgaccatacaagattactgtatatgaatcgtatgttttgtgtattttagtattatctttgtacatgagtcggggtttcttttcttcgtccaaaatccctcaaacgaacctttctatttctctctacattcaccactgagcttccccccccctcccctttctctctctctctct

SEQ ID NO: 232131 - DNA, 1528 bp, Cannabis indica
ttgcttcaaaaaaagataatgtatgggtgaagtgggtgcataatgtctatattaacaaagaatcttggtgggagtacaaggctcccattcaaagtagctggtattggaggaaaattgttgaactcaaagatgaatggaaagagaaagttagccacaaccagttcactgctcaaaattgcaaagtttctgaagtatataaagtgttaacaacagcagatgatttatgttattggattaaacaagtatggtcgaggatgaacattcctaaacatagctttctcctttggctagcaatgttaaacaaattaaagaccaaacagaggctggtcaagtttcaaattacagcagatgctcaatgcattctctgtgaagattcagaagaaacaacttctcatatatttttctgttgcagatttcacaggactgcctcggacaaatcaaggcatggctttgttggagagctgcaaccacatccatgcaggatgtgctccggtggattaacagagctaaaataagtaagtttctgaaagctgtttatgctgctgccattgcagccttagtataccacatatggaaaaccagaaattgtaaaatctggcagggaagtagcactcaagtgcagcaattgatccaagaagtaaagtggcaagtcaaaactaggatcacttatgtgatgcctaaaatagtagcgaaaatagactatgagtggtttatttctttgtaattagatagtgcatacaagttcaaaggaaaaaaaaggagagaatgtatagaacctgtacagacttcgaatagtctttagattgtattaactgtttgttggagtaatgaaattctgattcatcaaaaaaaaaaatactttcaaaataaatagacaaaaataaacgtaacatacacaacttggtcactttacaagtatggtaaccaatgatatctcctctcatgaaagtaacaaccaactattttttattcccaatcctcattttttagtaatggcttatcccctcaagtgcaatattttcaagagtatcaacaacttgcacgaaagaaaatcattaaagcaacatatattaatgtgcagaacacaaaaataatgttgtaaactcaaaaaattatgttgaaattaatcaaaatagtagtaaatatcactgcttgttaactaatataatgaagagaaatgatatgctttacaacaaggatgaagtaataagtttttttttccaatgttatttaggaagctaatcatttaacacaagtgtgtattttaactttatacaacatgttgttaaggcttgaggaccgttattattacctatgattattagtttcatattagaatagaatgataatccaataactataaaatagctataatggcattcgatgttcatatatatcaaaggtggaaaaaaaatgcaaataagttgtaattttgaggggttaggttaattttgaagttaaaattaattcccaccattgacatttattttattgataattttccaagcacaaatctgcttttataaaa

SEQ ID NO: 232132 - DNA, 877 bp, Cannabis indica
gagcatatggagagttaatgaagaatctggaataataagaaaggagagaagagagcgtaacaatctttttaagttgtttggtggaagaaataaagtggtagaataatgaaatattaaaatatttatttataaaattattttattgtctttgtaagtaattttcttataacatattaacagaatatatttataatttccaacaattgaagatggagattatgtattgttctaaatgaattaattgtaaaaatattaagtcatttgtaagagaatataagttactgtactcattactagggctagtactaaaattttgagagccttcggtcaaaatttaaaattaggtcttttaaaaagaaaatatatttcattaagaaaaagaaatattattttagacaatacattagataatataccgaccttgtaattaggggccttgtgtaatggtctaagctgtacaatgcttgggagacggttagggcagacgtacatgtttgcttatagtagccatgacccttcaacatatatgtatatgtaatataaagtcttaaactctaatacattgtaattgaacttttttaataattactacatggtggcctattttaaaaaagccaaagtaaaattttaaaaaaaattgtattttgtttgcagtagcactaacaaaattatatatatttactttattttctaaaaagaattataaatttccttttcatttgtttatattttttaataatattcatttaatctatttgctagctagaccatcaccatttcaaagtattttttaaaaaaattagtttagaaaaaagtagaaaactttttaattttgctattttggcaatcatttctgatttatgttagtggttggtaa

SEQ ID NO: 232133 - DNA, 1083 bp, Cannabis indica
ccctttctttctttctgtaacagttttaatgaaactgttactcatgcactcttagattcttccagagcaaccatgtatggaaagtctctccccttaattaaattttattttgaacatataaacaatgatgttagagagtttattcaatctgattttgtttctcttaataaggatgatttcatgatggtgttaagcactctttggcaaatttgggggaataagagtaataaactctttggaaaaacctatatgtctcctaatgatgttgtagaatgggttagttcttatattttggattacgaaagcaatgtggctgagggcttctaccagttaaacactgatgcagccatggatgttaagaaaaggaaggttggaattggggtagtccttaaagattgcaggggcaatattgtagttggtctttcaattccactagcaggactcactaattttacaatggtcgatgctttggcgttaaaatctagcatttggtggtgtcataacataggggttcctattgctattgtggaaacagattctaagctactggtggataaaattagaagtaaggaaagggatctttcggttttatctgatgtaattgagaatattaatagctctttatctttattctctgaagcttgtattagatatgtatctaggcaatgtaatgttagtgctcataattttggctaagaaggctttagagcttgatgaggagttgatctggaatagtgttattctagtttctttgtaatgtataacctgtgtttatttgcctatctattgaatagttactctttcaaaaaaaaaataataatatataaataaatcaaaataaagaatacactaaaaaatattttgattagagaagataagaaaactagaatgacctcttgttcaatcagatagttgcaagcaactattagaaatcggcgagcaacggaggtgaccaacaatcaacaagtgaccagcaacaaaattgtggtgatgagatttttataggaacaatatagagaagagcgatttttttttaggttttcttttcttttgttttattattaaggtaagagatttaagagt

SEQ ID NO: 232134 - DNA, 838 bp, Cannabis indica
tattggtaacctactactataggtaaaagaaaaatgtaaccataatggttacaataaaaatgtaacaattgagtagtcactcatatggaatatatatatatactaaattaatattatgtaaaatgtgcgtatacttagttatattcataatttttattttagttatgtatatttttatttatataataattattattattattttgtatgtagatgttatttaataaataaaattattttttgttaaaaaatatttaatttaagtgttatttaatatataaaaaaatattataataaacttttaattttataatattttttaattgttttatatatatatatatatatatttgcaacatacgagtttgacacggctggtgtaaattaataaggtttctatagctatgtttaaaataattatcaacgcatttagaaaaggttatgaaccgttagcatctgtaagattaacatgcgacaaaaggaaaaataattaaaatttatatatatatatatataaatatactagtttttttttttttttaataggacaaatttctagccataaatcagacatttattatgagcagagatgagaacataaatgaagactattatgagcaaccaattttctatctgatgtgaaaaaggtaaagtaacaattacaaactttgtgttaaaaatgttttaaacagttgtttaaattgaattcatggtgacccaaaacaaaccaaatgtgtacaaacaacgttatgatgacaccgaaagcaaaagagggccaaggcacatggctaccaaaatgaaaaagaaagaaagaagaatgaaaaataaaaaagaagaa

SEQ ID NO: 232135 - DNA, 1066 bp, Cannabis indica
acctccaacaatcaatcaagaacaataatgataatattatattttattctaaaattaaactattaaccccgcagataatcacttattccaatcttcctactacaattagttacagcgaatcactcaataattaaatctttttactaagcaatagatctacgaaatatgcaatccatttaacctaggtaaatattaatttctatggagataagttaatctaggtaacaaatcaatgaagcatataattcatttaacttaggttctatttttcatcacaatccataatacctttgacattgatattaattgcaaactatcactctacttagaattctaaactatgtgagaagtaattctaagatgattatagaacaatacaaattaaaccttaattagttgcacacctaacaagaattcgcaatattcataacatttaaatagaaaaataaaaacaatttaatatgagaaaaatcaagaataacattcattattaacaaccaagaatttatgttttatagttttgaaataactcttaactaaaaagaaactaattcataatcacaactataaccataagtataatcattattaaaaactatagagattagggagaagaaaagaactagaataatgaataattgatgatgtaatctccctcttctccaccttttacgagtttttctcttaaaaacgcaatctaaaagttgctaaaaacgaacactaaaagtcctatgtatactccataaaaatcttatgatctaaaaaagataaaatttggaaaaatctggaatcgtgctcttgtcgcggcgaaggttgaggctcgtcatggccacgacttgttgctaaaaaaaattctattgtatgttcagattagtatttcggccataacttcttcaatacaacttggaattagacgattcaagatgatttaaaaatttgagaactagatatataacttttatgttcagctccaagttcagttttgcttctaaggttgtcaaaatttacaattaagtcatgtcttgtaagaccgagctcgtcggcttccactattttccatcaaaat

SEQ ID NO: 232136 - DNA, 1319 bp, Cannabis indica
gaggtcaaggctgcactcaactcgaaagaaaccagaaaagaaatgatgaaaggattgatagcatagcagatagtttgtttgtgaaaaccagaagtaactcaagagatttcagaagtggacaaaacaaaactaatcacaagaacaatcaaaacagagggcacagttcaggattcaaatccaaagcaaaatctaaacaaggaaagcagtgctattactgcaagaaggaaggacatttcagagatgaatgtagggcactcaaggcaaaactagagagagaaaagggacaagaaagaggagctgcagggattgtttttgatggctatgagtctgcagaagctttagttgtgacaagtcaagaatctggttgtgaatggattcttgactcagggtgttcatttcacatgacaccaaggaaggaactgttaagtgacttcaagaagattgaaggtggttcagttctactaggagacaacaaagcctgtaagatctcagggatgggaagtgtactgatcaagatgaatgatggtcagatcaagctcatacaggaagtcaggtatgtccctgaattaaagagaaatttactttcaattagtgaacttgtatctaagggctgcactgtgaagatagatggttcaatgaaagtaatgaagggtactagaatagtaatgaagggagacattaaaaatggaatttactatctacaaggaaagacagttgtgggaaattcgaatctggttgtcaagagttgtgatagagacaacacaaggctatggcacatgagacttggccatgtcagtgagagaggtctctatgaattggagaaacagggaattctcaaaggcaaacttgacaaggaactaggattctgtgaagagtgtgtgtatggtaaatgcagcagagtgaaattcactccaggaatacacacaaccaaggacaagctggattatgtgcactctgatctctggggtgcttcaagaaccaagacaattggaggtgccagctatttcatgagcatcattgatgactacactagaagagtttgggtttttctactcaaaactaaggatgaagcttttcagacatttgtcaactggaagaaactaactgaaaaccagacaggaaggaagattaagaaactaaggacagataatgggttggaatattgctcagatcagttcacaaagttttgtcaagacaatggtattgctagacacaaaactgttgtgaaaacaccacaacaaaatgggattgctgagagaatgaataggacattgcttgagagagtgagatgtatgctaaaaggtgctggtttagacaag

SEQ ID NO: 232137 - DNA, 1253 bp, Cannabis indica
gaagaagaaatgtattttatagcctacatctttcacacacacggatagaaccactacagaaccgaacacccaaaaaacaatcattaattctagcaagatggagcaagaatactgaaattgacgtcaaaaaaataaattatgaaaaacaactgtaaaacaacactaaaacaaataaaaaaacaaaagaataaaaaaaataattaaaaaaactaaccatcttctgcacagcctcaacacctgatgcaataaggactatatttgcaagctcagttctgaaaaatcagataaaaaaaccacttttatctttctaaaaaacgtgaccgaaaacttcaaaaactaaagaaaaaaaatgagaagaagatgaagaagaaaaactgaataagaaataaaattgggccaaaaaaatgaagaagaagaagaactgaataagaaataaagttgggccaaaaaaaatgaagaagaagatgaacagaagggagagagctcaaaaacaatgaaaaacaaataatgtgtgtagttacccattaattcaagatgagtatatatataaacatatatatttttcttgagaatgatgagatcacatgtgctgctgttgtctaaatttttttttataaaaaaatataaataaaaacatgcattaaaaggtgattcaacttttcatcataaaatttaagtaaaaaaatacaaaaataaaaatattatcacaaaagtgacatgtcgaatcaaatcagtaattaaaatttatgtatttactcatagattcaatataaatatatatgtataaacacatatattttttcttggaaaggaggactcaggtgggctcttgagtcttgtctattttaatttttcattatcaattttaagtaaacaaaaaaaaaaaaattatcacaaaagtgatatgcccaatcaaatcaacactattaaaaaacttaaaatataataaaattggttaaaataaatgttgaactgccaagttttaacaaaatagcccaaaaaaatttttaataaaaaaatacagtatacagtataataatagggtagtaaaaaatgtaattttatgcatataacagtaaaattataaaaaaattgggaaaatgagtaaattacactctatactttttttatattgtcctcttttatttttaccaatcttttttaaagtttattcatttttacctattttttaaattattgttaccaattttgtccctgtcacttcaagatactctctatgtgactctcttatg

SEQ ID NO: 232138 - DNA, 1597 bp, Cannabis indica
cataggatctagtagcaattaagaatcttcatcatcaacattacaacctttggtcaattttacaacttcaaacaatactagtgatgcaaactggtatcctgattcaggagccacaaatcattgcacaccttaggcatggaatcttaaaaaatttctttgattatgatggacaatatcaaatgtatgttggagatggtgcagatttgtctaaaacatattggtcaatcatttattcttcctaattgttcctcaccatctcttgttcttagcaattcacttcatgtgctagaaataaccaagaacctcattagtgtgccaaagtttgctcaagataataatgtgttctttgaatttcatgctaacatgtattgtgtaaaggacaatttaactcatattatcttgttgatggggatacataagaattgcatatatacttttgatccttcacatatcaactttgtatcacctagtcctaaaggaagagtcacttctgatcataaaaagcctcacacttcacaaatttgtagcagtgtttgcagttctaaatccaagagcacctgcactgtaactctaggcaactcagtaatcacaatattaagatgtaataaatgtaattatagtgttgaaaatgactttactctatgtcataataaattaggacatccctcaaataaaattttacaagctgtcatcaaatcttgtaatctgcctattagtaataaaatttctcaatattctatatgtttagcttgttgtcttgaaaaaattgataagtttcctttttctaaagcatccaccacatttattttcgtaaccattacaattagttgtatctgatctttggggaccatctcatacaattttatttaatggttataaatattacgtacattttgttgatgtgtattcaagattcacttggttgtatcttataaagaaaaaatttgatgcttttaagatcttcattaattttaaatttgaggcggagttacaacttacgaaatccctcaaaattcttcaaattgattggggggggggggggaagggagtttaggtctttcaccaattaccttactaaaaatggcatccatcatagacactcttgcccaactacacatcaacaaaatgatttggctgagcgcaagcacatacatattgtggagtatggtctggctttgttagctcaagcttccctacctctcaaattttgggatgaggcttttaggactattgcatacataaacaatagactttccacccttatgcttcataacatgtcacctttagaagttttattccataagtagcctgattatacaccatcttcaaaacctttgggtgcaagtgtttcctaaagatcaagccatatagtaagcacaaattgtaatttaggtctgcaccttgcactttctttgattatagcctcaaccataatagatacaagtgtcttgatgctaatggaagactttatattttaagggatgtagtttctgatggattttcattcccttgtgaaaaaatgtgtagaattctccacatgagtcaccacctgctacttaattttctcttttttcattaattccaaaatatcctcagt

SEQ ID NO: 232139 - DNA, 629 bp, Cannabis indica
agactcattgttctcggcggggccgcgtagcagcacccgctgttggctcgtcgtcggacatagaaggattcacagcatcatgagaaacagccgccctggcatgcttcagcatactgcgcacagaatcttcaacttgtgaatgttcatgtgtgaaggtcgctcgggtagcaagggaaatagcaatagagatagtggggcagggttcattaataaccactcccttacttcctctgaagtgggacggatggctggtaggagagagagcaatagcttttccttttgatgcgtgggtggtaacttaatcagtcataatgggaggaggaatggaagtttgcagtgtttgtggggtaggtaatggactggaatgtggcataggcaatgtagagatgaatagggaaggttgggtacaggaagctgggacttgagtagtaagagaaacaggtgtagaagtgggagattccacatggagaaattggtcaatagcttgttgcaagtcttggtcatcagtgcgggtacgaatacgaggaaagaactcctcgaaagggatagagttagagattttgaacgggttctttttatgggggtagaagatgggggatggctcgaagggtatccgttatagttccagg

SEQ ID NO: 232140 - DNA, 717 bp, Cannabis indica
taaaataatttccaacacttactggtgcgggatccgtgcgaggagtccaatcgaacttaagagagtgctataacacggcactaaagctcacagaaaagaagaagtcggtgaatgtgatacatttatttggagcatcacctcctcgacaagagatttttagaattaaggagataccgcatgttgaaaaacccaatttggatctaatgatcctcgattacactaatattgcacaacacgtagacctcagaggagtcttgtgtgtcaaaaccttcctggaggcaatgactccaaatgtagactcaaaggtgcaaacacagtttagagtctgtacgggagtgagatccacaagtagtaattttccatattacacattgttagagactcattatgagtttgttatttatacacttagagttagttatttgttagctttttgtcttcttattttggttagcttgtaaccaacttatacttgtatatacactgagcatcttgctaatatcaataacaaaattcattttagctcattctctctttcactttttctttctgttacattttgttactctcacatggtatcagagctctgctcattttttttcaatcactactcgtcgtcttcttcgatcatgtttaattcctctacagctactctggcaacgtctcagaccaccactacaagcttcaatttggttgtcttctcccttaaattctctg

SEQ ID NO: 232141 - DNA, 775 bp, Cannabis indica
gccaagtctcaatatgtcctatgctagcatctaaatctactccatgtgatatgtgatgacgtgcggtagactttgagccatttctagagtcccacttccttttggaacgactgtctgcattcttctttgatagttcctataagaacaatcaagtattattagtgaaacttctaatgtataaaccacaataatgttttaaatatcaatcattacataccaaaaagctaggttcagaccaacgatcacaaagatattcccagtcttgctgagatacttctcctctagggcactcattcttggccttcgttggatctatttcaccaccaactttcttgaaatggtcatgcaatttatatttgtggcctctccatgctcgttgcatctgcccatcaataactttttggactttctcatcttcaatgtcaatatcaaatgtattctacgggaagaaagttgcaataataattagagatcataaactgaaaaatataaaaatttaaaaatattagtcaatcttaccaagagtcgagcacgaagtggagtacaagcctccattctttgtactgaaaaactacagtaatggcgaactataaatccaatctcattgttgaatcgctcatcattatcacaaatagcttgattaagtttatagtcgaaggttacaattaacgacttagctgacttcttaagtaccttagtaccatgaccacaagtaggcccccgttttgctatagggtttctagctttctctacaatacaacattttaaaaataac

SEQ ID NO: 232142 - DNA, 636 bp, Cannabis indica
ggccctgggcataggtgggctagacttgtgcttagggcacacctagctcacggatccaatttttttttccacttttaaagatatatattttttgctaattttgaaaaataacatattttttttaaataagaatctaaaaatattttttccctgtggctcattaaattttagggtcggtttgctaggaatcatatgggttctgattctgagattttagctgtctgttttgaagggacgccagaaatttcgcttgcagaattgagattaggatcaaagaagttttgagttagataaagcaatatagttggtccaacgtgaatgtagttagagtatgacagccttgtgtatgttcaagcaatttaaagttcttatttctcaatttggtttgttagttaatcgattgttgttaaatgctttccaacctttttgttaaacgctttgctaatattattgctcattacataacaaaagcataaagttataactcaacacatttatcgggtgaatgaggtttccctttgagtttctttctattgttcaaaagggttggaaaatgatcattttaaactaactcactatctaaccctagctaatttctccttttgctatataaaaattatatgacaatattcctat

SEQ ID NO: 232143 - DNA, 681 bp, Cannabis indica
atttttgaaaatagccctataattatttctagtgttataataaatgaagagctacttaataatataaaaatagttacttctaaaaaataattctaattagtaataaattttaaaatcacattattttatttcatgttatgaattatgtggagttatctattaaaaagtttaaaatttatactattaatatatatatagaattataaagggaaattaccccaaatattgttttttgacatttttttttcaaatttacgaattaagtttctaaagtggtttaacactagttgcaataagggtttttatacgattttttgttgcaatttaagttgcagagctagttgcaataggggtttctaagtagaattccttaaaaatgtaaaaaaaaaaaaaaaaaactaattttaaagtgtaaaaatgaaaaagcttcaattttaaattattttgttaaaaaatattattataaataaataaataagaaagtgtagagaaaacttaaaattgtcattacttaggccatctccaatgggacactaaaacactttaaatagtgtagtttcacactatatttactccaatgggacactaaagctatcctcataaatagctttgtctacagttgtgaagtccttttttggcaagttaggtgacaaaataatttttcctttttatggtaagatt

SEQ ID NO: 232144 - DNA, 1171 bp, Cannabis indica
ctgtcatggacataagcaatacaaccaaacattttcaaattttggtagtttgcatgatgtccagaccacctttccataggagtttgaaaatttgtagctgaagagggacatctgtttattaaatgacatgctgtaagaacaacttctgcctagaaattcttgggcaatcctaaatagatgagcatgcatctaaccctctccatgatagttctattcatcctttctgcaagttcattttgttggggggtctttactacagtatggtgtctcataatcccaacttgtttacaaaaattcttcaactgatcatcacaaaattccaggccattgtcagtccttaatttctcaacctttttgccagtttgagtttccactagagtcttccactctctgaatttgctaaatgcttgattcttggtttgcagtatgtgaacccaaacatatctagagtagtcatcaattattgacataaagtatctagatcctccccttgaaatgattctagatggtccccaaacatctgagtggacatagtcaagtgtagccttggtaatgtgcattccaatgccaagtttgattcttgttgactttcccagggcacattgttcacagaattccaaatctagcactagatttttcccaagaagcccttgtttgtcaagaatcccaagtcctttgggactcacatgaccaagtcttctatgccatagcataatagaattggtcatactttttgaggccacatatgcaaagttgctggtggaatttccttgaagaacatatatagaccccattgatcataacacctttcatcaataccactgctcctttttgtaccattaaagcccatgattccaccttgactgagcatccctcttctaacatggccacagaaatcaaatttctctttatgttgggaacatgtctcacattctgcaattcatgtgtgttgcctcctgtcagttgcagctttacagacccaattccaatgatctcacatgctctattgtccccaagtctcacgaatccaccatcaactctctagtactccaagaattgatctttatctggacaaatgtgaaaagagcatcccgagtctataacccaatcaacaccagagtaatcttttgaagcaaccattacacctgcactttcgtatccatcgaagtca

SEQ ID NO: 232145 - DNA, 1246 bp, Cannabis indica
agcgtacgtttgccagtatttgtgacaaggtccagaagcgggtgcgtgggtggaaacgaagtttcttttcagctgggggtcgtgagattcttattaaggcggtgttgcaagcgacttgtgataagttgcgttcaatcattctccagttttagtggggtactaagtgtgataagaagaagattgcatgggtaaaatgggattatgtttgtcagccgaaagtgaaagggggttaggtttcaaggatttgaccctgtttaatcaagctatggttgctaagcaagtgttgcggttgttcctttcggccgattcacttccaggccgggtcttgaagcataagtatttccctgagacatcaattttggaggctaaggatcgtcctggttcttctcatttgtggtctagcttggtttgggggttagagttgttgcgccttgggatgcgaaaggtggttggggatggctatactattgatgcgtttcgtgatccgtggattcctcggccgaggacttttcgtcctatcactgctgttccttcggcccaggtgatggttaatgagttgattgatgttgggggggtttggaatattcgggcgttgtctcaacacttcttgcagttggatgtggatgtcatccttggtcttccgttggggtgtggggttggtgatgatcggtggtgctggcatttcagctctaatggttcttatactgtgaagagtgggtatgcggtggcccttcaactcttgggggaacggttaggatcttcttcttgtaaccaatctcattggtggaatgggttgtggaatttgaaggtccctcagaaggtaaagatcttcctttggcgtatgtattatcgtgctctgcctactaattcccaacttattagacgcaaggttcctgttcagccgatttgtactaggtgtggggaggaaactgagactccggaacatgctttagtgttttgctcatctttacttcctctttggtctaaacttcgtgtgtggcatcatttatatcggggtcgggtgggttctttggcggagttgcttgtgtatttgtttgaggtattgagcaagggggagtttgagttgatttcaatggtgtggtggtgggtgtggtttgataggaattctgttttatttgggaaaaaacaatcgcggttgaccgggattgctgagcttgctcatgctgctttggtggagtttcaaggggcgggtgtgagtgttgggggagatggtaggagggctggg

SEQ ID NO: 232146 - DNA, 963 bp, Cannabis indica
atgtggaagataggaaagtaaatgtttacaatcattgacaaccaacccaaaaacagaggacatgcgatgagaggtacgaatggcctgaacggtgagcatactgtcggtttcaatctcaactttatcccaacccttagttttgatccaactaagagcttccttgacacctatggcttcaacaacttcaggtgaaaacgacccccgattgcatacgccttgagcaccaaaaaaaggcctaaggagttccgtgcaacaatgccgtagccataagagccttccccttcaaagagagcagcgtcaacattaatcttgattgtattagatgctagtttagtccattgctcaaccttagagtcattggtttcaagcgccaatgacaataagttttgtttatcttgagctttacgccattgatcaagaataactaatgctgatgtagaaacttgttggggagaagatgtttttttattccaaactaggttgttgcgtgctttccaaattgcccaacacaacatagcaattcggcatttaaattcagtatcagaagtttggaatatgttgcagagccacatacctgctgttgtattgggagcagtatctaccgtgagatgtgcataatcccagcaagaacgggcaaaggggcagctgattatggcatgggagaccgattctgggtgatttttgcatacagggcagcttgaagaaatgtctacatgcttggtagtcagctgtaaacaggtggggagaacattcgaagcaaccctccacaagaaattcttgactttcagtggaatttttagctgccaaagtgagcgccagaacccagaattgtctgcaccagcttgctagtttttcggtttctgcagcaaaaagtaagcactttaaactgagaaagtgccattactttccccaatccaagaccggcagtcctctccagcagaggcacttagaggcagcccaaaa

SEQ ID NO: 232147 - DNA, 608 bp, Cannabis indica
ttatactgataacaagatatctagctatgattttgatgaagtcagtatttccaaggaagtagtggagaatttgcttgaaatgcttgagagttctatctttctgtggtcttcatataactgagttatctgattcaattggtgaactaaaacatcttcgctatttagatctttctggcacgaagattgtgatgttgcccgaatctgtaagtgtattatacaatttacagacattgaagttagaaaattgtcatcgacttaaaacttggcctaaagatatgcatcgtctcattaatttgaggcatcttattgtaagtggaagtagactagttgagatgccaagtcaaataagtaaattgaggaatctccaaatgttgacaacttttgttgtggggaagaatagtggcgcaacaatagaagagttggcagtttttcaatgtctacgtggagaactttccattaagaagttagaaaatgtggtcaatattacaaaagtatccaatcaagtcaatcttctgaataagaatcaacttgagaaattgaatttggcatggagtgtgaataatgttgttgttgatcaaaaacatgaagagagtgtgttagaaatgctt

SEQ ID NO: 232148 - DNA, 1264 bp, Cannabis indica
aagtcgatctctgtctcttccttgctctctctctctttgagtttctctccttaatttgaagctttagaattattaaatttgtagcctaagaggtcctatttatagttcttgaaaagatagataaattcttttagaattaggattctatttatagtgctcgaaaagatagattagaatccctatagaattaggattctatttatggtgcttgaaaagatagatgactccccttagaattaggattctatttatagtattaggctatatctcactaaaataaaatatattactctatttatagtattaggattctattttttcgctatattttatcttcttttttttttgtcagaatttgcctgctgtaattattaatcatattattttggtcataactctctcgatattactcgaaattggacgatttaagatggtctggaaagctaagaacgagatctaaaacttttatgcttagttccaagtttagttatgcttcttagatcatcaaaatttgtaattaagctctgccttataaaatcgagctcgccgacttccattattttccaccaaaatatgttgaattccctccaaaagactctaaatgtatgaatagtctttaaaatagtctaacaaattagaatcacactcatcaataatttaaagaatcaatttaagaatttttttttatcaataagtgaattttattactccaaaacttaatcttttacatcctattagcatcttcatccgaagacctaatattttaatgtatacaatcttttttcacatctatacatcctttgaataaaaaaaatcaaaacaattctgatttacaaatttgaaaactaagcacactcaatcagcttgactttaattggccaacaacaaatggttctactcttaacatcttccttagtcttccgaacaacctgctcaactgcaatggcttctgaattccataaaacaccattacgaaccttccatatttgatacacaacagcagcaacaatagctgctaaaatggctttttgaaaagagttaatttttgctcttttaatccacttgagaactcaaggctaatgtttcagctctccaatctaacaattttctttacttgagatagataaatgttagagaaagcacacgagaagaataaatgattagaagtttcggcctggtttctgcaaaccaggcagaaatcctccctaataatgttcaatctatgcaatctttctctagttttaagcctatcttggacaacaat

SEQ ID NO: 232149 - DNA, 3767 bp, Cannabis indica
ctctctctctctctctctctctctctcgtctttggtagagtgaagagaagactagcaaagcccaacactagtgggccttacaggctcaacactaataggccttacaggccccaacactagtaggcctcacaggcccatttgttttttcttctttttcaataatactactttttttcacaaatccaaataatactcttaacagaaaaataataatgcattcgtgtatagggcagaagaatctcctttttacttttctccctttaatcattctaaaagcataatatagtgtttggtgattgtcaacttggcaagtgatgtgtttttttttttgcttcacttttaagctctataatttgcagagcaacaaaggcaattctttcttaggaagaaaataaaaggcaattcttttagctgttcctctctctcttcttctgatctcagttgtagttggagttggcttggctgggtaagcttctcaacttccatgctattattagtttgtgtgattcatcatatatagttcaattcaattcatgtagaataataaatagatcacttttgtttccatattccaaaggctgatgctttgttacactgcttttctttatatgggttaaataaattacatgactatgaaaatgagatttttcttggattctagagttgttacttttattcaatccaatcaattggtaactaagctaaaaaagaattagtttttaagtgaaacctctttccacttgttgctgttgatcacatccacaggaacacaaacacaagggtaattagtaattacagctaattatggcagaaagtgaggaaattcagcctcttgtttgtgataatggtactggaatggttaaggtaagcaatcataattctctcatctctgtcacacagagttaacattgatggttataaaattttagagttgatcttaacaagaattagaagtgtgtttgtttgactttgataggctggttttgctggggatgagctccaagagctgtatttcctagcattgtgggtaggccaaggcatgcgggtgttatggtgggaatgggtcagaaggatgcctatgttggagacgaggctcaatccaaaagaggcattcttacactcaaataccctattgaacatggcattgttagcaactgggatgatatggaaaagatttggcatcacactttctacaacgagcttcgtgttgctcctgaagaacaccctgtgctccttactgaagcacctcttaatccaaaggccaaccgcgaaaagatgactcagatcatgtttgaaacgttcaatgtccctgccatgtatgttgccatccaagcagttctctccctctatgctagtggccgcaccacaggtattagaatctaatccttgctaattgattttgatattaaaattcatgtttatgttgatgttgttgttaggtatttcttttattgaattaaatacatgttgctaattgatttcgatatgaaacctcatgttgatactgttgttgttgttaggtattgtaatggactctggtgacggtgtaagccacaccgtccccatctacgaagggtatgcgcttccacacgccatccttcgtctggacctggctggaagagacttgacagacgcgttgatgaagatcctaacagagagaggttacacattcaccacaaccgccgaacgggaaatagtacgtgacatcaaggagaagctggcctatgtggctctggactatgagcaagagcttgaaactgctaaaagcagctcatccattgagaagagctatgagcttcctgatggacaggtgatcactatcgcagctgagcgttttaggtgtcccgaggtgatgtttcagccatctctgattggaatggaagctcctgggatccatgagactacctataactctattatgaagtgtgatgttgatataaggaaagacttgtatggtaatattgtgcttagtggaggttccaccatgttccctgggattgctgatcgtatgagcaaggagatcactgcacttgctccaagcagtgtcaaaatcaaggtggttgctcctcctgagaggaaatacagtgtttggattggtggctctattttggcttcactcagcacattccagaggttttttttttcttctcatatctttttctcttctttttacacatgttgaaatggcttttttgtaattttatctactgaattgactgcagatgtggatttcaaaggcagagtatgatgaatctggtccatccattgttcacaggaagtgcttctagatatatcacatatataaatatatatatatatatagagagagagaaagagagatgatatcattgatgatatagtgtggtttggatttgtcagtgattgagagagagagagagagagagtgtgtgttagtttgtttgttggctttttcagtgtatacgtacctattagttattccggggatgttgttgcttcttgcttgtttttatctgggttgagtttagaacaatgagaattggatgaatgatatgataagatatgatatgattttgcctataaatttatgatcaaatggtatgattcccttttcctttctctttttcttcttccataatcaaatttcctagacaagaaatcaagacggaactgaagtccataatcaaacatctaaacacaaccacaaggcctttgccatgctgaaatgtaaaaattcaccacccttaagatcatagatggagcctagagcagcaattattgattatatttacacacacatatatatattcattacttgctattagtacctaaagttaaagcagataaagaaatgggaggagaaataccagatgagattcacattagaacttgtatttgcaatttttgtacatagtattagtacagaaacagagagagaaacagagttactaaaagtcattccatttgggaattgcagctttccatgtgttgatgtggagttaagggagaaggaggtagacaagaggtacggcaagtgggacaagaggagtgggaagacagccactggtgtatgcattggtcatgaaatccatggttacatctagccatgacccgaatcccctgccctcctcgaattccgacaagcaaatggcacactctgtctcggcccctgccagcttagtctgaacttcagccgagtacaccagcgctggaaccccctccagcgcagctgcagccacacctacattacttttctgctgttgctgctgctgctgttgctggtgttgtagcctgctgctgccttcggtggccactgggcgactacgatggttgtgttgttggccacgaaggaagcaacgtatggcggtgttgagagccagggcgcaaatgagtgcacacaaaagaatgatgaggatcatggcagcgttagcttcgaaatctgttgtccccgagtaagggtggaggtggcaaccggggccatcgcattctgatgttgtggttgtggatgatgctgctactggtggggagaggtggatcttataggcaggcgctatggttgctctcatttgcctgagttttgaggggtccctcttcttcttctcctcctactttttcctcctatatgttatgaaagagagagagagagagagagagagattgcgtggagtttgagattaagatgatttatagtaaaatgaaaggaaggaagaaaacatgaaatgcatacgtgcactagaggtttatttttctcatgtgtgtacgctcgtttaagaacccctctctctctc

SEQ ID NO: 232150 - DNA, 932 bp, Cannabis indica
tgtacttttacggaatgtattctttggtacattagatgagtcttgggtacattaaatgagtgtcaagatacgtttctactttttaaccctaattacccttagatcaatctcaaccgtcagatcaaataactttctcatctaacggctgccgtacatcacggattacaatccataaaaatacaataacggaacaaaatcatatctctatatatataaattcaaagaaatattttatttcaaaatttaattctagtataatttggaaattagccaacattatttttgttcaaacgaaaagcactacaataagtcatcgcagctttttcagtcaacgaaactttaaattgtctatttaagattttttttttagaactatgacatatatttattgtattttttaaactacatttataaataaaatgatggcatgagtgtttagttacttaccacattaatactacatgtataatttaatattaaaaattagatatttttaaacaattattaaattaaaaatcaattaataattaagaaaattacataaaactaaattaaaaaaatttaaattattttttcaaattaattacacatgtgatattaacatgacatgaagtggttaagtgacgtcaatagtatataatgggttctatacttatttgtttttattgaatttgtatatttttcatcctattttattgaattttttaattttaaattaatttattgcattaaatttgattttattttaattcaatttaattacgtgtatgataaaatttgactgaaaaactaatttacaacactataaataatattataggtaatttataaattatttttatttaatttttaaattaattaatttctatttaataataatttaacaactaaaaatcaatataatcatcttgtttatatatttaatgtaatta

SEQ ID NO: 232151 - DNA, 1041 bp, Cannabis indica
caatttttaagagtattttatccgattctcactaaaataaaaattgagatatatatcaatgggataaaaactcatataaaaattaagataaatggagattttttatcctgattttctaataaaatcgaaattaaatgtcaaaagataaattttttaaaatatatatacatcaaattttaattatggaatttgcctcctataagaggtactgaaataaaaaaaataaaaaaaaaaacccaacaaataaaggctagttttacaaaaaagaaaaaaaataaaagacagttggagacaacacacaaaaatagaaaataaagggatgcaaataaagaaaaaaaattaagaaaaaaaaaaaggaaagaatcaacatattaaagaatacatacatagccaaaaattgatttacagctaaaaaaaaaatacagaatatgaatcaatatataacatgatacaattaccaattgccctattacttttcatgtaacaatgggtaagcctaaaaaaatgaaaccttaaaagctaaatgttccttttatatgtgtgtgtaaaggccaacaattaagaggcccagatatattgggaccttttatcccatttcttagataaaaactgagataaaaagtctcacttaaaatgttaaggttgtgtttggtaaatgcataaaaatagcatttccaacactattttttgtttgtttgccaaacaaggcctttgtttttaaggttccgaaagtaaaagtgggaccaaaagtttttatcccactttttaattttttcaagtgtaaataaaaagttttttttgttgtagtgatgactaagaagagtaagacattgttgctgaaagaatagagaaccagtcagcaaaagaatccccatcaatacctttaatagagctattgaactaatcccaacatagcttgacaaaaacgaagtctacaagtacatgagccaaagtttcactttcaatttgactgaagaaattaggttctttttctagggcaggagtcggcagcttcaccggatgagagaatgagaaaagaaa

SEQ ID NO: 232152 - DNA, 2754 bp, Cannabis indica
ggagagagcggatcaccttgtcgaattcccctggttgaacaatagggcccatctcatgccacccatgtagaatcttgtagtgagccgttgaaacacattgcataataaggcgcacccaactttcaacaaaacccagtttcctcaggacagcttccaagaatctccattcaatgcgatcgtatgccttgctcatgtcaagttttaaggccatacaaccggtctttccttgccgctttcgttttaagtagtgcagaacctcaaaggagaccattatgttgtctgagataaggcggcccggaataaaggcactttgagagtcagcggcaatagaatccatgaaaggcttcattcgatttgtcataaccttcgtaacaatcttgtaaagcacattacacagggctataggccgcaaatctttcatagtctcgggacctttcttctttggaatcaaaaccacattagcttcactacaattctcatcgaagacccccgtagaaaagaacctctgaaccaccatcaccacatcatgtttcacaatattccaacacctttgatagaagtccggagtcattccgtctggtcctggacttttatcaggatgcatttggaagactgctaaccgcacttcttcctccgtgactggcttggcaaattccatattagctaaatccggtaccactcgatcaatgctgccattcacctccatgcactcagtatccaaagcagagaaaagttcagcaaagtagttaaccacaacatccgccaaaccattgtctcagtccacgaattggccttgagaattttcgagcttcaagatgtgattattatgccttctattacttgttgctttgtgaaagtacttgctattttgatctccctctttcaaccaaaattgctttgctctttgtttccagaaaatttccctttgatcgagaactgtgaagagttgctttctaatctcattgtaccgagcaacaaatatatcatcccttttatttttcaacaacttcagctcaaaattgcattcacgaatccttcttcgaaaattcccagttatctctttcccccactgcgatagagaatcagtgcatgaactcaatttaccaaaaatacctcctgtaccagctttataacaacaatcttcaacaatttggtaacacatgggttcctttaaccaggcgttctcaaacctaaaccgatgcttcttcaacattttctcaatagctacgggttcaaggaaaataggggagtgatcggaagtagatgtttcaaggttatagagctttgcaccttggaataactgagaccatgcttcgttgaagaaagctctgtccaatcggatttccacccacaaattcgaacctctgaacttttcccatgtaaactggtatcccgtaagctccatatccaccaactgacagtcgaaaatggctttttgaaagccctccaataagccaacagggtatggttgtccaccttttttgtcttcctggctaaggatatcttgaacatcaccaattaagcaccacgagagagatgaagccgaaaatagagtacggagaaggttccacgattgattcctgctatttctgtttggctctccataaaacccggtgagtctccaacttgtgcacccagccttatccactctaatatcaatatgattattagagaagcccaacaagacaccctcatctttctctttccaatacaaaaccaatcaaccactcaagccttgggcctccacacaaaaagatccttcaaagcccaactgattgcccacccactcagcccttttttttattgcactttgtttcacataaaaacacaaaatttggtttcttttgagtaactaactctttaaggaattgaaatttctgttggttcccaagcccacggcaattccagctcaagacattcataatgcttggcgggtttggaaaccagaacccgccccagacaagttttttgggctaacttcctcatgattttccattaccacatcaacatcccttatttcataatgtgcactctcagctgtgtaattgtcaaaatcatttaaaatagtttcagcactattcaattgggccgacccattatcaccactagatgccaacatattaaatgtcctccttctcttagagtccaatacaaggagagagtcaacaatttcgtttccaccagatgtgactttccctttttgagccattgacttaccatttaaactattccttggagtttccataatcatcacttccacatcactgctcatagcttttcctctggccgattctaatcccaccaaattagttgcattcacttctgtaatatgtggggacacccgagaatgaatccccagatttccagcaattatctccggatttctagcattccccatcgccatcgagcttcctggcatcgccgtagctgggattttcatggctacacccaaccggagccattgagctcccatagtatgttgtctacgccgtggagccaccttcagggagagatcgaaagatttgacgatttgctcaggaggagtatcaaataacctatcacaaaaacgcttcgagtggcctagaacaccacaaataaagaagaacatgggtaagtctttgttggaaattattttaccaggatctatttactatcatgtatgttggattaacagcctaatatgaattctaaaacaatgaaaataaacacatataaagttagaaaaccttacagtgggtgcagcggaataatatg

SEQ ID NO: 232153 - DNA, 1352 bp, Cannabis indica
cccaccctaacatcacagttaaattttatccaatcctgaggaggaggactccaggacaccctcgaggttggagttgggcaaggcaagaaagcatcatgtaactctgcataagaagtacaaatctggtcaatacatccggaggtgagttattatgtatcaaatcgttgcgcatcctccagatggttttgaacaacaatcgaagcatacagaaagacttcttctactcggatacccctattagtgagattccatataaatttgacccaatcccaaactcgaattccattgttacagataggataaatgccccacggtgaagcacaccaaagatgcatcgccatatcacaagagaggaaaagatgttccatggattcctcccccatcccacagaaaggacaatttgtatcctctatgtgaaatctttttccaatcacggttctaacaggtagcgcattagagaggatgcaccaccaaagaattttatgccgctccaaaattttgctattccataacttattccagagcgatggagcaacctcacagtgaggggctctttccaaagcttgtgacacgtaagccgatttgcacgtgaattacccattattttccaaggtccaaacccatctatcttctccttggcccgaggtttgccacctttcacaattgcagatacagtttcttggtcaaaaagggtgtttagctttgtgacatcccagtcgccattagaactcaagagatcagccacacagttattattggtcgagccaacgccattcggttttgggacaaaaccgaatatagtgaggaatccatggatccctccacaaatactacgtctcccctttccacttagccaccactttacaggctcctttcctcaaaatttctttagctttcacaacatttttccaaaactaggagtccgagtctttgtagttacaactgagaaaatctttcccttttagatacgtggcttccaatattttacagcataacaaataacagcctttcaacatgttctacccccacttggccaggaaagcccgattcatttcttctgttttcctaaagcctaatctacccaaagacttaggaaggcagagtttatcccaagcttttaaatgacatgaccatgattctttttctcgaaaccccaccaaaaatctctgactaatttattagccagaaaagtcatccaattgaggtgactttgtggcaaaatttttgacaaattattgtttgtagtgccttgtttgtaaattatcaatttaagtgtgagtttcataactttaaatttcatgataaaaatatttatattgttttaattaattgggtaaatattattttggacc

SEQ ID NO: 232154 - DNA, 857 bp, Cannabis indica
gtttataggcatccatcttacaacaatatactcctagccctgaccctctggacgagggggacctttcgcgcctccaacaggctctgagtgacttagaggagtcccgccgctagtgtgaacctcttcaaaaggaggtggaccgcctccaagttttgctatccaatgagcagtcctcagtggctagtcttaccgagcagcttgaggagtccctctccattcgccagaggtatcttttgcactcgtacgtccgaacaaagaggcttagagctaggattgataagttgcaacatcgcctctgcaccattaaggcaaggaacaaggaagagttagaagacaagattgagcgtctgctatacgcggtttggatacaaaaccctgacatcaactatagtatccttggttcctttgcagcacaaatggttgaatccttcaaggccgagtgtggcgatgcggtcgcggcgtgctagggcaagcgtcggcgtgatgcaagtccctttagcagttgcaactagtaggctctccttcttgtggtcttatccacgaagactttagggactttgttatcttcttttatatttctgaatgattataaaacttctacctttatttcatgtatgcatgacattgagaattaaccttggtcaagtggctctgtctctttggctgagtggttttccttactttgttgagtgaatcgtttcctttgtattctttcttctcttcttttttcttttgtgataccggccgagcatctcttgggatcactctttggtcatgcatcttttattgttgtggtcagcgggttttactttgggggagtttggctctttgagcagtctccctcttattgtaaatcc

SEQ ID NO: 232155 - DNA, 702 bp, Cannabis indica
aaatgattaatcttatttagtacgatttttttccacttgtttgccactgttatcatcatagggtaagaaaagcaacttaaaatgattattgaaacacaaacacaatgacacctagtaatactaccatgttatgaaatttcaatacaaaagtctttgaagcaatacagaaacttcctcaattttgtatttttaaaagcctaaagtaattgcaggggaaacctacaaaaagccagcaacacagccaagcaaactttctgaagttttatatgtgaaaaggaaaagaaagaatgagtgttttttaacatacccgaaatactgatttaaaaccaatacccttctgtcctatatatccagcatttgatcctttctttgttgaacttccaacatcacataatgctctaatattctgggcagaaaaaccacgctcattgtttaaaacaataatacctgaatcctgaagaataaatgtcagtgttggttccacgttttctgggtagatattgtcatcagcattctgaacctgcaacaataatgaacgatgagatgtatttaaaagaagatacaaaatcatggacttgttcacgaagcagactcaaacacatgagttgttgtcaaatcaataagaaaatatatgtcagaaaagaaattaaataaaacacaaataaaaaagaaaagaaaatcagatatccccgacataaaaag

SEQ ID NO: 232156 - DNA, 1169 bp, Cannabis indica
gattatatttatgatcagaaaaatttattcgttgcaaaagctctgtctataagtaccttcaaaattatccaagagctcaaggttttcttatcacctaagcaacttgaaattttttcaaaactatgatatttttatgttaatttgttgttgctttcatgtggttttaatgttattttatagtgattgcagatgttttgtagtatcgtttgctaaatactttattgacatgaaacatattccctccgaattcaatgttgagaaacactgtgataggctgattgtgatgttctacaagtatgtatgctcccatggaagaaatgaataatgttgatagtgatgatgaggctcctccaaaggacacaaagaagattttgttttagacccaaatttgtttatagttgttatttctagttgatgaagaaagtgttttttttaatagatacacacatttcaatgtagttgttcttttttttttttattttcccgagacttttttatttgttttagtttgattgaaagtgtaattttatgataattgtatttattttttagttaacttttgttgtttagttaacataaattttatacactaaaacaacataaaaagaacctaactacaatacttttttaatcaactaagcaggaatctgttttgcatattgttgattttttctaattatttgttaaaaagaaaagtgagtaattttttttctaaaagaacttattttttcacatagttgttttatgaccatataatattaagcaacatattcacaaaatcaactcttattgattcaaatgttacttttatgtaatatctatattaataatttcagtattcatttgtcccaaccatcttttacacaataaaaaaaaatataaaaaatatgaaaataaccaatgaaattatgtttgatcatctaaatatataagtgtagtagttttatagttgttgaagtgttgtttcttagttttcatttgtaatgtccctacatatttttctgttatgttctttttgtccacaattggtgcacttgtattgtttttttatttctcaagtcacagtcagccttattttccttggccttctagatttgactctttctataggaggcagcactacgatgtcttggaaaatttttggtagatcccattctcgttggttcccg

SEQ ID NO: 232157 - DNA, 842 bp, Cannabis indica
aacttttgctaggttctaccatagtcttgccctattgggaccatatctttaccaatatagacaaaagatggagactaatcacaacaataatcaagaaacaatatttatattttgtcaaaaactcataaagatggtatctttttcgtatcttgtttatttttttgtaatttgtttctttcaaattctgtttatattatatgtataattttttttaaaaaaaaaaaaatacttacattcttttataatatgtacacacaaaaattgtaacatgtagcaatatcaaaattgatattgacttatatttgaactatatgtgctttgttaaattattattaaggttctttttttggtactctttagtctttcctaaaaccctactataagctaccattaaatttcagcacacgcaaatattacaatcaagaggattattctagagtatcaacctacatatgaccttatttattgcttgatatgtaagagcttaaacaacttatttattgctagaatatatagccaataaaaccatgcataaaatttatggcttatgaaatatagtaataatgctcatttgatcatgctagctttatataatcgtcaattggtggtgcctgctgcctaataagtttattaatttttttttcttttcatgaaagaataaagaattagaacaaattctcctcaacttattattttggaatagtacaaatgtctattgaattgaactttctcaaaattaaagtgacatgaatggggtccctgtattttatttatttattttttgtggcttatgagacttattactccacttatttattcgattatgagtgccacaattcaaa

SEQ ID NO: 232158 - DNA, 683 bp, Cannabis indica
ttcaatttttttatttttatactatggaacggaatttttctcaaaaatactgtgtttttctttaaaaatattgtgtaagttttatattgtgtattgtgttaagtttttactgttgttttatggttgttttttagttgttttactgttgtttttatttgttctattttgcgttccactgatattttataaaaatataatatttttgaaaagatttctatgtgataatatttttgtaaaaattaactaaaattctagtatttttataagttttcctaaaaaataggctaactaaaacatatgtattatatattttttttaaaactataattatctagtatactaaatagaagcatttaacaaatatggtaacttgttaattataattagtttttgaaataaatttaaaaggttgctaaaatgtatcttaaataataataagatatcataatatataacttaaaaaaataattaaatgacattaagatgtctaatttttttctgataaagtatgtgataatttctctttgttgtaattcataactttttaaaattagaatttagacaaaaaagaaaaatataaaaataaataaacctaaaaatgagctcataatttaaaagtaagaatataaaaagtgatactcatacatactatctgttctaaaaaattataataaaaaaaaact

SEQ ID NO: 232159 - DNA, 1449 bp, Cannabis indica
aagatcagaaattattttatgttgcatggttcacatgattatatatgtaatatataaattctattaaatccagaacctatagttattcatgattatagtgttgtcaacacaatggaatataatcatgattatatatttcaaagtttaagtcccataatttattagtacactagatttatattgacatgataatcagcgataaaatttacttacaccttggataagtgttatgttttttccagggcattggcaaagtatgctagtatcggatgtatggagtatacatcggactggaccgatattgaaattagataagatatcataaacttaccgttatatctatctaagtcaatatcacttagttgatcttaggtcattaaatcttaatcctaagatggttaggttctggctaaaatctattatgtgtattctttgagttgttcgttaaagttgaccaattggattggccctatgcatacatcttgggaacatgatagtataattgagtgggagcgcttacatagatatgtaatctataacttctagaagtgaaacgatgattttctttgagcttggcttaacacgataatgattgagatctcattttagtaattatttagtttactgaaatattatttacaattagctaagtgttttaagaataaaatacattgaagggtggaacggtaaatttatccctactcgatgtagatcatctatagaggatctttgactatttggattaaaataataggtaattcaaatcacatctatttttttttttggtaatagttttatgtaattaatagttcaattctaaatctaaagtggagttacgagaattaataagttaaaaaatttacttggtaaattttgaatctacttattggaagcttgattacataggaccatggtccccacactaactgagataatattattttgtagtctcaattaattggtttcaattaatcaattataattctaaataagactatgacttgtttatgaattttcatcaaggaaggacttaattgagaagaaaagagaattcaaggtttatttattaattaagagacctttgatggtataattaataaatatataaatagtaattttatttgataattatttataattattaaatagatagaattagtatttaaatagctagagcagaaaattagcattactgaagaaagacaagtttgtttcattaaagaaatacaataatggcaaaattcaaactcatgggcttcactaagtggttcgaccatgatgaggattttaagccattagatctttctaatcagcccattaagctctaaccctaaacctaatgaatccttataaagagaaaagtatagctcttattttcagataacagttgacttcagtctcttttgtcagacaactagaaaataaagagagagcttcttcttcttcttc

SEQ ID NO: 232160 - DNA, 623 bp, Cannabis indica
aagtaaaataaaaataggaaaataagccaaatattacattttcaaaatcagaattacatagcttacaggtacaaagtcatgacataaaaaaaagtttccaccattacgtcacaatttagcttcagtaaaagttttcgataagacaataaccactgatcaatgtattgttgatccactggaaaagagtttattcaatcttcagtgaaaagcattttcttttagttgaaatctcattcagctgatggttctcattcgtagacaaattaccttatttatatttatggttcttgcttcaactttggtatttgcttaaatgaaacaggtcggtaccctcagattaaatgttttcagttttatttatataaaagataaattcattaacaattaacgattactgttacaaaaacacaacaccaaaaacccattttatcctatttgatattgacaaaactgtccaatcctatttccactacagcccggctaaaacggggcgaaccgcccgttaaggtctcagtctagcccgatggatggagccaagcataggtggaatgatcttttacaggtgtctatgaaagctgagaagtcaacttttagatttgcatctgaagcaatcaagcagggac

SEQ ID NO: 232161 - DNA, 675 bp, Cannabis indica
aacttggataattggtacccacctcacaaaacacaacttattaatttaagcttattttgccatatgtccttaaattatataaattttgataagttgatcctcaatttttattttttagtaaattagtccttaattagataaattttgataaattaatccccaaactttattttttagtaaattagtctctaaacttctatttttagcaacatttagtccctactcttagatattaacatttttatttattttatttactttaattaattttttgtgttaaaaattatttattttttaattttaatgttttgataaaaataattatattaatattaatatttttttatttttttaaatattcatataatgtatataattataatatttagttttttaagaaaatatttaagatatactttattcatatatactattaataaaaaaagagtataaatactaacaactcatacacttgctagagagaattttagtctccaaataatttatattttagcacttatatattatatttttattattaatttatgaatgtgtagtattatattttttttttttctaattgtatgtatattaattaattatttaaattttgcatcaatgttggtaaaatatcattgttcgctgtggaacataacttaaaagtaagatttaaaa

SEQ ID NO: 232162 - DNA, 1304 bp, Cannabis indica
aataggatagattgtattggggacaactacatttgcaaattctaagaaaacaaaagccaaaatccaaccttaaaccattttgtaagcttagaagggactaaaacaaaaataaactagactgcaacaaccactttcaacaattttcactcattatcccctctcaatctcaaactgctatgaaacttggttttcttcatcaagtcaatgcagaaattgaaaacaatccataacgttcagtaccacaatcattaattgtctagctttttaacagaaaaaatcatagaaactacaaaacccataaaattataaagagggaacgaaaattatagtacctctcgacgattgtctgagaaaaggcaagaaaacctgccatggcacttgaggtttcgctgaagaatggtccatccatgggcgacattccgaggagggcaagtggtgtgggtgagtaggtaacgatttaagtgggaggaagagtaagagagtgttggggttagagttggcgggcttaggtacagaaccggcgccattctcttcgcaactcctcctttgttacgactcggataggggaggtataacaatccaaaacacgttatttacacttttggcatttctccgtatatatattctctcgtataccccccatttaatatgaaaactagatactttgattaaataaaaattttacccccaaactatgccccttgcagggttttacaatttttcaatatattacattttatttattttgtgagataatttattaatatggtcaccagctatacaaaaacttattgaactaacttaaactagctcaaatatctctgatacgttatgtggtgaggtggtggcatgttgcttgactctatcgattgcgaaggatatgggttttaagtttgtcatcgtggagagcgactcgagagtagttatcaatgctttcaatggaaatgcgtcttgttgagtattgaaaaactacgtctctttttgtaatagtatactcctccattaactaccagcagtatttataaaaaataagaaaaatttgtaatttcgttacccataatgtagctaaatgggcgttcttcaaccagaagtttggggttattctagttgattccattccttctaacttgttatgtaatgaccgtgaggtttaccggttttttattaatctaaactacgcttttttttttaaaaaaaaaaaactaagactcaaatatagtataatactataatgttctaaaaacattcatataataactctaaaattataaatatccactccaaattcaataaagaaaatttta

SEQ ID NO: 232163 - DNA, 1387 bp, Cannabis indica
tgaccttccccaggcggtgtgggattgcacagcttacccggtgtttacccttacgaatgatgggactactgactgtcacattagtcatcttgggagggccacatatcgctggagaaagtagcaacacccaaaagagatatgtcaaggaaattaagaacgagtgatcaactttcgctctagaaccgtcaaagaaagctaagactaaggaacctccaattgtgtttatggaggaagacacaaagcacgtgaggtagccacacatcgacccactcatgattacaatccagctcgccaacaaaagaataaaaggggtgttggtggataattggagctcagtgaatatcccttacaaggatacactaaagaaaatgggattacaaaatacgaagttaaaaccttgcatggtgaatttgtgcagattcactggggacactgtcgccagtcaaggaattatcaaactccctttaactctgagcgagccacctatatccaaaatgttgatgcaagaatttctagttgttgacttaccatcggcctacaacatattgttgggtcatcatgcactaattggactaggggcagttagttcaattaaacacctgtctttaaggtttcaaacataggcagtagtaaatgtagtgcgaggtgaccaactacttgcacgagaatgctatcacattgagctacaaaataaaaaagctggtcatcaactaattgtagttacaactgaggaaggcgagaagcaggacgaggatctggatcctcaagttcaagatgaaaagaataaatttaatccaatcgaggaattggaatgagttattttagatctaaaaaatcccacaaagtgtgtattcattgggaaaaatctggatgaaaaactaaaatagcaactaataagttttctaaaggaaaaccaagattagttcgcctggagccactcagatatgatagggattgaccctaaagttatttctcaccccttgaatattgacctaaattacccagctaagagacagaaaagccgaccattggattctgaaaggcaagaggcactcatagaggaagtagataagttgttaaccaatgactttatacgcgaggtattttacctctcatggatatctaatcttgtccttgtcccaaaaccaaatggaacttcgagaacttgtatcgacttttcatatttaaactaggcgtgtccaaaagattgctttccactaccaaggatcgaccagttagtggatgaaacttttggacacgagcttatgacattcatggacgcatattctggatataactagattaagatgcatgtccctgatcaagagcatacaagttttgtaaccaacatggggctttattgttataaagtcatgccttttggttt

SEQ ID NO: 232164 - DNA, 985 bp, Cannabis indica
gaatgtagaggtctcctcccaacagttagtgctagttctatcatccctcgtggttgaatcgagtctttggtgaacccatatatcagtgatgtgtagggttttagatccccaatatccagtcccaactcctttagggctgtgaattataggatatctactaaactcccattatcaaccaacatccagtgtaccctggtgttagccatatgaaccataagcaccaacgaatcattgtgtgggaaatgcactcctcttgcatcttcctctgtaaaggtgaatgagttattgtctcccttaaagttctctggaggtctttgctctaagtttcaggagtgaggttctcactgtgctctcgggcatacttgtctctccctctacaactatcgcctcttatgcaaggcccttctacgatcattctgacatcttctacaactttggggactctgcggggcactttttgctagtgttctccatctacttgagttcttttgatgttcgcacctcctccccgacggcaaatggtgataggtcttgcttcgacacgatcaactggtttccatcaaggcaagtcttcgcgtattgacgacaatgagagcgtttttgtaacaattgtgtgcaaaagaacaacttggcctgagcttaccgttcccacagatgacaccaaactattgatggtaagaactcgtcaactgatctagtggccaaaaaatgtaaagtaacccaagaacaagatgacgattaagaggaagacgaatatgaaaagatatctgaaagttttctctctattacattcaaggtccgagttacacaaaatgattttccaaccccctctcacatatgagaaagagatatttataagctctaatggcctgaagtacaaggtgttcccaaggggacaacatgtcgctttcatgatgcacatcgcaggttcaagaggtgaccttacacctcgtacctttgtctggtgttgttggaaattatttta

SEQ ID NO: 232165 - DNA, 1292 bp, Cannabis indica
ttttctcttagctttttcatttagaaattgcttagatagtatatcattggatagatggtttatcaatcatacgcttatgacgtcactcaattttcttctatgaaattaagtggcgcagatgactatattccagataccctattccaaaataatataaatcctcgatcttagaaaatctcttacttgtatatgcttactaaagaaaacttagacttagagttaaactagtagtggggtcaaagatagaataattactcaagaaatatttggtataaatttaagtctttgacttaaattttaaatttcaaataaaaattttaaatttcagtttcctgaatacattcaacattacagtacaattttcacaagtttaatatttattttctgtcgatggatccaaactgtaggttaatgtatggattatgagttttgtattctgtcaccagaatccacttgaactattctaagttctctttgttgtaactagacctaagtcatcaaaaggccacaaccacataatatatatctatggcatttgcatcttattcacagttattttgacaagatcagtctttgtaaagaaaaaatatgccaatatccacttggaagtaggatcatctgtattcgaacatatggatgtacattcaggggtggatataagttatcgttaaattcttacgatcactctagactttaccgtatgcaaagaaatttgaaatgtttgagaaatttcatgaatttctagtgatgttgaaaaacattaaggtaagtggtaaaagatcttgtgaactgataagggtggagagatatttggttatgcagttcaaatatcattaagttgaactttgaatagtattcaaacttacctccccagaaattgagattgcatattgatgaaaattaaaggtctatgattagttactagcaacttcctaactccttttagggaaataccctagtgataggaaaatttcaaaatgatgaaatggtcgtatacttagtgtaaactattactagattcaaggatgtcctgatcgtgaacttaagaaaatatagaattgttactaaggttttcttgtttgatggctattctaaagtgattaaggggtggaccatcctacggtaattaagataagaaagtgtttgttttaaaaaaaaaatactacttttctaagaatatgactaaatctaaaaataaagtggcaaagcaaaggagatatttttctattccaaagtgttctaccatcttattctatataagatggtccaactgtctctgttgtcttgacaca

SEQ ID NO: 232166 - DNA, 724 bp, Cannabis indica
aatggtttcgattagacaccaacactgacattatattcattatataaatacaatttgtttgactgatccagcactgaccgcgcagcaattaagataagtaaatgcttcttccactaacccatatatattatacaagccatattgttcatcgtctaataattaatattcataaatatttatatatattaacatttacctgccttttatcaatttgtttatttcaagttacgagtattctacatatatgaaattttattcggctaaactttttaagtacttaattttttattaaatttaaattttgatactaacatattctaaattattgatcattattaataaatttaaaatgttatttattttttatgattgattgtcaacataaattatttatgggtacactcttttatacgtttatatcggtacatatttaatattattatttaataattataaaaaattatttcaaaatttataatattttttatttgtataattttattttattttaaaataataaattagatgtactaatataaacgtgttatgcgtagaaaagtgtacacatatacagtcattgtgataattaactacatgatactttaaatttgttaataatttaatagtttaaatgattttactgttaaaacttaataaaattaagtttaagtaaaacaataattatgattatttagcccccaaaaattctaaacttaattatttt

SEQ ID NO: 232167 - DNA, 1257 bp, Cannabis indica
attaggggaaggtactttacccatgatccttcaaaatctaaatcacatgcccgaagcatgtcttctagaatctaaatggtcctttcggactgtccatctgtctgaggatggaaagctgtgctaaatttaagttgactacccatggctcgatgtaagctctcttagaatattaatgtgaacttcggatccctatcagaaaaaatggacgttagaacaccatggagacgaactatttctctaacatacagttctgcatactgatcaatggaaaaatttgtctaaataggtaaaaagaacattgactttgtaaacatgtcaactatgatccacacagagtcgtactgtcccgtagtcctaggcaatccaaccacgaagtccatggaaatatctttccatttccattccagaaggttcaatggctacagcaaacctgaaggcctttggtgttcaactttcacttgctgacaggttaaacacttagcaacgtattttgcaaaatcattcttcaatctagccaccaaaacatggccttaaggtcttgatacatctttgctgtccccggatgaacaaaataaggagtcgtatgagactcatttagaatttccttcttaatatcatcatccaaaggcacacagatacggttcataaaccgtaacatccgagtattattgaatgtaaagtcactagtcttgccagctaaaaccttatctcatgatttcattaagtccagatcttgcaattgcgcttctttaattcgttttaaagagtagattacagggtaatgttagccaactaccccacaacaaactcaattttagctcgagccatctaatcttctagttgcctagagatttgtttcattgtattcatctggttttgacatgtcctacttaagcatcagctacaacattggccttcctaggatggtaaagaatttcacaatcataatcctttaccagctcaagccaacgcctttgtctcttgtttaggtctttttgggtaaagaagtatgtcatacttttgtgatcagtatatatctcacatttctcgccatataagtaatgccgccaaatctcacatactactactgcaagctctagatcgtaagtagggtacctctgctcgtagtcttttaactatcaagaagcgtaagctattacctttccagtttgcataagaacacagcctagaccttatctcgaggcatcacaataaacaacaaacttttccttatcagaaggaagagttaatactgga

SEQ ID NO: 232168 - DNA, 1151 bp, Cannabis indica
atgcatgacaaagccatgttaggattgtaatcagttttctatttcaaaaaacaaaacacaattcctgactggagaattacatgctttgcgtgaagatatcaagggtcgactcatgcaaactcaacatgaaagaacgactttaagaatgagcttcgtagaccatacaactcggccgtacaagggaatatctaactatattgatttcacgatacaagttcaacaagatttagctacagcttttctcgacgcttcggaggatgaagactttctgtggaggaaactacttttcgatgtagacaatgaaatcaattatcatgatgccttactttacatttacaagaacaagtagtatgttaagtatgataattgtttcctcttaacttttatggtaaaatattatatgttcgggttaatatttatttttctcaaagtatacccgattatcaattaatacgtgttaaaaatgtttgactaaccttgtttatgcgtaatttacatatttaatattatttcttatttaacagtttttatattaatacacattattcttattaaatgcacataaaccttgtaactcccaccattaacattaccgttttttttaaaaaaaacacataaattattttttttattatcctttcgaattggcccaaattacaaagtaatgagaatatctattagtatttttttaacagatacaatatttattattaaagggaactactttaatgcaataatttattcttttttgatgtaggcattaatgtggaagaaataaaaggacatttatccttttttgataggaagttggctggtttgaataatgcagttggtagtcgaatggaaattataaaatcagaagatataatgttgaactcattagcttcctcttttttttttgagaaaataaaatctttggacattttgttatcaactagtaggagaaatgaaagtttgaagatgacactcgtccctaaagatgagggaagattagaggatgggttgattaagagaaacaatgattgtattttaggcaataataatgtgtaattaatttatcatgtcaataaattttgtttttctctatttattatgtgataaaagtctctttttgaaaaaaatgaaaactatttgatttatttgggagatgt

SEQ ID NO: 232169 - DNA, 1036 bp, Cannabis indica
gtgttctttgataggaaaccgatggtgatgaagccgtggaatcccatagacgattttacgaaggaagaggttattaatgttcctacatggattcaactgaagggtttggacatcgaaatattggggggagactgctcttttcaagattgtaagccaaataggggaaccattacaagtcgacaacatcacaaataacagggatagattacaatatcccaggattctagttcaggttagcctttcacaggactttcctagctcgatttcttttactgatgagtttgatcatgatattgagttggaggttaagtatgaatggatccctcttgtgtgctataattgtgctggaattgggcatgagactgataattacaggaacaaggagaaaggaaaggaaaaggggaaccaggtttgggtgccaaaacaaaagcagagtaaagttgtgaatgaaacagatggtgatggttttcagagggtgatgaaaggaaaaagagttgtagtggatgaggaggtggttccaactgaggttggaaatatgtttgattctctagcagagcatgattttatgggagggggggggggaggatccctctacctccaatggatagattgctttgttggaatgtaaggggaattaacagccaatagaagcatcaagaaatcaagcaattgattcactctaagcgtgttggcttggttagtctccttgaaacgaaggttcagaataaaaatatgggtaaattgtatgctagtattttctcgggttggtgtttttcgaataataatgctagcttgggtggataagggaagaataatattggcttggcaaccaaatgaatacacggtagacattcggttctgttcaagccaattgatgcattgttctgtgcaattcaaacaacgttctggtcaattccagcttacattggtatacggattcaatgatgaaaatagtagagaacagatgtggagggatttggaagtattaagtaaaaatattagagaagcttggctagtcttgggggactttaatgaa

SEQ ID NO: 232170 - DNA, 788 bp, Cannabis indica
cagatctcgcagatggtgctccaacccgttcgaactccgcctgaagcagtggcggctagtgtggaccggcagcaacgtgcggttgaaggaaatgggtcgtcgacgggagaacccagctccatgggggctcacccgaacgttcaacgttcacccacaggtccgagagtgacgttaccgcagacgattccccaatttgctcctccgccgggacctccgattcaattgggatcgttttcgtcagggcccacctacaatcaggacttccgaccaccacgcatggagattcctctatttaatggtgagaacccgaatgcttggatttaccgtaccgagcggtacttccttctcatgaaactaacggagtcgatgatgttggaaacggcgatcgtgggactcgacggtgatgctctgtcttggttccaatgggaaaatcagcgtcgaccaatcacttcgtggagtatgctgaaacaattgatcttactccgatttagagccgcacccgtgggttcactctccgaagaattcttatcggtggctcagaccggaactgtgaaagagtaccgcgtcaggtgggaggtgctggcctctcgtgtcgctgatgtgccagaacacatcttggaggggtcatttgtgaaaggcctcaaggaagaaatcaaagctgccctctatttgcttcagcccaagggattggcagccataatggacacagcccaacgagtggagggccatcatttactcaatttgggcccagccactaggcccaaccataccaagcctaatttgagccc

SEQ ID NO: 232171 - DNA, 663 bp, Cannabis indica
tagttcggtaatagtctactcccattaaattttattgacttgagaacaaagaacaaagtgtttcctctctcaaggctctcacaatgaaatctctgagtatttctcttagatctctctctaaagcaattatttagatccatttttcagtgaaactagatcactatttatagggccaaaagcatgagggaatgttttccttttgcttacaatatctatacttggtaagaacattcattagatatttagaatacatgaaatgggggattggacagtctgccgtatccctttgatacaatcccatgattatagggattatctttgtgcttgtacttcatgatatcatctcttgaagtaattaagtcttgatacacggctcaaagaagcaacttcactttgttgctaggacaatctatcttgtatgctgctcggtcaagcagactttgtgtgtgcagatgtattgcttgaagtctgttcggagcatttccccggccaagtgtaaggaatagcaaacacgtatcaccagcatatgttgccacgtcatagtcaaaaaaatgagataacagtaacatatttatgtcgtaaattactttttaatttaattatttttataactattttatttttatttaaaatttaaatatgtacatttttttttaaaaaaaa

SEQ ID NO: 232172 - DNA, 1720 bp, Cannabis indica
tgagaaaagtggtaaaagtaatttatgaaaaatttcaaccctatttttaagccaacttgtgaaagggtataatcaattcaaaacctcagacgcttcgattttcccccaaaaattaaatattgggaaatcaaaaccaatcaagtgtcaaagaagggtaaccgtcaaaagcgtgcaaaagaaaggcgtgtctcgaagtacgaattaataagagcattaattagcaaaaaactgaagagactcctagtcagaatcacattgaatcacgaacagacgcattcaacacgtgtcacccactcagaagtgtgatcggctcaggtgaagtctacacgtaacttcggaagtcccgtacaaactaggggcagatgttatcccattttttgcactatgacgtggcaacacatgctggtgacacgtggacctgattccccatatatgtccgagagatgctgcgagcaagccgtagcatatacctacacggacgatgtcttctccgccgagcagtggataatccgggcagcgcatcaacacttagcaattccagaatttaaatcgtgaagcacaaaagcaatccctataaatttgggatcgaatcaccaagatatggaaatttgtccaaataccacaatctgtgtattctaaatatgtaatatatgttcttactgattatagatattgtaaggaaaaggaaaatcttccctcaagcatgtatccctatatccctataaatagtgatccattctcactggtaaaggggtcgaaagaattactttagagagatctaagagagcatactcagagatttcattgtaagagctttaagagaggaaaaattgtattctttgttcttgagttaatacaaatcaatgggagtaggctattgtcaaactgaatggggccgaacctctttaaaaaccttgtgttctttacttatttgcttatattatacgtaaactgtatttcttattgcttattattaagactcattgtcgttggctaaaagcgagatcaacactcatgtttaaaaaagtccaacaagaatttaataacaatacattatagtccaacacatcacagtacgactaaattaaaaattcatttttaaccttggtagttgtaagtgtttctgttgtgccccttggcaccgcactcgccacaatttcgtggtatcataatcctttcaccattacaaacagtttggtttgacttaattcttccaaccttttgcttcttaggtcgccctactggttgcttctcaacaggcactccaactatcatgttctctatatcatcaggaaattcctactcatcctcatcaccaactggcataatacttcgttgctgagctgcagcacatgcatgaggacaaggaaactttaagcactagtacaagctccaagaccaagtctgttcctgcaagtacactatgccaccggtcttaactattcctccagggtgaacctgcactgtgtaaggtccacatgtgtcaacgttcaaatactgagattttttaaattgcaatgccaagtcctcttccaattctggtgctagggtcttcgtccacttttcagctttttctttttgtgtagcaaaccactgttggactttggacctcaggaatgctacagcagcagtaatcagaaagtatgactgaactcatttttcaaatctaatttcctcaagatattgtgcaaccgcagcattcattgcccgaatgttctca

SEQ ID NO: 232173 - DNA, 1139 bp, Cannabis indica
taagtatgagccaagttgcgaacttcagtgagtagtttgacttgccaatgagcagagggcaagcgagaagtgggcgaagagctcactggaggaagttctggtgcagcagtggcagcagtagcagcagggtcagaattggtaaaggcaatcacagatggaggaataggcttaccaaacactggttgaaatgttttgccaatggagggcacaggcacagtgacgtcctgttcaaggatagttggattacccctcaagaccaacctctgaatcaaactgggatatggaagtgtatgcttaacccctttagccttagcagaatccaatatgcgagtatagatcatagatggtaaatcaatggacacaccagtaccaagagcatataaaaagcgagcagtgttatagttgatggtagatgtgtgtgaattagcccaccaattggataaagcaattttatgaagaactcgataaaattctgagaggatagtgacaggaaattccttaccattccacacaaactcaggttgaccagtaagctcagcaccaacatctttgaacggaggcttatactcatcagtgtaagtggggtgagctagcctagggatttttagaatgaggctaatggtagacggagcacacctaaaccaagacccacgaatgtatgcttgatatttgtgaggactcttttcattgataatactttcatctaggttagcatagaactcacggacaaggttcacattgggcgactgtaggtgtgtgactgtgcgttcccattttctagactgaacaatctgactgaccctatcaaaatgcttcaacttaaccctatactctggccacagaggacgagagcaaacattgtcttgaaacctaagaagtttgtcatgggagtagaagggcaacccaggagagggttcagactcagatacaagacccttaccttttttggagtcagactcgtgaaccccctgactagttttccgtttacgtgacaacggacctacgggcttaggacagggagggggagactcagaggaaggtacaggggacgttgacctaggaggttcagtcgacatgggtggaactatggatagaggtggagaacacagagaagagcgcgtgaaacgtttagggttcga

SEQ ID NO: 232174 - DNA, 1276 bp, Cannabis indica
taatactcctttgcgtgatccccccaccgagtagagggcatcctaaacctaaggagacgttcatcgaaccctataggcctaaggctaacatattcatgagcaggaggggcgtaatgtatcattaaagtggacttaccagaaccagaagtgctggcatcgggagcccccgtattcggcacctagacagtaggccttggtatgggggccctcctctccaccgggcttccaatatgaaggggcctaccggcagctgcctgggccctcctctcaaccggggtcccaatacgaaggggcctcccagcggccgcctgggccttagtgtaagccttctcttggcccttccagaagaggtactctcggtacttatcttcctccgtggcaatgatctcctcccggaatgtcttctccgctgtcggaacccttacgttcgggcagataaccttggaatggttggtgtcctccaccgactgatgccccatgatcagcttggcctttcggcaattctccgtcgtgaccaacaacccgacatcaaggtccttcttgtcatatgtggtgaaggtcttggcccgttggaggaagagctgagtaggcgcaatctgctcataaggagggatcctaacccactccgtgagaagctcctggtgttccataggcaggaacccagaggagaagcagaagcagtgacgatattccttgacatgtttttgctggttgaaggggaccggaacctcatttaaggggtgggcccggaagccataaaatccgtccttaagtttgtcccccttcttggggacagaaacgagttcataaaaatacaatatctctgccagactgagagagccccagccccggccagagtaaaaaataaacaagcctgaaagaaggcggaaagcttgtggaataaattggtatggcacaagggtgacaaatacaaggaaattaataaaataatcctgaaggggaagcatagccctggtcatcaaatgcgtttggctccaagctccgaagcctccgtaattgtgattgggcgtctccgcgtcgcccgcggccggtggtacgtcccggatgtcgcatgcttgatgccggccaccaccacaatgtgctccagctgatgagggcaagttagggtagagtgaagctcgggtgcttcccaccctgtggcacgaggcttaaacccctcctgggcaacgggacctctcatcacctcttccagggtggcgaggcgctttcctcctttcttggaagatttggaaccggatgtagacattttggttct

SEQ ID NO: 232175 - DNA, 793 bp, Cannabis indica
atatatatgtatatatgaaaataaacattatttttttttattggatgaattcaactcaatccaatagatactagatctaaaatactggatggattcgatccgatccaataaataaaatgtctaaaatatttaataaatcaaaattaaactagtagatatatatgaaatacatccaatgaatagaattgatcgagtccgacattcattctatgttggatcagttggacaagttggataactaaaattaattgaatcagattagatagtactatttaacatcaaatatataattaaatctcgaatctaaacaaacctaaaatattagatgtagtgatccaataaaaactccttcaaaatagtaaaggagagtattaattttgacagcgaccattaaagagcatttattttaacaacttagtgtggccatttaaagacactttgtctcttttacaaaaccagaaaaactagaaaaacaagaggaaagaaaaaagaaaagaagaagagaatgaaaaatcaaaattcattaatcatgaatgagagtgagtgagccttatatagtgctcaagatcacaagagtacaatcgagttagttaacaaccaaaaataactaacaatactaaccataaccgtacacattaaactgaaataacagacaaaacagaacatagctaaccaacttagctaactaaacttgtaatagttatagaactaattttaatactcccctcaagatggagagtatatacttattaatcccatcttatctttgagactattgaattgtgtgggaaaa

SEQ ID NO: 232176 - DNA, 1341 bp, Cannabis indica
gtggtcttttttggagacatcaacgagaaaatgggttttaattctcggtggattagacttattatgagctatgtaaatatagtttcgtatcatatgattcatgagggccataaagtatggcctatttttcctactggtgaataagacaaggggatcctctttccccttattgttttattatctgtgcagaaggtttttcaaccatgattcagaattttgaaactaatcgtcttatcacgggttgtcgggtggcgcgaggtgctccatctatgagtcacaataagtcgattatcttaggcttcttaaaggataaaatgagtaatagatcaatttagaattgggataataagctcttatctagagcgggaaaagaggtgcttattaaaacgattgttcaagccttaccttcgtatgctatgagtattttctcaaatctttgccatgctattgagaatcttatggctaatttttagtggcagcctgcctctaagaatagtcaaaggaggagtataaatttgatgagttgggatagactttcaaagcataagcatgttggtgatatgggtttccataatatttgtgatttcaacatagctatgcttggaaaacaggggtgaagattgttggttcatcctaattcattagttagtaagattttcaaggcccaatattactcttgggaggatttcttggctgctaaaattggctcgaacccaaattttatttggtgtagtattttggaggctaaaagggtcctgttagaaggtttaaggaagagggtggggagtggtgactctatccagatcactagggatccttggctgcctttggatacatagtcagtaccagtactaatcactcttagacttgataattttctagttagcaacttatttcaggtgggttgtcgagcttggaacaaggaggttgtggaatctcttttctcatgaagatgcatctgttatccttggtattctgctaagtaatgtgactaaggaggattcttggtattgggttaaagaaaaaaggggtgtgtactctgttaggagtgcttagaattttatttaagagttaaaaggtaattttacatcggaggcaaactttggcttttggaaaaaactttgacaacttaaagtttctccaaaagtcaaggacttgctatggcgtgctttgtctcagtgccttcttactcgaattaatttaaaagaaaagcgtgttaatgtggtgaaagtgtgccctttctgtgatatttttgctgaatctgttgtgcactgttttatcaagtgctggtttgctgagggggtttgtaaagtggctggttttgttgtagtaggatggaat

SEQ ID NO: 232177 - DNA, 972 bp, Cannabis indica
accaagttacacgagaataatcatccacaaaagtaacaaaatgtcttaatccaagttgagacaaaataggagaaggatcccaaccatcagtataaattaactcaaaaggaaaactaagcacgtttattgactcgatgactcaaactaacacgatgatgtttggtaaaatgacatgactcacaatataatgaaaacaccttactatattggggacagaatttcttaagtagaggaatggatggatgacccaaacgacaatgagccttaaaagcaaaagcaacacacagataagtaatagaagctggtggaaatggatcaagaaaatgcagacctccagattcatgttctttaccaataatcttcttcgtcataagattctgaaacaaataatgaccgcgaaagaatgacattgaactgtttagattacgagtgagttgactaacataaggcaaattaaaagacaaattaggtaaatataagattgatgacaaagtgagcaaaggtgtgggaacaacaatgctagatccaagaataggagatggtgatccattagctaaagtaacagtagaagtagactaaaatgtggaaaagagactggaattacctgttaaatgatttgtagcaccaaaatcaataactcatttttaggatgtggaaagaaggcatacatcagagttacctgtatcagctatcgcagtgacagaaagagaggaagacttagagtgattcctaataccatgagaacttcaaattcatcagtagaaataaagactgattggtgagatgcatcactagtgcttgcgatattagcagagtgtttttgtcgatttttgaactttaactttctacattcaaacttggtgtagcttggtttcttacaatagttgcacatgatgctcccagaatctgttggtcgattatcaggtccttgtaaattacttcctttgtatccacttggagtagagtttttcc

SEQ ID NO: 232178 - DNA, 628 bp, Cannabis indica
cctatggcctctctccaacatcttggttttttcggttctgatcatagagcgctaaaagtgatgcttgatggcaaccctgttatgtttgcccgcaattccacttttcgttttgacaatcactggttacttgagccggactttcctaagcttttaagagaaagttggtgtacggacttaagtccttccgctaccaataaccccatcatcacttttctgtattgttctgtttctttgtcctcttggggtcgaaataaaaatcaattctcagatcgtatcaaaacaatccaatcggacatagagcgtctcatggtgggtcccactgtttccccttatgacgctaaaaaggccaatgatcttcagaaaagtcttgatacccttttagtcaaagaagaactcttttggaagcaacgctctagagttaattggttaaaagcgggggacaagaacactaaatatttccataaccgggcctctgcgcgaaaacgtaccaacttcataaaatttttaactctggatgacaattctcaagtaacctctctcaacgatattaccaccacttttgtccacttctataccgagctcttcacttcccaaggtactaataaggaggctatgactcttgctacgc

SEQ ID NO: 232179 - DNA, 610 bp, Cannabis indica
tggtgtttattgtagaaattggtcggctttaacaaattcgaataatttaccgtgttcaaattagggttcaaaagcatgttccatgcatgccttttcaaatacgcatgcaaagcgtaattttttttgaacaattatttattcaaaaaattttaaaaattccaaagaggccgacgtattatgactacagtaaactttgtaataaaaaaaattaaaattatatttgatttatgtgcttaaaataaggtcacgcacgttgtatatgtaaaaggagactatatatcctaccataaatattgttaatagaaatatattttagccatataacaattttacattaagacaaactctttgtgcagatttagctttgaaaatgttcaaagaggacatgtcgctggttagggctcgtgatctgagtaacaacaccgctcttcatattttggccgggaaacctaaagcatttccggagcaaaataaatatatttggatgaaacatttgatgaaatcatcaaacaatgataatcatcatgatcacatgaatgagagtagtaatgaagccctaaaacttgtgagagagctttggagggaaaccctaaacaataaagatgaaaat

SEQ ID NO: 232180 - DNA, 2728 bp, Cannabis indica
actgataagtgtctaccatttttcaatatattgcgaggcaacaaaaaattagaatggacagaagactatgaggaggtctttaagagcataaaaatgcatttgtcgacacctccggttttggcaaaaccagtaactggagagacactactcctctacttggctgtcttggaaagtgcaatgagtgcatcaatagtgggagaagagggatagcaccaacaacctgtttactatgtcagtaaaaggttactgggggtagaatcaaggtatccccctcttgaaaaactttccttgtgcctaatccatgcatctcgcaagctacaaccttactcccaggcacatccaattaaggtgttaattgatcaacccctgagacaagttttatcaaaaccatacgcttctagaagattgataaaatggtcaattaaactggggaagtttgacataaattatcacccacgaacatccatcaagggctaagccttggcagattttctgatagaaggaataactctagaggaaaattcgcttgtttagtgtgacgcagatacttggagattatttgtggatggcgcatccaacaagaagggcttcggtgtaggggtgatattaatttcgccagaaggctttaagtttcattatgccttgagatttcaatttgacacatcaaacaacgaggctagatatgaagccttgatcgttaggttgaggatagctgaagcattgaaggtaaaaaatctcatatgtcatagtgattcacaactgatagtaaatcaggttctcggggaatactaggctaagggcctgaaaatggccaagtatctagagaaagttcgaaagaacttggaaaagttcgattatttcaaaattgagcaaatcccaagagaacaaaactctaacaacgatgccttagcaaaactggcctcgcaaaatgacttggatgaactaaacttggttccagtggaaatgttaaacgagccaagtatatgcgaagaggaagatgtcgagatgatagatagcttgctcacgtggatgactcccataatcaactatctactcaatggaaaatttccaactgacaagaacgaggcacgaaaactcctgtattcagtgcctcgctacacgatagtagatggcaagttgtacagaaggggttattcaatgcctatccttcagtgtgttcttcctgcagaagcaaacgagatcatcagggaaattcatgaaggcttttgcggagatcagtcaggttggcaaagtctataaaaaaagatcattagacaaggatagtactggccaaccataaacaaggacacccatgaatttgtcaaaaagtgtgataagtgtcagagatttttgcatatacctcgcgtaccaccaatagaactgaggatgatgaccttgccttatccatttgcaatatgggggattgacttgattggggcacttcccaaaaggcgaggaggagacaagtacgcagtggtggctatcgatttctttactattggaccgaggttgaacctctagtttctataacctgcaagaaagtcctcgactttgttgtcaaaaacattttctgcaggtttggaattccaatgaaaatagtattcgataacagaactcagctgatggcgatttattcactgagttctgcgagaggaacaaaataatttaaagcttctcgttagtatccaggcctcaggcgaatggacaagtggaagctgctaacaagaccttgaaggatactatcaagaagaaattagacgttggtaagggtagatgggtcgacgaactacctcaagtactttgggctcataggacaactgagaagacagcaacgagatatactccattctcgttagcatttggctcggaggcaatgttgcctgtagaagtaaatatctcgactcacagacgagaattttataattaagaagaaaactaagaacttctaaaattgtccttggatctacttgatgaaaaacgtactgagtcgcaaattaccaatgcagcataccaacaccgagtaacaagatacttcaacaaaaaggtgaaaaagaggcttttcaacattggagaattggtgctaaggcgagtgtttacaaatacgagagacgcatttgcaagagtattcaacccaaactgggagggtccttatgtgatcaaagcggtagtaggaaccggggtttacaaattggctcggctaaatgggtcgctgataaagaactactagaaactgaaatatttgcgatcttactactattaaattgatgttgtaactcatatttctgatgtaatattttaaacttcaaatattaataaagttaatcattttttcaagtaattataaagtgatactctttaaaattacttgaggggcatatgtgtatgattaatcataatttatctggaaatacatgatatattgcaaacccactatactttaaaaaaatttcaaaatttttagagttctttttgattgaactattctgacgagaaagaaaagtcaaaaattgtgaatgacttttcaattaaagaacctttctgacgagaaaggaaaatcaaaagttataaatgagatataactcataactcacatgagaagctgaatactaacggctcacattgtataggaaagtattaaacaagacaccaagaagccttgaaaaatgcttaaacctaatatctggatcgacagcctaactattcagataagcaatcaaaaatatacaaa

SEQ ID NO: 232181 - DNA, 541 bp, Cannabis indica
aattcaagtattaaacttgagccctggggctgtgtctcgatctcctacgtgcgaaatctgaggtctgcaagcgtgacacgtaagtattagtagtaatgtcactattgtaaatttgatacaaaatatgtatattattaaaaattttctctaaatttgtgctaaatttagctcaaaaaatgggtcaatattatattttttccaaattttataattttgtaagagtaaaataaattttaagatgtaaaaaaagtcaacaaaacattaatttttttattgaaagtatataaaaattatattaaatatataaataaaaatataaaaagtcatgaattacattaattagtgtcaaaaagtaatcaaaaaaagtgatatttattgtgatatagaatttatttatgttatattttgtgctaaatttggcacaacttttagtatgtgtcaaatttaaatcatattatatactattattaaagttcaattttatgaacatgtaggttaaaaaagtatatacaccatatatatttataacactctattaaag

SEQ ID NO: 232182 - DNA, 1254 bp, Cannabis indica
aaaatatttagttttcaaaactcggtaaacatgacccaagaagggtaaaatcataattttaatatttatttagctaatagactatattattatatcgtatgttcattttgattgattgcaggtaatttttgacatattagtgcggtatagtcacaatcagatattttaggctcgaaccgagtttggagtctaaaattatttaattatgtggttatggtaaatatttgagatatttttgaaattatgaaatttgtgtgtgaggtgaaataactaaattgaccatgtatgctatttaagtgatttattagcctaggggcaaaatggtcatttgactaattttataaaattggaatataaactattacttgactaagtgataaatgagaagctcatttttttttgttttggagcctcaccaccgacccctcttcccttctctcaaacctctcatttttttcacgtgatatttgaatgaaaaagaaaacttgtttttggagtgaaattggaagagaatttcttgtgtggatccatgcttgagcttaaggaagtgttaaggtagtttctttaaactctaatctcttgttgaattctgaatttgtgttcttgaatggaatttttgtatgtttatgtgcttgagatgttgatgttgatttgtgagggaaaaattagagatgtgtctatagttttgaattgtgtttaatcaatgtttctaggttggatcctaccatttctcttgctattagaattggtaatttgaggtgagaatatattagaaattatcatgggttcttattagtgttcttcaatggagaatttttcgaaataaaatgaaattgaattttgtgtatgatttatgttgggtgtttttagcatgtattttgatgtattaatgcttggaaaatacctcattttaatttgaaagcttgttgtcaagttatggtatttttgtgtggagtttggtgcatttttgggtacccaaaaatgagtttttctggattttaacccaggagccatgatccggttcttgagtgtcacggcccgctatgtgttcagcaaggcagattgttttaaaatttattttggccataacttttgactccaaactccattttagatgttctttatatcattggaaagctcgtttcaagctctattacttcgtccagtattggagtctcaaatgtgaatattatgaaatgtaattttaggattaacctattgtgtaaaactcgaggattgtgactaggaatacca

SEQ ID NO: 232183 - DNA, 1084 bp, Cannabis indica
aaaccctaacaatttgtctaactctctcagccgcccctctctcttctacctctctctgtttgcatttcttctcttctctctctccctcctctgtccttgaagccctaattcaaccacctatcatcatccatttcaacgtcgcccgtcatcgtcgacccctcgcgcgcataccgctcctccgccatctaccaccagagccaaagatgtttgtgactccaaatggaacgggtctgtgactcaatactcttcaaacaacaaaagaaactaaaacacgaagagccagagaaaacgagaagctcaggtacaactttgatatataacacattttgaatctacattctcactcattttttttcttctttacattaatttgtgtgcatataagtaaaatataattttagctaccatttcatgattctgagctcttaggtactcgaataagtttcaacttaactcagtagaataaatattgtcttggttaccatatgcatctccaactcacctttaccgtctcttatgaacgttttagaaagtgggtcttgtagaaataattactacactaactgggtttgtttattttcatttttaaaatactcacctttgaatgaattagatgctagagattttctcacactaagagcgtacccatttttttttccaaataattttgttcagagatgctatataatttggagataaatgtggtgcaggttttggtcgaatatggttggaacaaagaggttttcaaagggcgctctattggcatattgaagcttgggttgttttggaccttcaagagattatcaattcattaatcatctaaatcctcacaagttataaccttacaatttggaaaaatggttgtacatttaagtcatgtaattatattgtaaattattttatattgatatagatctgaaaaaatatttgtacattttggtcatgtattattttgtaaattattttatattcactttcacttaataattttatttaattttaccaatctaaattgaatagattagcttgtaaaaatataaattataatctatttgatttttttgggtacaatttactaaactaa

SEQ ID NO: 232184 - DNA, 2576 bp, Cannabis indica
acttaaggaattattccttggcttttatcttttttagaatagttgaaactgttccttagataaataaaatctatctctaagagtcaaaagatttcctttagagttagccattagaaaattgtttcaacatcttacttaaagtaagttacttgtactggagtaagtaaattatcaagtataccacaagccataggttcagatgatctcaaacctatgatactagaattgggaagtttgctgaagtccattaaatagacctattctctgaacttcccgtcttgtccttgtaatagaaaagttttggtgactccatgtgaatggttttaaacatagttctcttggctttgattcttagttccttataaggactatccattgcttgtttaaactaataatggttttctatcacaagtttcttccaagtcataacaagttgcgttccttgaaaccctcccactacaacaaggtaatagagcaaaaacatgtaaggatacaaggaatagccttgcctaatacctcgagaaggaaatatttcatcaatgatatgaccattaatgttaaatctaatggtaacagaggaaaggcaatcgacaattaaactaacaattctactaggaaagttaaaacgattaagaatagaagtaataaaccccacttaacacgatcaaaggcttttttcatatctaattttaagcctgtccaccctaacttaccctgcttcttatgagtaatagcatgaatgctttcctaagcaataaaaatattatccaaaaaaagctgtttagataaaaaagcacgctggttatgagaaataatatccccaagaacaaattcaagtctatcacaattttatacaaggtagagcataggctaatcgacctaaagtccttaagataggaagcatttgattttttagggatgtgaacgataaagtattattaatgaaggacatatcagcattaccattgaggatatctaaaataactttacctatattatcaccaagaacaaaccaatttttttgataaattaagcattaagcccgttcagaccaggagctttatctccaaagagatgaaataaagcatctttaacttcattagcagaaaaggggcatcaaaaaaatcgtattgttgatcacttaaccttttgtcaataacagagagaatcaagtcaacaacgtcaccattataatcctgagaactaaagaggttagaaaaataggtacaaacctcattccaaatattaagaaaattagaaatcctcctaccatcctcaagcttaaaacatctaatataattattcctctttctagatgaagctttattatgaaaatactgtgtttttgtcaccagccttcaaccaatgaaccttcgatctttgtttccaaattttttttttgcttataaaggagactattaagatgagagtgaaggttcaagaccgttttcaaatcttaacttgaaacatggagatttgaatgaatattattgatatgcttcgcaatattgttaataagagtattaatattaccaaaagaattgttctaatttttaataactttaatacaattatgttgtttgaggagaaaattattaagataattaccattataaatagtattattcttaagtccaggaactgttgacactgtcatagaaagaagcctcgattagccaatagttttcaaacataaaccttttattgccattttcactcatactattatcgtaaagaattagcttaagaactctatagtcagaaccataaaaactaaggtgatagagagtggccttaggataagagaacagttagcttttgttggcaattccccaatccaaacactcacaaatagaaccatgttaccaagtgaacttattaccaacataattaagaagatataaagaaaatttattaacaaagttttgaaaattaatcatggcataactaggaggattggagttacttctcatatcactaatagagaggtagtaattaaaatcacctaatataagccaaggaaggagaggagcattatcaaaaagtttctcaagtaatttccaagtatgaatcttatcatttaagtacggagaactatagaaataggaaatatgattggttatattatcatcaaaagtcacaatatagtcaatatgattagaggaataatttaatttttttttatcgacgtcttgctttcaaaatagcagaagaactccccctagtcccctcctaggcacttcaaaagcaaaatcaaaaaaacaacttagccctaagattatcacggctactagcccaaaagcttagttccataacaaaaagaaacataggattgtttttctttacaataaaggaaaggttacgaaatgctcggggactccccaacccatgagcattctaacacaattgactcactttttttaggtggggttgctcaacaacacccgcatgtacaatagaagtgttgacaatagataaaacatcagtaatacttgaaccagccctagatctctcgagaatgctcttgatagaatccccaagcacaattgtaacgccctaatgctaaggcacgctac

SEQ ID NO: 232185 - DNA, 1678 bp, Cannabis indica
attcatgtgtttttattttttagtagatagtaaatagttagctacatctacttaataagttactaattttcattcatattcatgtatttttattaataactagttactcataaattatataactagtaagtagctaaataaagaaatttgtaattttgtagtatttctttatgttataggttgtaaggtcaatttacaagaatccgacttatttggtgttgatcggtttctaagtagctcgaggtatacatttactaacttttattataaattaattatgaatgcttagtagagtttgaatatcgaagtgaagcagattctacaatatattgtactgtgccggatcgataggtagaatatgcatgttagatgagtttgaatatcttaaatattcatccgtagtgaagtaggttctgtgaatacatgtactgtagtcggatgggtggtaaacttttatattgctaaatgttgttgtgattattttatattattttgaattgtgttttgttgttattaataggtttgaattttttggaaacgttcaattatagccattatgctgccgaaatttcggtagaattagaataatatttgattttagtttctcttaaacttggttgttaggattttatcggaagtgactttatcggaagtcaagtacataatttttagtataaggtatgctttctttaacttacttttataagaatattttttatatatatttagataatccttaattacttagagtaattttagaataatattgatgtaatacataggatatatattgttgagtgttgtgataactccaaatgagctgattcaagatgagttggatagataaaaaagagatctaaaacttttatgttttgactttttctaaaatatgatcagaacatagtcgaatttaggcttcaagtttcagctttattctattttataaatcactgtttttcgaaatttatccaatttatgccttccaagtatcgaaacctgaaactgaagaaaacaagcgtaattctattccaaaaataataattaagaagaaaaataactataaaatgtgacccgaaacttgggctaaaataagcctaacaaattcccccaaactaaatccttacttgccctcgagtaagactaaaaactgagataaagaaaaaaaaacacaaactagcacacaattaactaagccttcatacaattaaaccgctgctgcaacctgtgaaacttcaatcaattatttaaaccagaatttcaatcccaaaactctaaaattaattcagatgcttactctgaaaaataatgtaaagatgtaaattaacttcaatatttgaagaacatcatatcaattctactctttttaacttttcacaatccaatgatcaatatgcttgcatgacttacctctctccactaatgtcaacaattcttgttcagaatcacaagaactttcaaggttgtaatgtattagcttaggtaataggtagatgaaaatttatttaggctatattataccataagcatactataaaccatcaatcacctaataaattacatatgtaataccctagaattatgaaatggattaacaaaatcctaactagataattatgaataattgagaaattatattaatatataatttaatatatgagaatttatatgatttatacta

SEQ ID NO: 232186 - DNA, 1888 bp, Cannabis indica
tcttcccccatgcggcattaaatgcgaagtgattgttcaagagatttcagtacctccccgaactaccttggcatgtctctaacctcccggagggtaaagatactccttatgtctcctccgggagacaccttccctgagacactcctctttcgtctaagacttagttgatttccttaagtgctggtccttacggctccacgtgtcatccttatccaggtccacgtattttgggaaaaattaagggcaacagtaataaaaaagataacaaatcatgattcattttctaccgtacaacatttcatagggagccatctctattgtaccttaatagctattgttgtaggaaaactttatcaaaggaaagtattttctccatgaaccctcgaagtccataatacatgctcgtagtaaatcttctaatatatgtattgtcttttcagactatccatcagtctgagggtgaaaagatgtgttgaacatacgctttgtacccataactttctgaagactcactcaaaatttcaatgtaaattttagatatctatctaaagcaatggattttggagccccatgaaaacgtactatttcctttacatacaacttcgcatactgatccacggttaagtggttttcaccggcaaaaattgtgttgactttgtgaaatggtccattatgacccatgctgaatcatacaattctgtggttataagttaaccaaccacaaagtccattgtaatatcttcccacttccactcacggagcgttaatggttgtaataaccgtgccagtttctgatgttttgctttgatttgttgataagttaagcacttggacacatattttactacgtctttcctcattccgcaccaccaataatagggtttcaaatcctagtacatttcggtatttcctggatacaatgaataagacgtattatgagcctcatcaagtatttttttttgtgagctcatcactactcgaaacacaaacttgagttttataaagtagcattctattattcgagattgagaggtacttaggctgacccgccaatatttcctctcaaatcttgaccaactcagaatcttccaactgcacttttctgattctttctaataagtctaattaaagtgtcaggttatgtagtttcccaatcatgaactcaattctgactttaacctataatttttactaatttagttttagtcataacacgtattgtgactaaaaacacgtttagttacaacaaattgtgatttttgtgattaacaattttaacttcgggtcttttaatcacaacataagaatgttaataccattttgacaactgtattttgtaaaagttacaaattagaatatctgttttgttaaataataaaatgaaccctatattttctaaaataataaaaataaaaccctaagcttaattttcgataactttttttataatataactaacttgaacataattcctaacacgaacatatacaaaaaaatataaacagttttatcataacacatttagatcaaattattattaaattttatttttacaaaaaattaattcataatcttatttgtacaatttaaaagatacaagatttattatatcatttaacaaaataaaaaatctaataatcagtaacttttataaaacatatactccaaaatatttaccctttataattagtattagtaaatatttttttttggtagtggtggtgctctaagctagatttgaataggataattaaatgttaaacacttctcgaaaacacaatgaaaacattcataaccttagtaaccaacaacaacaacagtgatcaacaaaatatttatatactacgtacgtagctacatagagataactcttaattcttaaacctaa

SEQ ID NO: 232187 - DNA, 1558 bp, Cannabis indica
ccatcgacgaccgaacaagacaggccaccgcacttatacagaaagcctatcaagtgtctaaccagcaacaaactgctacgtccagcatcccactgggtggcatagaagaaattcctgttgggcataccgcccagactcttaactgtcagtcgtccaatcctcggtcacaggttctgcctgtggctcaagtggtaggcggccaaaccttatcttgccattccttaggtggagttatacctaataactccatccaagctgacagctctggccaatagaccggccaaaccaaccaatcactgagacaacctgttgttatagtattcaacagactgagtacaacccacaatctcagggatgatttgaatagaaggacaggtctggacgaacaatatgttcaaccggccattcagcccggtatccaaatccaggacccaactctaagagatcctgatgtgatataggtgggccaagaggctgaactagttcacccatctatgcaagcacagttggatgaattgaaaaatatgttctaaggcctgggcggccaaaaactcactgatcttgagttggaccgtgcacgtggatcaccctttactccagagatcaacgttctagaactacacctcaagtttaagatgccgacctggaagatgtacacagggaaggaggatcccttgtcacatcttaagtattttgaaatgcagattgatatacaaggggtacgaggagatgtgaggtgtagagtattccctgcaacactttcagaagccacacaacaatggtattttaagttaccacgaggaaggtttaattcctggaaagccttctcctcggagttccatgcacagttctctacttctcgccaactcccattaaatttagaagacatggtcgaagtgaagcaaagaccaggagagcctctccgagcctatataaggagattcatgatagaggctacgaaagtagcacggttaactgaagaagggaggctggccacaatactgggaagcatcgaagtacttggaaaactgtggaaagatatcaagaaaagtggccccgtagactttatggtagatttttgagaccgagcagatgggtttattaagcttgaagagaccattcaacgggcagacgtcgagcctaagctgggccaatcacaggccccctcggtaggagcatttcctcaaaacccctagtaccctagcaatttaaattcgagcggtaagaggtctaataacaacgacagacaaggcaatggaaagaagggaaagttcgcaggcaaagctgaacaaacccctagagaaaaaccttccatgttcactgctttctctatcctaactaacaagttggagacatacatggcaactcaatttgtagtcccgtacaaaaaacttgctcccatgaaaaaggacataagcaagcaggacatgtccaaattttgccaatttcatgaagactatggccatgacactaatgagtgcaacaatctgaagtgagaaattgaattcctgataaggaaaaataacctgcacatccagaagtatgtcaaggccgacca

SEQ ID NO: 232188 - DNA, 716 bp, Cannabis indica
tttaaatttaataatattttttaactaaaaatatcatgacttttttttataagtaaaaaatatatatcatgactatctatctttttcttctatcaaatacatttcagtcttttttttttccaacaattggaacaaaatataagaagaagaaaaacaaagaacattcaaaaattatttgcaaaaggcttgaaaatctctctgtgttcctctgtattttctttgaggatgtaccgaacagagaaatggagcaaaagttctgatgtggctgtcttggaaagcttctacgacggtggcagtcttacaatgatttgaggaccgactttgaccgagttgaacatggttttttttcagttcagaaaatctaccttctctatgaccagttctttggaaaggcagccccatggaatgttatattatatataccctttagttataagaaattatgtcttttgtgggtttagtttgtgttcaatttttttagaaaaatttaaattttcccctaatttgtaggtattcttccgattgaatttttctggtttatttgactttgagtacgtagcagataaattattttaaaccttacttcatagttctagttgtattaattaatagtgtgaaaaaatattttccatttatcaatatattcattcttttacaaaattctagaagaaataacaatggcagttagataataatttattattagaagtagttaa

SEQ ID NO: 232189 - DNA, 1307 bp, Cannabis indica
aaactcttaaattaaaaaaaaaatataaaaaaaaaaaatagaatccagtatccaaaatgtacactatgtatcactttgcaagtaatatatataatataagattgaaaataaaatagagatatacatgaaggaataataaaaagtaggaagaaagaaaaaaaaacatatgtataaacttggtgaaaaagacaaaaaggtcacaaaataacaaaatcatccattattctattgatttacatagatatattgatgagagatgagaacaaacatgtgtcgcttatatgttttttcacatgctttatctcagcagagcatgtttacttctctccaatcttattttattaattggaatctaaaatagaataatatattaacatgtttacagcttatatttactcaaacgtgtggaatagtacttaagtaccaaaagttcccatttcaaacaaaaaaaaataaagaaaaataaaaagaaagtttagatttgtattcaaactgaattaattgaagatttttttacttaattaattatatatttatacataaattaatacttaatattacatcaacaattaattcataaataattacataaatttaaaaattatactcttattatagataaatttataatctaccaataatatttaaatgtaatataaatgccagtttagtatttttaaattatatatatttcaactaacactttcattcaaggtgacttcctaagcacaattcaagtagctagctgtctaattttttagctatatatctaccataagattacatttaagttatatgaaatgtcaataatacattatgaatttgttaaaagaaaataatatattatgaatgtttcaaaatagtcacaatttctagaagaacatataagaggaattgtctttttttattcgttgattatttcaaatgttctgcaaggaccgcatctcctttcaatttttgggttttttaatgtaaatgtatatttaaatttagagcattattttgaacatcatgtgtctaacactactatataaggtgatgtctcgtaattgattagtaattttttataatctttattaaaataaaataagtggaacttgatattaaattgtactaatagcaatattacacatcacagcaagaatactagacaccatggttactctttagaatttctctcaaatttataaatattaacgttctcacacttaattaaatatgatagcattttccttttaaaaaaaaatataatagcttttagtaatactctttttttttccttaatttttcaaattacaaaaataaaa

SEQ ID NO: 232190 - DNA, 1371 bp, Cannabis indica
actggtggaggctcccaatccaggaggtctctgtctgtggtaagctgggtctgtatccctcgcttgtcttgagcagcttgataaaaatccaaatagtcctgagcttcttgttcaatggccctcgatcttgaatcttggttcctgaaaacagttgcatttcttgcattccaacacttccataacatacaaagaaataggttaaaatcatctttggaaaaattaagctgtattaataaaaggatatcgaatatgttcatgtgtttggtctctttaaggacagagctgaaaatcgtacctgaccaagccttcttcataaccctgcactcaaacaaagcatgctgtaccgactcaaaacagagagaacatctaggacaaataggggaactaatacaatgcctatgataaagattttcagcagtgggaatggagttttgagccaacctataaacaaaatgtctaattttggggggtattgggagactccagagggatttccaccaacgggtgagggtttccatgtttgaggaagaaggttgagtcaagttgatggcttgttttgcaacatggtaaccagtcctaaccgaatagtgtcctgaagtggagtgctgccagaagtaggtgtctggttgggaaggatcagggggagggagggacaaaatgtcattaatggtgtcctgctggaaatgagctcgaagaaggggaatattccaatccccattgggagaaggagggctgatacatgagtcagggaagatggtatttgagaaggaaagactcgatggttaggaatccaaggatcaaagatactggtgttagccccgttgccaattcttttgcaaaggcccaatttgagaagagatttgccccaatgaatgctacgccagacataagagggataatggcccagggatgagtctaagaaaggtgttctgggaaagtacttggcctgaaagagctgagtaagaagaggtgactggtttgtttgaattctccaagcctgcttggcaagcatcgcttgattaaaaggcttgagagatcgaaaacctaagccccctatacttttggagttacacagagacttccaattcttccagtgaagtttgtgtttaccatcggctattccccaccaaaagtttgccatttctttctccacaaagttacagaaggaatcaggcagtttaaaaaccgacatggcatagctaggaatagcttggatcaccgcctttagaagaatttccttccctccctttgataaaaattttccatgccatttagacagaaaagaccagatgcgatccttaagggagttgaaggaagagcttttggatcgaccaaaacactggggcagtccaaggtatttgtcaaggtggt

SEQ ID NO: 232191 - DNA, 863 bp, Cannabis indica
gtcgtcgtactacagcccgctcaaaagattttgaattcgtcccgtactgggcctgtctgggccgtgtgaggtgtgacggaggacgccttgtacgtccggccaccattagccatgggtagtggcccactacctacagacacgattcaaagtgtcttagggtttaataccctttcctttttggatctggcaaaggatttggcaattttctgctgtggtcatgtttacctatccagggatatttctcttctctctgttttacctaatctctgtactgcttgtggggttatttctaatctggtttcaggtcttgtgaatatggcggcggtgaatgaaagcattattgttgacgaaatcatccaggagacggagaatgtttgtttggatgatttatcgattgaagtttctcctgataatgaactggccaaagacacgattgcaaaatcggttgttggaaaattttattcgaagaaggtaatatccaatggaactcttagaaaagctctttcgggattgtggaagcttagcctgggttggaggtttcaaacggtgaggccaaaaaccttcattttccatctaggaagcccgaaggaagttaagtacgtgcttgggaatggaccgtggaacctgtgttgtggatatttgctggttgctgctcttccggaagacgaaaaatgggagtctgcggacctcacgaacctggatatttgggtcaaagccatgggagttcctttaccatacatggcagaggcttgtattcatcagatggctggccgtatggggaagcttattcaggcgaataaggttagaagaaatggtgtgattctgaatgatttcctgcgattccaagttcgattaaagctggc

SEQ ID NO: 232192 - DNA, 1160 bp, Cannabis indica
atggcatgatgatcctcctaaaaagtagaattggagatgatattagacatgactccagacgaggatatgagaataagaaactcgattgtattgagtgactcatcccacccttcccatggtaccatattggattgtaactcggatgagaaattgcataatctctagcatgtaaactctaacagatcccgatatctgtagatcatcagagagctttacaagtctcttctaaattacatgtctggcactgagtcagcataaatgctatggaggttttttaccatctttgctaagacttccaagctgctctcatcaatgtgttcatagatttgcaagcatatgatagaaaaaaaaataaagatatcagggacatgtatagaatgtggaacatttaataattaatggaaaagcgaatcaccagtacctggtgtctgtttttctttaaattttctctgagcaggaccttcacactcgaccccgtagtagtgtaacaagcaatatatcattcccacattcatgatgctactaatttcttggtaatcttttcgtcttctcagctgctcttctattacttctacaccactaaaagcatccacaagatttaacagaaaggaacatcaaataatgtctttctcttcagtaatagagaggcaatcaaatcatctttaggagcaaaaccgtttcttgctaaccaagaaataacagtaaccacagcctgtgttctcacactcacatattgtgttctagaactttttactcagttcaagtaaccatggaagttgcaaagcagcaaatgacataagttttccattttctactaaaagaggtaagtttttagaaacagaagaaagaatatcttttatgttactgatatgtacatttcgatgctcaactgcttaaaaaccaccttttaggtgaactatgccgtctgaatctaagatatttgaagaaccttgaactgagaaacttggagagtttgacccagtcaacgtcattaaagtctcactcacactggccttgcatatctagatcttttctttccatgcagaaagcaactcgcttgcttatagattcttcatcacagtggctcaaagcaaaaccaagtaattgttttggagaattaacatccatattttcaagttgctattgcagcacataagtcc

SEQ ID NO: 232193 - DNA, 809 bp, Cannabis indica
tattggacttataaatgtgggtacgtttcagtggaatctaaaatggaggcatttttggttagttgataaaaaaaagcgggtatttttcaatttatcccacttcgtatcgtgcttactcggcccatattttttgagttttataaaggaaaatttttataaatataaaaatctatgttgtagtttacttttttatgtatgaaaaaaaataaaaatgaaaaccaaaaaataataattaaaatatagaaatcaatacatatataaataaagttaccttaaaaaaaatctcataatttacacaaacaataatctcagattctgtaaagaccgttaaatttcaataaatgaataattgaataattagggactaattgtgaaactaagttattcattatgacttatgcattatggagatttatatgaatttagtttatgctatttatgatatatatgtgtatttcttatttttcgtagttgtgttcggttgtagtggaacgtgatgttgggtttttagagagtcacgttttcatatgatttagaatcttgttaatagcagggcatcattgttagaaattgaaaatatcggaatattaccggagtttggaaatgactaaattacccttaggtgacatgtatgccattgattttgatcaggggcaaaactatcatttacttttaagttttccttttgtcttttactaggcattagtaacctgattttaggttttgatttatttaatattagattttattaatctttagaaagggaggactaaaagaaactggaatcaccatattctctctctctctct

SEQ ID NO: 232194 - DNA, 897 bp, Cannabis indica
aagcaagcaaaacctacttgcttagtctctttgtaagtatgagttaggggcttataatgccaacgtataactctatataaaatatatataatcacttgattatactaattttaatattgatgttctcatataaattctcggcgtttggtaaaacaaaacaaacattgacctgatttaaatacttttaaagaataaaaaccatatagtacataacacacataatgaacccaagatatacataattaatagagaattaaagaaatcaaagttaaacatttcacggatttgtttgtaaaacttcaaacagggcacattaccaatcttaactaaatgaataatgaataatgaatccttgagcatgcaactacaaggctcgattgcagagatgaataatgaatgaataaatgaatgacaaaaagttttcttaactacatttggggatagataattatatggttaaaaacatgtttttttgttacattagaatgaaatagatagagaaataaaccttgtatatgggaaaaaggaggaggagcttgagcttgggcttggcttcaaacgaaatctttgaggttgggatgaaatcgtcgagcatgcaactacaaggctcgattgcgaagagatgaagccgatattgataacaactcctagtggcctaaaagtcattaattggtctcttttctatacattaaatttagtaccttgtgcattggtgtctaaaattatctcacccagattaatactatgctcaaagttggtaattgcatcccttccattacatgtgatggctgctttgtcataagccctgaatttagacaaagataaaggaaaaaacttgtgttggattaaatccacaccaaacaaaagccaagcaaaaggcataatgtgttttattct

SEQ ID NO: 232195 - DNA, 1201 bp, Cannabis indica
gtcttggttgttgagaaaatctcggtggaaatagttgttttccttgtgattgtgctccacttccacttgctccttgacctccccatgaaaaatttggatgattcttccatgctcaattgtaggagtttgagtatggattgttgttgcggttaaaattttggttacccacatagcaaaccaaagctggatttgaagggcaattctcaaaagtatgcccatcaccacaatacacacaagaaatttctaccctttgaatggcagcagctggttgtacacttcctcccatattcatgttcttcaaaatgttggtcattgaggccatttgagcggtttgagtagtcaacgcatctacttcaagaacacctgctacttttcggcttgtaggagctctattagttgaccattgatagttgtcactagctatcctttccaagatctcaaaggcttcattgtaagacttggaaagaatggctccattagctgaagcgtccaacaccatcctagaggctgcatgagaccattataaaatgtctctggttggatagaatgaggaataccatggtgtgggcacttcctcaacaactccttcaacctttcccatgcttcactagtggtctcatcttccaattgttgaaaggacatgatctcactttgaaactttcatttcttgttggaggaaaatactttttcaagaatattttagccaaatcattccacgttgtcactcaatcaggaggaagagtattaagccatgctctagcccgatccctcaaggaaaatgggaacaatttcaacctttaagcctcttcacttactccttgtagcttgaaagaatcactcacctccaaaaatgagcgaatatggagatgaggatcttccgttggcaacccactaaattgaccaactgtttggagcatttgaaacataacgggcttgagctcaaagtgaggtgcttaaattttgggtctcacaatacctggattatgctcgttgaacataggggctgcacactctcttattgcccgagctctatcatcggccaaagcaataggattggcaccagtatgagcacccccaaccttaaactcatcggccatactgcagcgttttttagccttttgttcctttctcctttgtctgaaagtgtgttcaattttagggtcaatagtagtaagttgaagatcttcttcttgctcgttca

SEQ ID NO: 232196 - DNA, 768 bp, Cannabis indica
aaaaaaaaaaactcagatttagaactaaagagtcgttagatttttcctatatatataatttataaatatttttgcttcttccatatattaagtatattggcatatataatatgatggtgtgtttcgtgatgagatcgtgataatgggcatcctcttccccgatctgaattgatcccaccattaaagcctaaaggcatacataaaaaaggtaagcgcatattccatgaatattattgttcatggcaaacacatgaaacgacgtcgtaatcctaagtcttcacaatctcaatgcaaatggttatactaattggggattgtggtgtgctcccacatgctgcactaatcttccatcttctacgactacacctctctattctatttgtaattgtaaactacaatgccccctaaatgagtatttccatagaattcaaatctattttattttagcatatataaaaaaaatttagtttgatttttttaatagtatatattatagttatttaaaactattttaatttacaatatcaaaaacaaaatttatatattttgttatatatactgatacgcaatatgaaaagtaactattttgttaaataattacaatgtacctgattatgaagaagaataaaattaaaaaaaaaaatctaaatgctaaaataaataagaaatctaccataacgacaatttaagggactactacaaaattttcatgtatgtaaatagatgtaaacttatatgaaaatgcgtgtcatattagtccgacttaca

SEQ ID NO: 232197 - DNA, 1196 bp, Cannabis indica
gtttgagcaagggtagtttttccgacccctcccattccacatattggaatgacacatatctttgaactacctacatcatcggacatcaacaacttcatcaaagcatcttcgtcagtctttctaccgtataattcaggttcatctggcagagaagtcttcgcacgtgagctttcagatggtttcacctcaccaacattcttttcaagattcaactttccgatctgatcggctaagtgctccaacctcttaagaatcgcttccatcttggcattcctttcacaatcagctgaattagaaggtttagagcaacaactgagtaacttgctaattgcctttcgtttttctttcttcaactcgacattcttgggtttcatagcatcatattcaatatcgccaaagaagtcctcagcatcatcgacagcatccagaagattgtccagccacttctccacagcagggtttttgattctcttgttctccacctcaatgcaaaccgcagcaagacaattgaaggttgacttcaacttgaaaagcctctcagaaacaacagatgaactttcgtttttccccttgaagaagaagtcctcaacataaggggacgtaatcttttccagcaaaaaatcaaaggaagcagagagaaaagcttcaatcacaagttcagccatgctttaattcagtacttcagtagctcagctgttgcagtactgtaacaataaaagtacagagaaagcttagagagaaaatggcaatggatgaggaatggaataatcttatcacatatgccactgcccagtggagtacaaacctctcataatcaatcacacttttacaaaagtagaaaataatcaagaaaagagaaatagataagacttttattcaccaaggttcatgtattcacctaattatcaatattatttgcctctgaatatactaaatgaataatcaatagtaattgaataatgatatcacaaaaagaaaataaatatacagtgtgagtttgtgaggaaaagatagagcaaataaaagtaatattctttggcttattctcagcaaataattggtttggtaggccatttgtgtttcttattcacttttctctcaatgcaaaacagctcactcactcaatcagctgtgtttgctattcacttagttagattatattgcaaaaacaaaatacaaattaaagtcattaatga

SEQ ID NO: 232198 - DNA, 1663 bp, Cannabis indica
tttatagggaagaaggttagaaaggctcaaacgtccaaagatggcctaaatcatttctaagggacaagtctagcaaggatttcacttcaaggagatgcactaaccaatttgagatgctaaaagtatagatgcagcaatcgtatgaaaaatgcaaagtgtggtgggaaaataaaagtatgaaccatggaggagagactaaggagaagcatccatgatatccaacaattcaatatgcaaaggcaacaaataaaattaggcagcaacaataatggaatgagcgggaaaatatcatcatcgagcagaacactaggccaaagaaaaactcttaaatctctcactgccaaactaacaacacatcaatgacatgacataaaagttttaaaacacaaaagacaacacacaattagcacaatacaaactaaaaatgacacataatagaataatataaattaacttaggtattaggaaactccctctactcagagtcctcgtgggcctcctccagattcgaagttgatgccccagcccacgggctgagtactagctgagggaacggtgggaacacgagcttaaatcgtggcgtgaacttcttgacgctcgacatttttcttctttttcaattgcacactaaacaaccacaacacatccccccctcttcttttctctttgaacgctgctccttaacaccccctaattcaaccaatacactactatatccttactccaatcttgctcaaaaataacaactctttccaaaccacaccaaatcaaattcaaagcattcacaccaaattcttcaccctcggcagccacaagaattgctccctgcttttacttctcttttttcagtttgaactactcaaacaacaacaacaaagcttctaacaataatctgtccaagagccacaacacttccaatactacaccaaatttcaattcaagtcaaatagttacaaccaagcagttcattgttcaaaaccacatcaaaatttcaatatcacaccaacagttgcaaagccacaccaccacttatgaactacacaaataattttcaaaaccacttcaacacttccaaggatcaattttatccacattaaagtatccacacaccaaactaacacttctactcacaccaaacttctaatttctcacaaagacaatcagattattaatagaaataaactcagtcactcacacatccaacagatacttggctgccacagagaaattaaaatccaaataatagtaaagcttgaccaacaaaccagagaaaattaagtgagggtttgattgagctagtggagtcgacgaaagtgttgctggttgtgattcgatgcttggagtggtctcagaattagatgtagattcgactgaaggttgctgaagtgggtttcgatgtgtgcgtgttagcagctgggttgctgtttgagtgaacgagggtggtttgaatgggggtttctgggttaggatgggtggctacagtggtgaactgaatggaaatgggtgctagtgtgagctctagtgtgcgattaaggagatggatgatcgggctgtgtgttggtcgactggagcttgctagtgtgaaggtggttcggagatgggcgtgagtggtaaacggctgagcattggaagggaaatgaagatgatgatgatggatgtaatg

SEQ ID NO: 232199 - DNA, 2717 bp, Cannabis indica
ttttgatatggggagcaaacttaataggatagtttactgttaaatttgcttatcatcttgccaagtcttctgatattcattcctcatcttcagaatccaggttcattaggaagtggtggtcttctctctagcatacagatattccaccaataattaaatcttttgtttggagaccttatcatcatattctgtcgctatcctctaatctctttataagaaaggtggtataagtctgaggtgttaccattgtaagacacataatgaaacggtaactcatgccctacttaactattcaaagagctaaaattatatgaaaaaaattatacttaaatgatgattatttgcaacaatgaaatgtaaatataaaatattttatatttaatggttttgagaagcttactaaggatgacaaagagtatctttttggtactttatgggaaatatagaatagtagaaatgaagagcactttggaaagtcaatgttgtcattctttgatgttctaggtttggttgctttatttttgaatgaatataaacaagctcagcatatgagaatacataagtttgtacaaaatagtaaggagcaacaacaaaagcaatggctacaaccaccatcaggtaaattaaagctcaatgtagatgctgcaattgatgaaaagaaagaaaaaattggagtaggagctgtagtctgaaattaacaaggaaacattattgctggttgtgctattcttattcctagtgtctataattcctacattattgatcattggcgttgaagcattctctgtattggtgtaaagcgatttatctgccaatcaattatgttgagacagactcaaatggtgtgccagatagaattaatttagaatgcaaggattgttcacctgtttctgatattattaattatattaagtctactttatcatatttttcgaatgcttgtttttatgatgtaaatgatatagcacataatgtatctaaataggcagtaaggctttttttgaataaaacttgcagcttcaaattaaaaaaaaggagaatgaaagtacaaagcttacaagtttaaaaaataaggtaaagaaccattccaaagtaactcattatctaatcctagacctaatctagctaagttgagctgggacattagaatcacgacccacataccctacattaaatcctggactaaaggataatgagtttttaatacaaatcatccaacacactaattacaaccattaatttttctaccagaactttacaatatgtcaaaattacagcaacaagcaatctgattaattgaaaccattgcacagttagcagaacccctttggcttcagcaattgcgggtgagacattaccaacaattagtttaataattactgccacattttgattggattcattaattaccacaatctccaagcttgctttttcttggtattgtcaattgccacatttgtgtagatctgatagctaccatgcaaacaatgcgccaagtcagatggtgacctgttcatcaatcttgtttcaagagtacaatgttgttgagtatccaaatactttagcaaaaaacagttacaccaagcaaaattttttgaaggatccatagtcaatcgattaaaaaatatattattctcctgattccataaagcccataagaaacagagcaaaatatcaatagaagggttatctagattagttaatatattctgtatataatgcaaaatgccaaaatgcttatgagaattgtaaaaactaacaaactttgatgccttccaagcttttctagccctagtgcaatcgagtaaagcatgtgaaaccattttagagtgaagattacataagggacaaaaagaagaagaaattatatgccactgagaaagcacctcgaccacaggaatagtgttagacaccaccctccagataaaatgcttaactttagggggcaccctagaatgctaaatcttggacagaaaggattttgaggtttgaaaggatgaggaagaggtaaggtcccttcctgataaagcaaggtgatatgctgactaaacactaaatagactagaattctccttggctcaaataagctcatctttatcccttaatctagaaataggaacatccaaaatctcatcaaccaggtagttatcaaaataggctttaagattatttaaatcccaagccccagaatcctcaataaaatatgatagcttagcagaaggaggctcgtgatcttgaacaaaactttaaatcttgcagttgggatctagttgtcctgcaaagtatttattgtttccctatctgcaactttccagatcaatcctaaagccaaccgatcccttccccaaatgacacttctccaagaaagtgagggattgtgactagtcttagcctccagaatagaggtgttagataaataacaagctttgaggataagactaagcaatgagttagggttgttgaagattctccaagcttgttaagcaagcattgcttgattaaagtgaataagagacctaaatcctaaatttgctgttaaatttgtttatcatcttgccaagtcttctgatattcattcctcatcttcagactccaggttcattaggaagtggggatcttctctctagcatacagatattccaccaaaaattaaatattttatttggagagcttatcataatattatgtcgttagcctctaattgttgggttttatgc

SEQ ID NO: 232200 - DNA, 947 bp, Cannabis indica
actaactaactaacatttcacaatcaccaccaccgagcactaaatcaccacctaccccagaccactgaccaccgtgagacgcgactccaaccctctaccaccgagcttcgaacggagatgtcgaaggcaagccttctaaattattttttttatttattagtttttttcagatgtgatttggaaaaaatctaggtttggagtttgatttcgtcgggcccgatgcaggcccgacaccgatctgatggtatcacaagaaaattgaggaagacaaaggtccgatgggcccgatggggcccgattcctgtgtaaaaaaaaagaattcgatatggcccgatgggcccgatgcctgtgtaaaaaaaatagaatttgatatggcccgatgggtccgatggtaggcccgatgcctgtgttaaaaaataaaatttgatatggcccgatgggtcgacagtgtaatgaaataaaaagagagaagaagagagaggagggtgatgtaaatgggaggtattttagggatattataaaatgtgtcacattctacaaatatcaaatattatgagtttaaggaaaaaaatttaagtatatgtaagcataaaaaatcagatttcccgattattaatcattgtcacaactttccttacataaataattttgctaacaacattaattataattaatgccacgttaagttggatgaaaagaatgtgttacatatatatacattcccaaacttgtagatactaattactatctttctatgttttatttttttgataacaattagtagttaaaattgcatatgaagttattaagtataggataataaatttcatattcaatttattttagataccaagtatatgtttgcactaagtataataatataacaccaataaataattaaatataagatcatatacaagatcgttttaaaaattttagaattcgtg

SEQ ID NO: 232201 - DNA, 1264 bp, Cannabis indica
aatcccaaaatactatcaaaacggagcatcctgctcactgggccgagtcactgcggctgatatgtacattgttgctacgacctcaaactcatggctgctcaacctttgctttccccttacctgcaccataaagtacctgtgagtcacagagactcagcaagaaaagtgaataaaaaataaccagtaatattcagcaattcaatctcaaattaacttgcacacacatttacacaatattataaacacaattttggtactttataaagtgctcctttaccactcgttaatcacgagctgaatatgtcactatcgttgcccgataaagcaaatcataagtaagaaacctaacatcagtttcaagagtaattactcgtaacggtagtaaccgttcccaatctctaggtcataacctaggctcaacatacttttaatcaaaatcttgataataatcacgatataatcattaaaccgtcaacaattaaccacatatgatgcttaccacttttcttaccttagttcacaactcaaacgtacaggccgacctgagtgaaaaacaagctaagcgatcccgggtcctatgtcacgacaaagaaattcgataaacaacttatccatattccaaacaaaccctagctccataattagacaaatttctaactctccactagtttaaaatagcttaaacatcactaaaataacctattctaagttctaaaaaaataccctgagcgaaaccgatttcgaagccaaaactagggttttcccccactgctgccaaaaccggtcgaccggtttcccctgctgcagaaaatggaaactcgggtttttggctccaaaaccaaccaaatcttctccaaacatgttcaaaccttcaagaacagtataacaaccataatacaacatatctcaagcttcaaaacacaacaattcaatctctaactcaaaatcacatgctcaagtgaagaaaaacttgattttagcttcatccaacacaactcaagtcaaccagccatggaaacctctcaaacaatctctaacatactcaaaaacctaccctaaacacaatccaaactcagtttaattctcacagcaactaaagagcaaaaccctacctcaaaaccaacttagaaccttgagttttcaatccaaaaaggttaagaacttaccttcaatctcttctaggttgagttggggcaagaacctgctttgaaatgaaggtagaggctgaaagaaaatcctcaaagtgggctggttttggtttgct

SEQ ID NO: 232202 - DNA, 706 bp, Cannabis indica
ataatcaaatactaactgttatcttaatttttgcaccagttaacgtggcatttatctgggtgacatatgaagtagatttcatgacctggaccggcagtttcccttatgacgtgccattcagggtgattaatcatttgaaaataatcaatctataaaagaagttaagaatgtctggacaaagtatgcaatgctatccgaccaacatccgatgtgcagtcagctaccatacaccagccaaagaatgcgaataaaatatcttcaaaaatatgtctcgtgaatcctcaaaattcaagctacgattatatccctaatttcgcgggacagattcacattatcaaagaataaaaggaaacctacctagtttctcattttattgtatttgtttaaggaaagtaaacaagtttcccattttaattattataagttttgggaaatcaatttaaatgtaatatttctttataaatagcaaaactattcgattattcagggtagacgaaaaatcagagagagaagaatcataaattcaagaaagaaaaactaaaaaattattgtttaaaagcttcttcttgcttttcttatcactattacagggccaaaattctataaaattttggtgttctctttactatatttttattattataactaattatttttaattgctttaatttaaatcactatttctagctaaaagtgaaatcaacac

SEQ ID NO: 232203 - DNA, 1131 bp, Cannabis indica
ttagtaaaaatacaactaacaaaataatgagatgatctaatacaaaatgagacgtagttctcaatctcccaacgggtaacctccctattgagagcactgatcactaccctcgagtcactctcaacaataataaacttaactccattaagcttcgcgacatccagagcaagacagcaagccgctgcttccccacataaagcatcagcgaatccaacttagaagtatgcacccagatcaccccactcagatgatcccttgccacgaccacagaacacatgctgtccaaccccactttaacatcacaatttagcttcaaccagtcttgagggggagggcaccagtcatccagtcgatgcagaggtgcacaagggatcaaagaagcatggtgaactgtaaaagaggaacgaatattgtcaatacatttataaacatcaacctgaccattattatgtaccttttcattttaggtccgccatatagtgtccacggttagcgaggcataaaggaacacctcatcggcattaatgctcttgtttttaaggtcccaaatgaatttgacccagtcccataatcgaattccagtaccacaaactgggtaaataccccaagggaaagacctccacaagtggaaagccacattacaggagagaaaaagatgttcaatagattcattctctgtcccacaaaggggacaagtaacatcctcaataggaaaccttttacagatctcagctcgcacagggattgccttggacaggagacaccaccagagggtcttcattctttcaatgatcttacaattccatagcttattccaaagtgaaggagcaacgtcacaagtgggagccctatcaacaacttaggccaggtaggcagacttgctcgtgaatttaccattattttccaaagtccaaatccatctatcatcaccctggccagacggattaacctcttcaggattgcagaaatagtctccttgtcgaagagactatttaacttttggatgttccagccgccattatctatcaacagctcagccaccttatccacttcacaagtggaggaaccattagcacgagggcagaaatctttcttatgagctatccaagggtcctcccagaccttagtatc

SEQ ID NO: 232204 - DNA, 1429 bp, Cannabis indica
atatatatatgtacgtagatggagaagataattaagaaaaaacagcacacaaatcataattataatatattatgatcatatatatgatgatcacatgccacaataggagtggagagcagatagggctgtttgaccagcgtgggtatgaaaaaagtcaatgaatttgaaatggtcaaagggcttgaacaacaaaggattgtcttcatcaacaagttcttcaggggctttcactatgtaccctgcttttgggatcgaaaacaatgccgtcgagtaccttacctcatttcctctcatcattactctgtgagttggagaatgcaatctaccatttgcccatgcctatacaaaaataacatatacatatattagtctcaaaatttgttgattaattggttagcaatatatataacatgtcttttaacatttctcatagaataagtactcacgtaaagacaatccccaatcatggcgatgaaagagtgagaagatgagggtttgacatcaaaccattggccatctttggtttgaacctctaacccatcaacttggttctgatacaaaatactgctaatggttttatctgtgtgagcggtcaaacccagcttggtctcattggtttgagggccattatatttcatcactcgaagaaggtagttggtggagtccatgtgttcctccaagtatttctcaactcccaaactctccaaaatcatccttcttattattccatccaactcagataattggtcacaataagattgtatggtttcactgcaacattgtattgtacattaactaatcaacatgattattaataaaatttataaaaataatttacgtaccaaaaagttgggtttccattattgggccataaagtagtagtgaaaatttcaacatttttcaggaatattggcatcttcaattccaatgctttcatacaaaggcaaaggtgggtattgacccacatagccatgaaacagtttctttgaaatgtttcgttgtttggtttgtaaaggaagatcgaaaagttcttctactgcctcaaataaggcctttcgaatagctattggaattttatcaaactttgcctcgaaacaaccaaattcttccagtgctttgcggacttgggtccttatcgtgttccactcgggtgtacccggtttaagcacctgttcaactgaaaaatcaataataggaagcctaatttcagtcgccattacgtataaaaaataagaaaatctttttaattgttttggtttgtgatttgggtacgtagtacttctgttaggcactatttataaacataatacatgcattacatttacatgcatatatttgttagactttttatttgggctttacatttaaattttttattggtttttattaaaaacttgggttgtattggatagttctttgtctgtattag

SEQ ID NO: 232205 - DNA, 972 bp, Cannabis indica
aggacacagtcgatcaagtaggcaaatgtgagaaggaagtagatctcgatgttatgccgatcaagaaagcatgagcaatacatgaagctaccaatctgagagttactcaaagacgagatctgtgagcaattatgagcgaagacaacctgatctttgggaacattttaatcaaagacaacttgatctttacgagtgactaaatcagaatgcacctaacttacgccatcaatttaatgccaatcaacagcaagtggatcccatccagttgcgaatcattgagttggaggataagtttagaaaatatcaggatggggaacatgggaaattacctggctatgactcggatgaggagaacgagccattgcatcctgatattctgaattctgaattccctcagggattcaaaaatccacatgtctcgcagtatgatgggactgcagatccagtcgctcacttgaataactttaataccataatgcgagccaataacgttttgaataatatgcagaacattttattcccgacgtctttaactggggcagcaagtagctggttcgacaagtttactcaccattcaataatgtcttgggaaaaactgtccaaggactttaagaaacagtttcaagatgccagagatagatgacctgaagcatcatccctaactaatataaagcagcaactaggcaagtcacttaaggcttacctgagtcgcttcagcacaaccgctgcaaaggttagaaacttgaatgactttattcaacttacttctcttcaagcagggatcacaatcgagctttcaacggccggaggtgagttatgggatgacttacaaggtcgtccagtaaggaacattaatgaattcaatgaaagagcgtaagtgtttatgcgtaaagaggaagcaaggaacgagatgaagttgctaaagactagctcgggaaataaatccaggacaagtactgctacagtaagtac

SEQ ID NO: 232206 - DNA, 3366 bp, Cannabis indica
acaacctgatgcaacacagatatggcctgcaaaagtgtatgtgaaataccttagcgaggaaaaaataccaaataaatattatatatatagatgcacatgttaatacaacaatcacatatgattgaaacataaaattacaatccatgccagataaagtagatcttctagcaacatttttcaatcatattgaaaaatccaattatttaaatgatctagcagttaaataatttaactcaacaaacttatttcaaggagaaaccatagataaacactaacaacagataaccatagaaattgttaaaaaattaaactacaattcagctaaaaaaaagaaaattgtattagacatacctttttcagcagaaaaagaaagttcaacctaaatgtgtctatagttttacagaattaccagcagattctacattattcgactccttaaaagcctaaaccataattccatgaaatatttcaaggaaagctgaaacctaaatttttcacatcaaatacttttcttaaaattttagctgagacatttttttctaattatatgttaatcactctaaaatttcactgcactcaggaccattttgttctctcaaatagttaaaaatactaatctgatctcacaactttaaataaagaacaaattgatgaagctccccaaaattatgcagctgcagtaataaaagaaaaagcaatttcgctaagcacattacctcttcatagcggccatgtgcaaaatatagagtagcttcaccaagcttttgcgccacttcacggttgggtttattttttgttcctttctgcctacctcttctcttaggctgattgaaccatagtagaagtacacaatgtgagtcaagggaagacaaaaaatagtgtttagcaaaagagactcaaagatacacactaacaatctctgaaagatatacaaatttacaaaaatacatattatccaatcctatttcccacagctgcaatcaataaaattcaacatatagtcctccattaggttcaaatcagttagggagcttcattttaccaaacccaaaagattattttcctctacaaaatttaaataaccataaaatagttttcctctggagtgaaaaatcagttactactcctagcattgattatcaacaatgacaagactatttaaagtttttactatcagtgacacctgaagtaacattcaaaagaaagaattgtgagtcccctaaaacaaaaaaccttgggtacgtttagttggaaggaatgaaaacacatgaataggaatcgaaatcagaatagaatggaacaaaatttaaaatgcatcccaaaaaaattaaattttttacaatcatttgaatgttctttctttccatttcaaaatagaatagttattccaccaaaacgatagaaaatcaaaggatttgaatgaaaattgattcatttctactccattggatttcgttacctccaaccaaacaatctttgtacttaaaatttataaatatagatttatagataaaataaagaaaagtaccctttttgatctcttctgacgaccaccatagttaatagctttgatagactcctccattgttagtctagctcctaattcatcatcaaccctagctttcttaactgctccttcttcactatttacagagtaacatccaataagtccccaaaaagcataaaaacatataaagattgtgagagcaattcacctgctggcatcaggtaatggccgcggtggtggtgcttttcgtttcttttcagcgagagcttcatactcgaactcgagtcgttcgaatagcttataaggttggggagtcaagacattatcttcaacgaaatccaaagggtttacaccttccttgaatctgaatgtatactctgctgtttcgttatcatcatcatcaacatcaacatctccttcatcttcatagtaatctacgcagtcttcttcttcttcttcttcttcttcaacaagaacatcaagaggctcatcgtgatcatccaaattgtccgccattagatatcaacaacaccagttgagctttttgattacagagagaagagaacaatgatatgataccagagaaagattgagttttggtcgtgcgaggaaggaagaacagtatttgctggaaaatcccaagcctaacttacattttgcaattaggtccccaattgcaaatatttttcatttagcgcttatctggcttctcttgattagccctttgccgcttcacactcacagtcacagtcatacctagaaaatctctcctcctcctcctctcgcaaaaaccagcggcggcaccggcaccggcaaagagactttcatcttcactcctcctcctcctcctcctcaggtaatttcatttgattgatatatacagcttacgctgccatatttttgtgaggaagaaaaaatgatagaccacattgaaagttgaattttatacagcttttgaagagatttggaatcttaataaagggttgagctcagtgtcttatattcaatgtctcgtctctttgagtgaggtatttttctctttttctagaatttgcttataaagtgtttgatcaaatgtctctactgttagttgttgtaaattattgttatttattaacacatttattttatatgagtatgttgctggtttttttattagtttaagatcctcaaagctttgattgagttgaacttgaaggagttgaattggccaaaaacagaacttgaaggattaagtaggtgtgttgtggttgtttaactgttattacataattttatgtgtaaatatatgtttgtattgtaccttaatttgtctcatatatattatttgtcttgtgttgttgttgttagctgatgttagaacaccaagatgaaaatgttctttgcttactctgccaaattcttcagacccaaaaagagccaaagctttataattaaacccatccaattcatcttctacagacccatgtcacagtccacctccatacccaaaaagatgcagagggtccgagaccatggctttgacaactacatggaagtggagaagaaaacccggaaagtcctcaagtctcaggccctcattctagcccaacccaatcaaactcttccagtctcacgccttgacatcctagctcgtcaccttggcttcaaacagatgaagttggtgctttctactcaaattccctcatgttttcgagatttatgagcacccggttcaacgagtcctctattgtcgcttaacccgaaaaagcccatctccagattgagctgaaaaagcacacacttcatgccccaaaatccctgaagcccgtcaccagactcagaaagctcttgatgatgtccaaatgctgccaggcttc

SEQ ID NO: 232207 - DNA, 1023 bp, Cannabis indica
agattgagtgaatcaaagatacaaaagaggtacttgacctagctactataaggtgtatttataatcaatatacaccttattgattataaatacaaagactctcttttctaaagatatgagtgaaaatcaaagatacaaaagaggtacttgacctagctactatagggtgtatttataatcaatatacaccttattgacaactcatacacggtctgaacaagaccacaacccactacacaattccctaaaatagatcttcaatcagcccaagaatttctatttttgtacttacagaattgtgagcaataagtgcgacttttcttttatagaaaaggaaagttttgctccgggtttctcctcaagaaatctgatcaatcaaaatgggaaactcacacaagataaaaatatcacaactgttagatagaaaagaattgagtaaccaaacttaccctttttaccttattttccataaataggaaagttagacaactttccttccaaaaataaaatacttaatataaaagtcacatacaaaatatggaaatcaatattaacaccagccgaatttaaacaataaataataaatatttttgtcacattaaagatgccaaaaatggaattaacaatctccctctttggcactttgattgacaaaatattttattcggagaaaacctacatcaagtgttagaaatagaaacaatagagtatagaaaatactcccatgcatgaaagaactctaacacataaaacaaataactttttaaacggaaaagttcacaaaccacaaacaaaataactccccctaaaataagggtctagagttgtaaccaacaatccaaaaaataactactttttcctcctttttgtctatcaaggagccaaagacaacaaacaaaatagacaaattcatcatagttaaataaaaacatagataaaaaagcaaaaagataagaaatggaccacttattcatcatcattggattggaagaatttcatccatattgggttttgtgccctaaa

SEQ ID NO: 232208 - DNA, 1132 bp, Cannabis indica
aacagttatcatctactaaatgtaatttgatggttataattaccaggtaacattgagaaaagatcaagagcagtattgggcaagagaagaagaatcttatagattcatcactctcaatgactttgtggaagcattccaatcctttcatgtgggacaaagaatagaagatgagcttctgctctatttgacaagactaagaaccatccagctgctttagcaactcgaaaatatggtgttaaaagcaaaaaagagatgttgaaagctgtcttcagcagagtgtggttgcttatgaaaagaaactacttcttttacattttcagactcatcaaggtaatattggtttttaattcttcgactgagaaccgttgcttatgaaaattcaatcctatttctgcatgagtttaatttatgatcttcttttcttgttttttttttttaaaaaaagactttgattgtggcaatcatcgtctcaactgttttttttgagaactgaaatgcatcatggcacaatagaagatggaataatctactctggtgctctattcttcattgtggtcatgtttgtgttcaatgggatgtcagagattcctatgacaatccagaaactgccagtgttttacaagcaaagggacctaaatttttaccctgcatgggcctatgctcttttcacgtggattattaagatccctattgcatgcttagaagtcttgatttgggtttccattacatactacctaattggacttgatcctagtgttgcaaggtaatatgatttaatgtgacttattatgaagaatcttagttttgaacctcttcaatagttgggctgagttctattttgtaaactattccagttttttcaagcaaggacttttgctcattttcgtgaaccaaatgggctctgcattattccaagctattgcaactacttctaggaatctaattgtagttgacactttcggctcatttgtattgctcatgattttcgagctaggaggctttctgttatcaaagattaaacagactttcttttcttttcattcattcattcatttttatttatgtatatttatatttctttctcattccgactgttatagtgtttcactacagatgatattaagaaatggtg

SEQ ID NO: 232209 - DNA, 2785 bp, Cannabis indica
accaaataattacatatttaataaaatatgtctatttaaatattatttatttttcgggatattacattattgccccgttatactaaagatactaggatgtgattctcatagccaaacaccgcgttccaatgttctcggacacaaaacatgcaaaattatgaaatttctatatatgacataaaaatgcattctgaattcaaataaatcatcataaataagtaattcaatactaataaataattttcataattaaactctaattatctgctaattttcaaattaaagctaagcggtctttacacgttatgtataacccgagactattgtatgtgattatatttattttacttgagtggatgaatatctcttttttgtctatgtatttcgaggtagatgtatgtctcgtcaatatcaggtcaatagttattatccttgtctcgcttaagactatacagtcaccgagttttgaatattttctatcataccttgatttaataaaaatgagttattttaatctgcatttaatgatataactttaatatatcttttgagttgattcatattcttcctattggacatgtgtcagcttcttaagtgtagccgaatttcgagtataaccgtatatataaaaattaatattgaattttacttctttttttcttgaattggatggatccaatccaatccaatacaacctggagctaaaatattagatggatccgatccgatccaaaaaatactaggtctaaaatatttgataaacctaaattaaaccaataagtatataagaaatacatccaacggatagaaccgatccaatccaacatcaaatggatgttggattgattagatgactaaaattaattgaatcagatcgaatggtaaaacctatcatctaatatataagtagatcagatctggataggcctaaaaatattagatgtggtccaatgaacacccctaatctcaagattaagatcaattgacctaagatcaactaagtgatattgacttagaaagatataacagtaagtttataatatcttttccattgtcaatatcagtccagtctgatgtatactccatacattctatactagtatactaatgccctagaaaggactatccacttataaaagtgtaagtaaactttatcgcttatgatcacgtcagtgtaaatctagtgcactgataaagtatgagactaaagtcttcgaagcatgtaatcacaatcactttccattgtgatgacatcattgtaattatgaataaatatatatattttggatccaatagaaaatatacattaaatatataattatgaaattaatcatgtgaaccatgcaacataaaatgatttctgatgttttattaatcagtaaatatgattatattgaaatgggttttatttagggcataaaatcccaacgaactcctacttgtactaatataaaactaaaagtgcatttcaattaatctcaactccttgatcactatatcaagtgtagtatatagtattttcattgtattagtatttgacaagttgtattcaatatcaaccttctccacaattacatctccttagtcacaaaatccttgatattgtaaaattcttttttatatgtttgctcctcttagggtattggattctttactatttggtaactatatatgtgttatcaggaagtaacactagtagtcaatccatgactagaataatgctaaaaactgtatagaactttccataggttgaatgattatttaaaagccttttgggccactttaacattcagtctcactggtagagttagagactccggattggtttttacacttctctaaaattcaattctccacccccagagtaatcaccatcccaaatttagagtttttagcattaatgcaaatctagaaacctgatttggtgtagcctaagagtagtaaaatacgacccttattgactaacatatagttcatcttttgatcttaagatttatttgtttgtcttccaatgttcctttcttggattaaattaatacttactcgtaactcccactcaatagtgcctaccagagcatacatgagacctctcactgttgatgcttaaggcattcttttcatgactttatcttttctggaatagttaaagttgttccttagacaaactctatgtctaggagtcaaaaggcttcctttagaattagccattagaaaaatgcttcaacatcttactaaagtaagttgcctgtacttgagtaagtaaattaccaggtataccacaacccataggttcagatgatctcaaacttatgatactaggattgagaagttttgttaagttcattgaatagacttattatgaaaatttcctttcttgtccttgtaatagaaaacttttggttactccatatgaatggttttaaccacagttgtcttggctttgcttcttagttctttattatgactatccattgattcttgaaattaacaatggttttctataatgtgtcttccaagtcataatagggtgggttccttaaaaccttcccactacgacaaggtactgtgactttctatctagaaacattggtggtattaacctcatcggttgtgtcaatacaatagagacagtgggatcatcttatatagaataaggtgatagaacactttggaattggttcaaaaggtatctcctctactttgctactttgttttcagatttagtcatattcttagaaaagtagtatttgttgaaacaaacactttcttatcttaatgaccatag

SEQ ID NO: 232210 - DNA, 1742 bp, Cannabis indica
attttcttgtgtgaaactttatgtaacaaggagaaaactgaatttttatgtagaagtttggagtatgagggttgttttgttgttgaagctactggtaggagtgggggacttgcgcttttttggaagaatgaagatgaggttactattgattctttctctaccaatcacattgatagtttggttcactttgaaggatatggaaagtttcattttactggtttatatggagagcctaaccgtagcctaaggaggaatacttggcagcttttacggaccttgtttgcccggtcaaaagaggcatggtgtatcatgggggactttaataatgttctccatcatagtgaaaagattgggggcaaaccatatccaacttggcttattgaaggttttcaggaggtgactcaacaatgtggattaattgaccttgacttgaatggacatccatatacttgggaaaagagtagagatactccccaatggattgaggcaaagcttgatcgtacaatggttaatcatgattggttattaaagtttcctaacgccaagttattcaacatggaggtttctccttctgatcatagtcctttatttttggatatggaaaatcggatagctgttgaaagggtgagacactttcgatttgaaaactgctgggttagatttgaagagcgtgaggctattatttataactgctggagcaattctaatggtcttcatatgcaccaaaatattcaattgtgcgggcatgcacttcaagagtggggcacccatgtctcaggtaacttctcagctcgaattaagagctgcaaaagggagctgtggcagctgaagagccgtcaggatgctgaaggaaagcagcagtatgttgatactaaacaacagctttttgaaattttgaaccagagagagatgttttggaggtagcggtcaaaacaactgtggcttcaaaatagtaagtttttttcattctaaggcttcctcgcgtcgtcagaataatactattattagtttaaaagatgatacagggaatccgaaaagatgggataatggtcttggcaatgtaataatagattatttttctcaaatttttactgctgaacatgggaattgggatgaggttttgaattgtgtgaatcctgtgaggaggagcacaatagaaacttactccaaccaattcaaaagatcaagaagttaaagattccttatttcaaatgcatcccgataagtcgccaggaccggatggtatgaacctaaaatttttccaaaagtattggcatattgttggtatggatgtgataaattgtgtcaaaagattctttcagactgaggagatgcctgagggacttaatgccactaacattgtcttgattcctaaaaagaaaaagccagatcaaatgagtgagtgaagaccgatatctctttgtaatgtggtggcgaaagttatcacaaaggtgcttgcgaatcggatgaagagtttcttgggtgatgttatttctgagaaccaaagtgcatttattcctggaagactgatcacggataatatcatgatctcttttgaaattcttcattatctcaagagaaagcaaagtgggaaggatgggtttatggcgttgaacttgaccttagtaaagcttatgatcgggttgattggcattttctttgtgctatgttatatcggttggggtttgatgacaaatgggttcgacttatctttggcagcctctcttcggttcagtataatg

SEQ ID NO: 232211 - DNA, 841 bp, Cannabis indica
cgccccatcgctctttgcaatgtggcatacaaagtaatctccaagataatagctacaaggcttcagagtgtcattcaaaagatcatctctccgaatcaagcggcttttgtcaaagggagatgcatagccgaaaacacaatgatagctcgtgagatagtgcattctttctcaagaaagaaaggcaagagagggttcatgatgattaagctggacatggagaaggcatacgacagaatggaatggagttttctgttaaatgtgttgaaccacattggtttcacttcccccttcacagagtgggtgcaagattgcatttcggtaaagcagattaggctgctcctcaacggggcagtagttgggaaattcaagccggagaggggcattagacaaggggatctgctatccccgaccctgttcatcattgccgcggaaaccctgtcaagactactccagctaaatgaagaaaaggggcggattaagggattccaaatgggcagacaagaagtgaaggtaaatcaccttatgttcgctgatgacgtcattatttttggccaagcgactataaaagaggcaaaggctttccgagagtgtctagacttgtattgccaatggtcgggacaaaagatcaacatacaaaagtcttctatttacttctccataggtgtgcaacgagacaaagtacaagctatatctcagtattggggaatgaggaaaatgacccccgacacgatatacctcggacttccccttttcagatcatcaaaagaacggaagattataaaccaatagtggataaagtgcttaatagagtccaaggctggaaggccaaaatgctatcctg

SEQ ID NO: 232212 - DNA, 1028 bp, Cannabis indica
gatattgagggattgatgtccaagttttggtggcaatcgtcgaataactctcctaaaggaatacattggatgtcttggaaaaaactttgtaaatacaaatctaaaggtggaatgggctttcggaacttgagaagctttaatttggcacttttgggtaagcaaggttggagattaattacaaaaccggagacgcttgtttcaagaatttttaaagcaaggtattaccctcgtgggaatttcttcactgctgatattggtaataatcctagctatgtttggcatagtgttcttgaagctcgtcaatttctgtctcatggtgtttgctggtctattggagatggcagatctatttcaattctgggggagccttggttacctgacactcaaaatccattcatcacatcttcacaccctactcttacaggtgctaaagtgtgcaatttattttccactgatggtgtaggctgggatgaagagattgttgctgatttgtttgtccagagggatcaagatctgatactcgacattcccttgctgcgaggccagaatcgagacaacataacatggaagggtgaaatttctagactttatacagtaaagagtgcatataaaattgtccaagaaattaatggacaagaagatcaaagttctgctgctgttgaacaattctggaagaaattctgggctttaaaattacctccgaaaatgaaaaacttggcttggagagcttgtcaaggctgtcttccaaccatgattcagttgagaactaagcgtgtggaggtgtcttctgtctgccctgtttgtaacagccaagaagaatcgattttccatgctcttgttggctgtccagctgctgcactttgttggaacagagtgggaatcggcacagcagcatcacaacagaacacttttttcgactggtgtgcttcgaaatttctggtgtgtgatgcagatcagaaaaaactcatagttgctctttgttggtcaatttggaacgcacggaatgacaaggtttggaacaacaaaac

SEQ ID NO: 232213 - DNA, 1035 bp, Cannabis indica
tttatgatttaatgcaaagtttaatgtagttcaatattttccatgtgattctaccttatttaattgatgccataattatgtgttctatatatatatatatatttttatttaactttatatgatgataaataaggctattaactagattgtgaaatttattactcaagagggaaacttttaaacaatcaaacattgggtagataaattgaggtggtgtgagattgatagataagcatttacttaggtaaccgaaatagttctaagttgcgaaatcgagaggtagaatatttaggatttttttctagagtgagatttaatgaaggcaatgtataatggtggtatagagatataatctattatttacttacacattctttatacgacactcgagagagggtatagaggtacaatattactctaagttcttaaaaaattggaataagctagtcccatcaatgataaaaatcataattatctagagctagtaaagaggtacaatattactctaggctcttaaaaatattggaataagtcagctgtgttagactttcttaagaaaaagatgaggaagtgaatcgaaaagtgggatggtaagtttttatctagagctggtaaagagaatttgttgaagacagtggagcaatctcttccgaactatgctatgagcgtttttcttttacctaaaaaggtgtgtgacgagatgaaaaaattaatgtgttctttttggtgaaagaattcgagtaaaaatggcagtggcattcgctggatgagatgggaccggatgtgtgtcccaaaggtttatgggagacttgggtttcggaagcttcatgattttattattgcattggttggaaacatgattttcgtcttcattctcatcaagattatttagttacccgtgtgttccaagcttgttattatcctcgtgggtcctacctgggggtggagttggaaagtaatccgagttttatatgaaaaagtatccatgaagcaaagtctcttattcgaaaaggggggcgtatggttgttggatct

SEQ ID NO: 232214 - DNA, 1574 bp, Cannabis indica
gatccaggttcagatcttggtaatgctctgctacataaagttttagaattcatattaggatgctaatgaaacatacatggtagtaaatctagatcctggtaaaatatttccaacagttcttccttgacagaacggccttaactgagtaaagatacgcggtctataatggtgtgggacacatccagtttagaattttgtataagactttcaaactagcgaaattcatgtaggagatgggagtcgattggaatgggaaaaccccattgtggtttatgtattctttgaaatagtcccgaagaggaagggtggcccctgcactgatgtgctcaaggctccacgcccccatactagtctcaccactggtgctagtctcaccattgatccctgggttattacttgcaaatcgcggaggaggatgacagctaaactcaccctcctgtactgatctaaattggcatgattgtccaagtttgcctccacaggtcttcagcatctcgcccgtgtagcctgagattgactgcacctttgattctatcaactcagcctcaaaggtgacattaaggtcctgaggagtctttgatgtacgtggcttgggggcataatctcaaaatccaagttacctggttcaaaagcaatcgtgacattggataaaaacaaaggcttttccataagaataaaggacacgctggatggttccagccaggctgcttctcgcaagaatcggcgtttgccttcggagatttcttgcaagaaacgcctgtagcgactaccaatatattcttattgggttctcactaagtgttccctaaccctagcatcgttcaactctaatttaaatgtgggttttgaaagcttgggtttatacaggatggctgattctattgggaactccaactctaaaacttatggacgataaattcctgaaccagagtgggacattgctgcaagcaaaaagcaggcccaatccctggaaagaatttcatcaaaccagaaggtaatgagttggagatcttaaaacaacctacatattgcctgaaccctagtatgaatctagaaacagtttgaaccctaaaaactaccaaaactagatgagatgacaacgatacaagcaaactaagtaacacatccacacaatgtaacaaacatgagaaggaagaaatcaacttactgtttgaagttagggcttggggcaatgcctggttactccgtctgcaactcttcgaacgaagcaaggatcgctttgagaggatgaagtcgaaaaaactcacagaaaaaaggtcaacggcagagatggcatgcaaatcctcggataaacttaatggtgatccttgacgaagaagtttaagggttttttcagattttctgaaatggagaaagcaaaggtggttccttttttttactttataccaatgatagtggcctcgctagataagagaaagatttgatcctacagacatgatccaaagtggaagtgaaaaagatggtcatttaattctgatgtacttcgaaaccgctcaaccgccaaaatcagagggtatgcatcttttcaaaaaagaggaacatgatggaaatac

SEQ ID NO: 232215 - DNA, 1270 bp, Cannabis indica
taccaaacatgctcttagttactacctcttttttattaacaatttggtggtccattaccccaacacatatttacactatattgaaagttaagagcactctttaattattcttccaaatcggggtgttcatcaaatcgctcagaccgctcgcaccacaccacaccgcaaaaaaaaaatgtgatttgaaattctttgcggtgcggtcgcggattgcatttttcctaaaccgtgcggtgcggtgcggtgcagtttgcagttttgaattattaatatgcggttgaaaccgcaccgcaccgcacattataaaaatatcaatttttatatttatttaggtccaataagtgaatgttcaactcaaaggccactaattattgtattgttaaaacttaaatttttttatatttattttcaagccttatggtacttttgacaagtgttgctcaagctttattgtatttgtgatagtttaattatttggtgatagtccaaaccacataaactgtactgcactgcactattttttttcggatttttttagtttcacgttgcgggtgcggtttgagaaattagaaaaactgcatgtgcaggttggtttgaaaaaattatcaaaaaaccacccgcaccgcgaacacccctacttcaagatatatcactaacatcctattattattttttttattttcattcatacatttatattataccataaattaaatttttaatatttttctttatattatttaaataatatatttatgatactcttacaatgaacccttaaaaggatgcaccaatgcatccctatctatttcagaatccaagaaaaaaaaaataagttccttttctttactgtcgtgtacattatagttatttaagacatcttgtaaaatttttagaaattctaaataatttacaatatagaaagtaatgttcaaaaaatactatttcacatgtgtataacataagagccacgagtgtaacagaatttttttaccctactttttgtagtattaaaattttttactaatttctcaaaattttacaagatgtcttaaataattacaacgtacacgattatacaaaaaaaaattagagtaaagatctctctcgagtatcaaaaccgagagggatgcatccgtccatctttaagggagtgcattgtagtaatttcctgcatttataatgcataataataaaatattatagggtacatctacaatacaccaccttaaaagggatgcactaatgcaccctctatgtcaccatctag

SEQ ID NO: 232216 - DNA, 1079 bp, Cannabis indica
ctccatgtgtgtccctcttgacacacatatgtaacaactgaagcattctatgtctatcccaatttgaaccatctcggtcatcgactctcgaccactatcgtgactaacaagaatttgacgacccctacaatacttccacacccatgccaacaagcttccttttcaacaaaagtgcctcttgccgcttacgatatcactcaggaaaactcggcctaatgtaccaaatatacagtatggactacccaatcaaaccttgtgctacgccaacgagtttcaaaaattttgttgcacctttctacaatcgcacgtggtagttgtctttctagcatccctgaacttgattcgaagcaaccatcactgtctcctctctagggtgtccagtaattctatgaagaaagcaacctcaactccatatcagtctactgatccactttaggaaactaactagctcaacgacatcttgttccagcatacagactatctcgatccttccacatgcctacatcccctctaggataggccaaccaggttcaccttcactgagatgaacttgactctaatactaactgtcacgggctcatcttttcaggcaacggaatactcgtgcggcacattgacttctctaagctaaggtcagccttccaactatccgaataacaatgggcttatttttcgggcctcgtgcgcactttcgtctctcaaacaactcatgccgagtcatgctcaagtgtctattagtgcatccatgcatcgaggttctctagccaagatacttgtactgtctataagttcccactatgataaggcaaatcctaacaccatcgctcacctagtcacttgtgaccaaggtagcatgtgtagcaagatgccaacaccaagctgacgtgccaacgcttttaatcatgcttcattcgatactgtctgaaccatctacctcattgcccaaggactcccatatgtctatggtccaatcctcaagacaccatgcctccatgcatgttggcaagccctcgagacaagccactgaattagtagcatacgttagatgtcttttttcaccatggtgcatctgtcccatg

SEQ ID NO: 232217 - DNA, 1938 bp, Cannabis indica
ttacatacctcaatttgtttatttgttactgccaaatgcaaactagtcataccataatcatctttagcattcacaaactggtaatcatctataacatccatcaaaagtttcatagcttccaactgatcattatgcctgacacaaacatgtaaaatggtcccactttgacccttcaaaccgacttcactagccttaggagctactttgagtagctccctcaacacatcaattcgccatctcatggcagcgagaggaagagggtttctcccttcttcatcccaagtcgtgcacaagagttcacaatcaacgactgaaagtaatagtttgattgtttcaaggtggtcgttcgccactgccaagtggagcggcgtgcaacgccacatgtcaagttccttggcgagttcgggcttgtgattgaggagctccttcacaaaatctacatgaccgagcatagctgacacgtgaaaaggtgtctgagaaaaactattattgatgaagagcttgtcgagaattaaattatctagctgaagaagttctcttaaagccgcgacattcccttcccaggcagcttggtaaagcaagctgttggagtaaacctccacttacactgataatcagacttaatacaaggacagaagagtaattacatgcaaatccctaatttggccttcggcctctagaatccctaacagaaattagttagaatggatttggttaatccacacctaactaatttctgtaactaaattaactaactaactatagaaacaaaaagagagaaccctagatctatatatacctgtatcgatacacaaccagggacggttgagtgatttcttcaagatccagagttgaaaaaccttgaagaaggaggaaatgaagctcgtacatgcacaagacaaagaagaaagttagtacagttagagagagagagagggattaaacacattatatgtaaataaaataaaagagattaccagtacaaaaccatacctgtgacttggaatctcagccttgtaaactctgaacatcaatttcatagtggaatcgagctctcaatctgaggagcagctcaaacggagacgtagccaatttttggtgaacttcgggaaaaattctggtgttaaccctattctttctggtttttgtgtgtttgtgtgtagatcagatcatgttagatctgatctagggcttgtgtttgtgttgagatttctgggttatcgagggcttgggttcgagtttctctgagagaaactctctgctagggtttcaaggaaaacctaagggagagaggaagtgatcgagaagcttctcaagtgttggggggttttgttcaaagacaaaatgaggtcgtattgacctgctaactttgaaaagtcagggaagtgttaaaggtcgaaattgaccttggtaaaactgattggtttatttgttggtgtagggcaaagttggaaaaacttaaaaattctacaatggtatcagagcttggttaaagctggaaaattcaacattcaaactaatcaggaaggaagaaaactcaagcaagaaaccaagaaacataaagaagaacttcaagaactaaacctgatcaaacagaaatcattaacaaaggatttctgggacatttttttaattaatctttacaactaaattgcttattatttatctttacctgattttatctgatttcataatgagcaatttaaaggtagacattgacaaattcgatggttctggtgattacaggatttggaggagaaagattaagtcactcttggctcaacagaaactgttgagagtgcttaatgaccctatagaatggccagaagggactaccaagattcaacaagaagaatacttggaaacagcaactggtatcatgatattcaacttatcagatgccattattaggctgattgacaaggaagaaacccctgc

SEQ ID NO: 232218 - DNA, 1367 bp, Cannabis indica
aaactcaaaaataaaagaaaaatattaaaaaatatgagaaaaataatataaggtaattaattaccctaaagaagtaattggttttcctaagaaagcaactagttactcttctagttaccataaactattttccatatatttttaaattcttttatgatttttttttatgaaaaaaccataaaaataaaaattctccttattagattcttttgatagataaaaaaataaattggttgaaaaatttaagaagttccaaacgagcccatatagaagtagcaaaccaatgcataatactattgaatgtccatctatatatgttctcataaatgtaagaatattatacaacttatttaaagtatttgttttaataagatcacataattaagcaagaatattgatcatagctttcatctcaaaacaaattcgattcgagtagataagagcatttcattacttcattagtatatagaaagtacatacctttggtctgaaaatcatgggaagatccatgaaaatggcataattttgagtaatggcaaaatcatgcatcatgattgggtttggtactgttataggcactggctcatgcatgaaaccatcttttgaaataactctataagtaatgtatggaggagtatgtgcatacccaaaactaaacatttctcctacaatattatcattaatattagtaactttgtaataaccaaattaagggaataagataattcattatatataggctaacacacattattaggccataggaaagaaatatttttgagcatttatttagaataaaatgtgatattttttaaaatcagtaaaaaaaaatataacatttggacctgtaggttaggtgaaccctaggcacagacctaacccgcttatccataaagtcgagcctacacacatctataatggtaatttacattttttgtgcactatcttatattttgttttcttcatgatagtgtttattgtagtcattgtacgttttaaaaagatcaaaatagtttaaagttaaaaaatataggaaaatagtttaaattagttctcatatattttattatttttaattttttctcataaaataacatttttgaaaataagccatataataatttgcacacattctataaaattcataaaatatataatgatgtaaaaattcactatatatataaatgtttttgatcacctgtaaatggatcaatctttggatgagctgtgaatgaatgtgtgagtctcttgtcataatccaatagcccaagtgtttcaagatctccatcttctaatactttcaccacatctacattacataatatatagggataattatagaggaaattacactttatattcttttt

SEQ ID NO: 232219 - DNA, 541 bp, Cannabis indica
tttatttccatcaagtgcttttccttaggtataaatataatacttcatctcaaattcctaaaattctttattcaaatgtagctaagctttaaagcttctctatttatattatgtattgtgtggtgtagtggtaggaattgtcttagggattgcttttactgacccttctttacttgggtcaaagatttgaaactttgaaagggattaaagaaaagcttggttcttgatggaggtggtactatatgtgtgatgggaacttttgatgtaattattaatgatttaattaaggtagactgaggtataagacccctatagctgtggtccttagaattgtcagaatgtctgatggggaaaaaaaagttaaaaaataatagaaaaaaaaacaagataggataattgttacttcctagagagaaaggtttagctagagagaaagtccttaaaacatctaaaggaatgggtttgttgcccttagattgatgaatcactcataatggcaacccgacctacagactggagattccaagaaataggttcaatg

SEQ ID NO: 232220 - DNA, 865 bp, Cannabis indica
ttaacaaaatacagggtccaattgaaaacttttgtaaaacagagagtccaaaataatatttaccttttttttttacaatttcagaatcctgagcattctgcctgatatgtgtgcctaacttgcttaccctaaaggcctgctagttgctaggctttttaaaattaattattgtaattattaatacaattaattagtgtaataatgtactaatttaatacaatatagaagacttatacaaagtaccaaaacaaaccttagttcatacaaaaaatcttacttttagtcacaataaaatttgtgattaaaagtgaaaaaattgtgactaattataaatcatgattaatatattgtgactgaaaagtttgtgttaaaagtattagccacaaaaattacaatttattttgactaaatgtatttttagtcacaatagtacttgttatcactaaaactaaattaatgacaacttgtaactaaataatatattttagtcacaagtaacattttgttgtaactaaaagttacgtatagtcacaaaaaattatattgtgactaaaaaattataactaaaagtagtagtagttttttgtagtgttggttgttgcactatatattttcttacagtgatcattatagtattctacaattaattactatcactctttcaaatattttacatttttatattttgctgtatcatacgatttcagaaaatataccatgatatatataataaaactttcttctccatacatttatataacattacatgataataactctctcatgatattattctactttcataattaagaacatgttgggattaaactcacttaacctctcaagtcagcatgttcatctattt

SEQ ID NO: 232221 - DNA, 738 bp, Cannabis indica
tgcttttgatttctgatcgtttggcttgtgtaggagaagtcagactaatcaagatttcttcccatacatctctcactacacattgttgagatatcacagcccaagcaaaacaatcaaagtgagtcctgacttgagatgatgataaacttttcttgcaagagtagtcttccccaaaccacccataccacatatagagatcaccctatgcttgtcgtttgtagtcaaaagggataccaacactttgatgtcttcttcgacctcaattctcttctccgttggttgttgtttgatgaagtttcacctaactcattgacccttaattcccttatgccatatgtttgtaaattcgacgtcaaagtagcaatgctagatgagatcttctcaatctctaatccaactctacggacattgattcctttcttaaacatgcaagaataccttttcaacacacttataacacctctaccgttcctcatggaagctactttgaggacataagtttcaataacatcctccaaatcataagaaatgtttctaacttggacaacccaaaggcgcactcttgaatcgccatctcttacatgagcatcggcgtctttcaagaaagcaaacatccattgcagcttggtctgtgcatccatgacttggcctcttacaccacccaagaacttagcttcattgagtaccaaatctccaagcctttcaaccacaaatgaaacaacagcctcagccataact

SEQ ID NO: 232222 - DNA, 897 bp, Cannabis indica
atttcctattccctagtcatgggctgtcttttactcgtgtttctacaagaaaattctagtaaatcattattttcattcccctgggttgtcaattcccagggtcttcaaggcacttctcgatgaggtgcctagtcatttggttgttcatcttcaggaacatccccagtttccccaagttgctcttgagctgtctctagcctccttgttcgtgagccttgaggttaacctcgcggccttctcacaccaggatcaagttggttctatgtgttgttttcctgagttgtgttggctgcgactgcctcccattccaacttagtgttttgttggtttgcctccttcagacgtcgccggagttgacgattttccaactcgacaaacgctacatatctcgtgggatcataggcaccctcactcacaggcgtagaaccgccaacattcttgttgggttcctcattcctagtttctgggttttggtcaccatcacgttggctccttcttgagcgtgtggaccatgttaaacgtgttgttcgtgaatcgggtggcctccatgagcccatcagctcttctccaggactgtgagtagtcttttcaggatgagtgttattgttttccccattatcagccatggagaaagaaattcttttttggttaggagggatttttctgagcttttatcacgtaggctctcaatgaaagcaccaaattgttaacgcagattttcgttaacgataatgagcctattttcgtaataggtttagcacaaaaattatagaaatctaaggaaaaataatagaagtagaaataacacaaggtttttatgtggttttgtagttaactttgcatagtccaccagtcaatcttattcagatttttttgatacagaagtagggttcttta

SEQ ID NO: 232223 - DNA, 1886 bp, Cannabis indica
gtatgatgaaaaaatgcaactcattctggtaccaaggtattggaatggggaacatttaagaaaatactaccaataaagtaccaggtcggatgaccatatcaagtactaaactaaagaacatttactcttaagtgaatggccttctggacgaaccacgcccaaagcttaggataaaattacaaagtatttaggtcggatgaccaccatctaaagtacgatttttaattcctacaatttattttatttcatgttaagataaagatcagactagatcaaattgatagctttgatgtaagttactacggtaacagacatattttcgatcaataaatgaataaagatgcttatttcaaaattcaaattgagtcgaatttactagcatgttgttaatttaccataaactgcgtacaataggtttggttgaacccaaaaccccgaacaagaccaaagagcacacttgcaaaaagaaaagtataagtgaccaagagtcataagtctgctcaatcacttggggggttcctatacctgtacaaagcatttagtaaaaataaaaaaaaacatagtttcatgatgattataaacagagaatgaaattcattaaagataacaaagcatgcaaaaccgagattaaaggctgcccagtcagcccgttttcaaaaaaatgaaaaataattccaagtttaaagaccgcttggtcggtcaccttatcttaaaaagggccttatggacggatagataaaaaagagatagaaaaagaaagtagtcaaattgctggagtcccaggctctttgtacgggtgttctgggtcagttggagctggaggatcgtttgtcggagcggggggcacgtcaacagtatggccagaagtggaagtggtcgcctcgggttccccgtaggccacatgagaagcacagtactcaagaaacatgtctttggtatcgcccaggtaatcaaaatttgccttagtattagccttccagaagtcgtaaaaactctcgagactagctgtctctaaggcatttaccttccctccgagcctcgccacttcagctctttgctgctcggcctctgacttgtacttctcaacctcagcgttaagctcctcctccttactcttcttctcttcttccaacttacagaagacagctcgaagaacctccctttcttcctgaagactggtcacttcctttgacaaggaggcaatggcagttttaagttggtcggaagctttaaatctttagtcagctcggccaccttcttctcagcagcaagaagtttcttgttaacctcccctagctctattcggatagccccaaactgaaccctggcctcccggcgtcctttctggccaagtccacttctgcccgcatagtgttggaaatggtggcattaggcagccgattgagcccgagaataagcgtaagctatcttcagaccagtctgtacagagaaagaatgttaaaatctgaactaagtgaagaaggatataaggaaactgtcaagaaagacttacccttgcaaactcctttagagctcctcccatcaccaactccagggaaaggtcattgtctaccccagccagctgctccttcgcctcagggactgaccgagtaacatagtgaatgagcatgtctttgcctcttttggtcttcgggtacagtaccagaggtggggtaggtgccttgatcagctcagatccgcccttcgatcactttggcctatccgagctacctcctcgagaatccctggacttagtcatttttgagacaggagggtccgcaacagtttgttccttgtatagatcaatgaccgcttcagctggtgtcttctccctggacggggttgtctcaccacccttggacgtcttggccggaggagataagccc

SEQ ID NO: 232224 - DNA, 1198 bp, Cannabis indica
gtaaggcggatcatggaggctcctcttcgaagaacttcaaaatgcctcaaattaagctgtatgacagactcttggatcataagactcacttggccaagtataaaaagattatgcaagtggccagggtgagcggtgatgccaagtttttgtgcttctcattaacactcaccaggtctgtggaagattggtggtagaggctaactcctagatctattcactcttgctaaaaggatttacaatccatatttagaagcatttcatagctgcatgcgagtatgatttggaaatggggtccatcaccaacatctaacaacaagtgggagaaaccctaaaaagttttattcagcgaaagatggaagcagccgctaaaaccaaggtaaccgatgatatgaagctcatcgccttggaatctgggctcacatctggctccctattgttgggagaaatgtagaggaagagggttgaaaccctctctaaatttatggccaaggcctaaggcttcataagtttggaagatgcttaccagcaagccttcggggtccctcaacagcctcggtaatctctattcccgcattaactttgccttccactattgctggaatgctatacactcctacgatctatagaccttctacgtctatgccgacacctacacaaaccaatttctctgggtatggagtagtgaaaactagatgcactatggctcctagacaatcaaaagcatgggtactagagaaagaattgagtaaatcccagagcaagagagaaggaaagggtctggggcgaggagaagctttgaagaaatccaggaaagagtataacccaaagtacactgagtactctagtgttgtggatactcgagaaaatgtgttcaaggctacatgtaacatggctcattataggggacctccaagaattcctcaagggggaaaatttcagagagcccaaagaagcattgtgaataccatggagatgtggggcatacaacaaatgaatgtaacttcttgaaggatgagattgaaatgttaataacggtaggacattcaaaacaatcggtctgggctccaattatatatctcaaacagggggtcattcatggacaaatgattattcctaaacaacaaggtacaataaatcctctacatggagtaggtcacaatcaagtgttgggttttgtgccctaaataaaacccattac

SEQ ID NO: 232225 - DNA, 879 bp, Cannabis indica
agctggaactcctttctagggaagagctagctatcatgagaacttcacccggagaagacatgatagtcattcgagaactcccttctggacatgactatcattccacacaactcctctcaaaatcaataatcaacgagtgaacaacttcctaaaaatatcatatgtagaaacctttttatttagaagaattataccatatcatattatttttttatttaatatatacgagacaaagttatcctatatctatccaagatccaaaattattgatatcttgatatcttgttttctttagaatctcacagtaattataagcttaaacttcttgttttccttttttgtcttgtttagaaacctcattggtcttcgcgagcacaccatctaattattgagctacgaaagtcattgtctcattgcaattgaatttagatcccaaaaatcaactacacaaaacagtattccatgtccatccaacataaatatgatataaaaagatataatataatatattaatatatactacagaaaagaaaataagagaccttcaaaaaaaaatacatttttctttagaggtttttttatttatataattataaagtattataataataataatgataataataataataataataattaatattacatatttatgctattcaaaaaaaaatattacatatttatgtataatatttactctatttttaaaataatgataaggtaagataatttagaaaattgatgaacataaaatttcctttttatatatgattaatttgataatttttatatattaatagtataataattatttatggcgtatatttttattgaaaaattattaataaatatatattattcataaaattatattaa

SEQ ID NO: 232226 - DNA, 921 bp, Cannabis indica
aaatgtgattgtagagtcaaatagtctgtgtacaagggatgtcaaacacaattcgtatggtctctcaatttaattttttggtgaaaatttgttgtttattattattgctcgttgtattgtaaatacacccggttattatttaggatataatttgggagtggatgatatcatctgatttcctttccgtggttcagaaagaacttttgatttactacatttgattcaaaaaaaataaaaataaataaataaacaaactaactagattcattaagatgtttctttttggttcttcactcttccgggcctaacgatcaaaagttaaattgaaaagaacttcttttttataaaaaatacacttatattatattttattaaaatatacatatttttaatgagtgggttgtctaatatacttatactctttatttaagtctagcatatagattatattaacctatggggtctaatgagaacatcatctataaaagtatgtatatattaaagaatataaaaattaaagtataaattataacaaataaaataaaatgagtatacaatataatttcttaaaaaatatacaacaaatgaataagatttagttaggactactcaagataattggggtcttgggtcaaaaaaatttaactgtgcttttttgaaagaaaaatctgtgtgttttttttttttctttttgggtatatgttagtaaaaataaaaaatatgatatttttgaaaaactagttgtcgttgtctttctttgaagaaaaaaatttaaatgtagcagcattattttttaaaaataaatttggcctttttgaagaaatgaactgtaatttaaatagtggcatatatctaaaatacaatacttttgaaaaataaattagaataaatactataatggaccctgtgttttgtaaaagt

SEQ ID NO: 232227 - DNA, 862 bp, Cannabis indica
taaattctatacgggtaaagtgtcctagaatagacacttaccagttttacgttacaatgacttaggatctccgatcgtcaagcaatttttccactcatcttgattgacacacctaattccaaattaaggaaagattaatataataacatatgcacgtattttagatatacatgttttataataccgtttacctggtgtactagagacacccaagtggatgtacattgaattgtatttagatattgataactagtgatactagtgggtatcagataataaatattgccaatcaaattaacatataagggcatggtgtcatagagctacattgagatacatatatatatgttctgcaatacaaaaaaataaagaattgaacctaccacataagtaccactaaagtgctgagtataagttgctattatggtcaattggacttatagtatggattgatgctaccacatcagtgcgactagagtgctaagtatagactattattatggtcaatcgtactatgatcaactcgttctcaattatacgtgttggacacaggtagtaaacccatggtaattaggtgtatgtgcgcctaattacaagtcaaatttatgtttatattttatacttttcttactgagtctgtcgactcatagttatatttcatgtgtaggtaaagataaaactaaagactgaaccacaatgagtttggaactcaatgaaaattgtatatatcgagaaagttatgttttatgaaagtttttattaaatacgattttatattgaaccatttgattagcaaatgttagtacagtaattaagaaaaatatagtaacacgtctaagcttgtaggacattacaaccaaca

SEQ ID NO: 232228 - DNA, 1307 bp, Cannabis indica
gttatctatataattaaatagaggtaggcaggtagccaaacttactgtgtgtcttctatagaactgaaggcctcatggttgaatttcatagtagggattgcagcaaccaaaacaggttcaagaccactaccctggtgctctggctgccaccaaacaatgaaagcttaaaatccatacatctccaaattaaagcactaacagattgaaagaaagaaaaaagaaaaatgctaaaacgtcaagatcaacacaaggaatagaaaaatgcaactttgaatttatctcacaaagcctcctacaagtagggtataaatttagataccaggaagtcaaccaatgtcataatctatctatatttagttaatcgcaaaaacagagcaagcaatctttacaaagtgaatttatttgtcctaaatattcgttagatatttcagctatcttccaacttcagcaatgtcttaacaattttcagctaaaaaagtaaatcttattttctaagattcgtttcttcaccattttaatttcagagcttgactcagtatactaataataaaaaaactcatattgaaacaatattaactatatcagccatcatatactcccatgggaaaaaaaataagacttgttaaatcaaatctctcatctctgatgaagctacagcaaattgatatctagatcacaccatatctagaacagactcaaatacgatatactactagatatatattaatacagaagtaagtgtctctaacgagattcatattatgcagaaaaccaatgaaacccaataatatagttgaaaatttcagtagatggaatcaaacatacctgctcaagatcaagcctggattcaatctcgaacataggccgggattcgttccttcgaagcctcccacaaataattcttgtgcaaacaaatacaataaatgttgcgctcataccaaatccaataacagtagtaatcaaattcatgcctccacccaccatatttccaaggtctcctacttctatacccgatttcaagacgaccaaaaccaaaaatatatatatagataaccaaaaccccaaaaatgtcaacagaaaataagaaaataaagaaaaatctttctattctaatacagaaacaaagaatgcccacgagcaaattaattgcaacaatttaagaaatacacagatcagaaacaagaagatttggaagccaaatcacaaaaacaagggtgcccatttggaaattttatcgctttgtaatgactcaaagatgagtgagcaatactaattaagaagtgagctatgaaaggaaagaaaaaaaa

SEQ ID NO: 232229 - DNA, 618 bp, Cannabis indica
cagttggtatttcagttgtattttagttgtttcatgattgcattgtagttcctccatcattatatgcactagttcagcaaaaatacaatcccttgatattagttctacacttgattcataatcaacatactgcttgttgtcatcccaataactattgttttgtagtaaaatttgcagaagttctatatccagaaatttttgtatttgttctcaatatttggtattaatatttctaaacaactattttaatccataaaacccacctaacaacaaacagtaaatgatattaaatgcatcagtagttgttcaattataaactaattgcatcaattccatcaaattaaccaatttaccttatgaattatgtttgatctaattgaaaaataataaacaatcctcattatgaagaaaatactaaatatattggtacattgtatttttagtcggattcttttaagttgtttttgggtaagcaccaaatccccttttgattgtgttgtgatcaaattatgccccacaatagaattcaaattattatttatggattgttattgtatatttttgaataaaggaggttgtaatctcttttttttctagtttggatatttgtcaggttta

SEQ ID NO: 232230 - DNA, 1796 bp, Cannabis indica
gagctagcaagcctatcatcgtgttgtgaggactgggatatgatatataaattcaaacttaaattgtaccacataatttagttttgaagtattcacagtaataattctcagtaaaaacacaaaaaataaataaaatcaaaatgtgagttttgtcttacatttttggcttctttgtgtaacaaaagagctttatgctttagttgggcaacctgtattgtcaagttcaaactattgtaataaatcaagtttttcaaatgtgtacattatacatatggtttcaaatcttcagtctccattccctattaatgtatgacaaaatatcgcatctaataaaacattgattgtaatttcctattaaaaatttgcattcaaattctcttgaagcataagacagggatcataatagataaatacctaatgacatgcttaaagtgactacaatgtccactttcaatgtaccttacttaagaaaccaccttccaattttcgtctttcagtagctttctcctctgcaactaaggagttatgtgaactttcatcatcaataatgcctaattttgtttgaagcctaaaggtttattagtgatattaaataaaaacagagttagacacataactaataattttaacaatcttagttccaaattcttacgaaatttacaccagagaaaaaaataatagcaaacattaaatgcttacattcatagcatgtaataaggtactgttaaaaaaacccattttattgattaggctttagtaaaaaccagccctaaaagagttgttactaattaaaataaataaacaacctcattgatggaatggaatgtacaagctggcgttgtttcgctaaatggcttgctgtgggcttcattagagttgaacaccttgcaatagttgatttgactgtggacttacctttagtctctgaaaatatgttaagatttaattatttatcattagtctctacttatgcaaataattattacaacttccctcttgagagagagcaatagggtggtttaggagttgggcgatgggggtttcagggtttgggtgatgctgatgggggtttccacacagggatgagagagaaaacgaaagggaactgatgataataataataataataataacaataataatatcttacatttttgaaatcatgcggcaggagctagaaggattagagcaaaggaagaccgaagctacacggggttgggactgggttcttaggaccctatggaacgccggagattgcagggtccaatggtctgtcagtggttgttgcaagaagaataggacagtggagagaaggagatggtccttgagtacgagagaggaatggcggtgtttgggctttggggctgttgaggaacggtggtttcttaatacgagggtttgagctaggaagacaaaagggtcagtttcagcatatatatattaagtaatacctttaatttcggttattcccttataaccgaagacataagtcttcaattattttcgcgttacgccatcctccattttatctttgcttttttgaaaaaactgaagataaagttaaattttagttgatgggaaccgaaaattgatgaaaaatgattgtatcaatatctatcttcggtttttattttttttctatatgaaaaccgaagatatataatatatttgtagtatagtagattaatccaggaaaggaacattggaagacaatcaagtaaatcttaagattaagaagaggaacaatatgttagtcgataagagtgtgtttaaaactcttaaactacaccacatca

SEQ ID NO: 232231 - DNA, 1434 bp, Cannabis indica
tctctctctctctctctcctgtttggctcaaggaaaccagcaaaatacaaggaaaaactcagctcaaattcttcatttcttgtcaattttttcagtcctaggagttatccaacttgagataaacttttcttggtactcttgaaggttttacggtttcaaagttaggttttgaagagggtttttgataaattctgttctatgtatgcttactttgttagagcttgtttttagatgttaattagggttgtttaagctttaatttaatgattttaggtctgttgtgttaagagtggggtagtttactcagaaactcactcaataatggtgagtcactaatattgatgcatttttgtgttttgagtgatgatgtatgtttaactattacaaaagtggctttttctatcagtttataactgtcttttatactatttcctaacagttccgtatatcgttggctatgtggacgtcataaaaatacaaaattttaaaagatgttttataactgttggaaaaaagtcactttaaatgacgatttacaaatgttggagtaaaagtttctttaaatgattatttataactgttgacaaaaatattatgtagatgaaattgaattacttgtttatatatttttttaataataaatatatataataatattaattttcatcaaaaaataaataatattaattaaaataaataaaattaaatattttcaaatttcacaagagatacaattcaaaaaaaaaaaaatactacaaatgcaaaataaattttatataaaaaataaatactaaatatcaatattacaacctaagtgaaactgattaaaaaaacttaagtgaatttgtacgcctggcgatggccttcaagccaaaaacgagcctctccttgatggcaaccctaaccaggcccgtcgatagcctttctccgaccgtccaagccaaaaatgagcctcgacttcactccccttgatggcaacccacaccaggcccagcgatggccttccttcggccatccaagccaaaaactagtctcgcctctttcccatcccttccccctcaaatctctctctcctttgttctctacacggtagcgacctctagttctctctagcccaaacaaaccccaaaaagcttaaccccaaccttctaatctcgacctcaccccctctctccttgtctctttttctctcggctcatatcgaacgagccttgtccggtggcttcttctgcctatcgataatggagccacacccaacgacagggttcaactccctcgaaagcccgtggtcaagactattccaccgtaaaatcctttgcagcttcatgctctgatctaagtactttgaggctctttcacaatatagtcttgagttagaatgataaatgagaagagagggaggcagcatgttatttgttagggttagaaaataaa

SEQ ID NO: 232232 - DNA, 1329 bp, Cannabis indica
tgcatgagttgagctcttgggagtaataatggtaatagtacctcactgttatgtattacaagctctgtcaatgacggaaaataatctcctaacaatgtcactttgagtctgttgcagtcaaaaaatttaagattcttcaggtgtggaaaaacaccaccttccataaatgaccactcttcaaacttctccaaattatcaaactccaaagtctccaaagatctaaagaatgtctttgtttgtattgcaaaagaagaatcaacactagtagagcaataaaactctgaatctattctcaccacaccacaattcacaatcaaaagaactttgagagagggaagttgtcccaatgacggcaagaagctacaattactacaatacattaacttcaaacttaccaaattagacaagcaacgatgatcttccatccaatttgggaagctacttcctttgtaggaccaaatctcaagtttcttcaaatttggatgaggctcaacagtgcagagtctgagtagctctctttctttgtgcaagtcatcaagttcaggttcatagcgataatcccataccaaagataggtgactaagaaactttaaactctttaatggtgctgcaacatctgaaacttcctcaaggctactaactttttgtagtcccttaatagaaagactcccgtgcagatcttgaaactctttcaatagcttaatgccaccacaatctctagttcttccaacaacaaatgcattaagtgtttgcagattttgtagcttgcccaactgcaatggcatcccgaataaattcttctcaggaacactaagatgtcgcaacttgactaaattgcctatatcagttggtagttgagtgactttcctacatttctccaacaatagtgtctccaaattatacaatttacatattgtgttaggtatctcttcaatatcaatacaatctaacttcaaatatcttaaatacttcaaattgcctattgaattgggaaacttggtgatgctataatcacatatggatagtactctcaatcctgggaatgacttgtctaagtcctcaatctttaacagctccagcagatcaccgcttaactcttgttgccacaatatggtgcgcacgcccttcgctttgaataactcctcaaattccttggggtcattggctctttcacagtcacgaagtacgaaaaatgacgaaccttgtgagaacatttgtttatattattcatcatatagcaaaactcaccagaaacaaatattgccaaatcatgtataagatcatgcatgagaaaaatcgactccttcttattgttatttgatggttgaa

SEQ ID NO: 232233 - DNA, 783 bp, Cannabis indica
gctttttcttagttgtgggttctcagagggtccgtgatgatatttggttttcttatattgctattaatcgctccttactttgtcctattattttgctcaattcactctaatgtggtgtttggttggaggtaatgaaataaaataactcgagaagaaaataattttcattttattcttttatttaattgcattttaaagtattagaatcttattctaatggaatgtcttctctactattttggtagaatgaatattttatttgaaatagaagtaaagacaatttcaacataatatgagaaaaattttaaatatttttttattaatttttttatacattttaaattttattctattcttatgcattcttctctaccattttggttgcattttaaaatgtagccaaataaaagaataaaataaaaattatttcatttctatttgattctatttcattactgttgtgctcggaagctataaatagcaaaagatagcgataaatatatatcaaagcggtcaataataaaacattacgcggttcgacaatttgcctacgctgcgggaggtagctaatattattaaacctgagaaggaaatatacagaaataaaaatacaaatttcctactaattatatctctcaagtgtttcccaaagttttaatttacagatgctctatctcaaggtttcccactgaacctgattaccctaagttgcactcggattgtacacctcgaattatctactccaaaattaaaaatgctctttaaagagtttcatatatatag

SEQ ID NO: 232234 - DNA, 3006 bp, Cannabis indica
aggttagaaaatcatcgacactcaaagcaaacaatattcatatttctacgttagagactagttcatgttctattatttactttgatattcaacccctaacttagttgataaaccgccaccattaactaaaggtaaaatatgttacaaaaaatttataaatacactatttataacaatagagttcaaatattatttttttttctcctcacctcacttcttatatctataaaaaattatttccaccaaaaaaaaaaattataataatattttttttttttcctaaaaacacatgtagtatttatatattttctttaaaaaggaaaactggaaaagttacccatgatgtatgcttgtaaaaatagttaacgtctcgaagcaagacagcaaattttcaccatgagaaatcaaacatagcatataaaacctgaatactcaattagcttgatggatttctccatgaatacagttgtatcgtgttttagatcctaaaaagggcataccaaaatatttacaaatcaattaactatatatatgtaatactcatccttttggtgttgaaatggtggatacaacaacaaatatagggtcaagaaaatagtactctacagagttggaaaaattgtgaaagtaaattacatttcctcttcttcttctacagcattctctgtaccagcaccgttacttcttcttcggaaccgagacagaggcatgctgactgactgagagttctcagccaacatgtaaagacagaacaaacataaacctgattcatgaaaaaacattatccaaatgaatcgtaaatatattaatctaatggttactttgtcacaatttcatgattttcaaatgcctctagcaatcaataagattctaacttgggttatacgtagtaatgagtgaatgtattatataccaaaatataaaaagtttaatgaattagaaatcaagagggtgaagataaagcttccataacgagtaggcaaaaagatcgatgttttcacattattagcaagttctcagttactcaacgaggacaaactcaatgatacggcactataaccaatagactcaagatctgtagacagattaccaatttaccgatatttaacagcattaagtcgtggtaaacttgataaaatctttctcaaagtaaacgtaaggctgttaaagtttttaccaagtttaccacatgacttaacgctgctaaatattggtaataatttctaatgatcttgatttagcagtcaagcaactaataaagaaagcatgagtgaaaccgaaggcccaagccaacctaataaaaactcacttgaatcttacaaattggtctatagtctacacaatctacgaatgtaaagggacatgttaaaattcaggttcaaataactcttgaaccaaaaactactgttaatgtcagtactactaattcctctacagagaagaatatcactcagagaagcagttctatcgtcatagttttataatataattaagcggcaccatgaatcatgaaaacatatcctatgtctactagtacaatctaaaactagggaaaccaacacaaagtaactgaagagtgttcttccacataaatactttacatatgaaaatggaaaatcattaatcaaatgaaaagaaaaaaagtttcacagaagaacacaatcgaaaactttattggatataaaaagttactggcccactagtacatcaacgacactaggattataacagaagtaccaaacttaccagcataagcaactgtaacaccagaaaccactcgtccaaaagctgacaaaacataaagacataagacgacctgaagaaatagaccaacaaaaaaaataataataatcaaatttccattatactattattaaagaatgcaaaaaactagtgtagtttttcttctcaaatgctgatcatatctccacagaaattcaaagccatctgctctttaagtaaatcatttcaaggatacaagatgatatatcagcagtcaaagggcctgaaatgaaatattcatgatcccaatgtggaatcccactaaaataaattataactttggttcagctacaactgagcaagtggcaagcaagtgcgaagggcaaattcaaggaaatattgtttttgatgtaaaaacaaaagttttggcagactattagacaaagaatgagcaataagtgatttttctcatctgaagcaatacaaaacatgattagtggcagtgctacacaactcttaaaaaccctcaacaaagaagaatcgtagtcaatgttgaccagtaaccatgatccaaaacgaaacaagagatgcacattggcatgcccagtagtcaattacattgtccaataattccatttagattcaatattgaataataccttaagaaaaagtctcttgtcatggccagtagccgcaaccctcagcacagactctgctgcaccaacggtattagctaaacacgccacaacggtattggcagtgtcctgagaaatctgccactccagtggatccacgggtaccctatacaaaattttaatacattaaaatacacatacatacatataaacacaaatttaattctttgaattttggtcctatagccaaatggggttattcaagaaaaggtcatcaatcatcactaagaatgacatgaaccatataaccgtgaatcattattacttagttttagcaagtttttgccggctaattaaattcaagattctaatttcaaattctggtacgagaagaagaaattaaagaaaaccccttatacaactttcaagaaacaaacagtaaagaaagaaaagacgtacgagatgttgatttggcggaaaaggaagccaagaatggcgagagagcagaggaggacgatgatgacatcggagaaaagagtaagaaggcttttatccttataggcacagtggtaatacaccaaagtaccacataccagtaagattaccggtttccctatttctgatctgcaatccatttctctctctctct

SEQ ID NO: 232235 - DNA, 1935 bp, Cannabis indica
tctctctcttctctctctctctctctctttctctcttcccttggtttctctctccaccgaacacaaacatcgtcctccaacggctacaaaccaagataacccaaccaccagccaccccacctctcttcctccctcttctctcttcctccctagacttctatcttcctcctcgatttttctcgcccaaccatcgtcgccacccaaaactcaatcaaaccttaaaccctaaaccgaaaaccccctcctttgctccattcacttaataaatgtttgaaaccaccaccatttttcagtgttgaacgcgtgcgaccatcaccaaggatagagctcagaccaccaccgcgccaccatcaccaagaacaaagctcagaccatcacgaacaacaacaacctaaacatagtcaaattgtaaattttcttcaaaagtagatttttcatacattaaattgtgaatttgtgtatgttgttgagattagttgaacttttatagatttttgtagattatgtgtcttgttgatggtggtctgttattttcacagtgatatcgataggttatcgattatggaaccaagggacagttgatagtttatcaatagtttaacgataggttataaacactttattgataggttttattatttattcatactgaaatttttctttagcttgattatttttccaattttttttaatatttgtcaataggttatcgatagaatttctattgtttgtcgatggtttagttaggattgtgacttgctattttttttcttcaaattttttaattgtttgtcgataggatatcaatactttatctatagtttatcgataattttggttaggttttgatctttatttatggatttatattttgtaaataggttatcgacagtttatttatggcttatcgatggtttcaagtttgtaaaaatatgttgtccatatgattatttatcgatagtttaatgataccacatcgatattatattgatagtttctagtttggctaaattattttatagattaaccaattatcgatagtttgccaattgtttatcgataggttggatgtcttttttgcttgtatttgttttcaaaaggattttaattttgtcaataggttatagacactttatcaatgatttatcgatagtttctagtttgccaaaaataatttgtccatatggttgttttttgatagtttgacgatactatatcgatggtttcttatttgcctaaattattgtgtagattaattggttatcgattgtttgtcgattgtttatcgataggtttactaactttttttttttttttttgtctttcacagatgcctataaaatttatagttcctgtccctgaatattttataggttcagtcacctatagacgcagtggtatattcaataagattattaaaccagaatttgataaacatagtttgactggtaaggtcaaggaaagtcttttcgatcaattccgcatgctggtcctccatcattttcttctgtattatttcaccaactgatgattcataaaatgaaggttgattttgagaaagcagaagaaatttggttttacatcagatggaacaagatgaaatttggcatggtcgagtttgcactaattccaagcctaaactgttggaattattttaccaggatctagatttactaacaagtatgttattaacatcctaaatatgaacttctaaaacgatatgaaataaacacatataaagtattagaaaccttacagtggttgcagcggaatataatgtctccttccactcagatctctaacccttgtatcctttctgtagcagagtatcaccaagatctgagtctgaatctccttctcttgaaactggattcttcacagccttacacactatgattgagtaccacttgatgtgtgtgggcactcactctttca

SEQ ID NO: 232236 - DNA, 1187 bp, Cannabis indica
ttcacggatgaggagagtgtcgatgaaggggatggctgtgaaccagatgctgatctttttcaagcacctttatctccataatcctcacttagctcgatccaaaggcaagaagaaattagatctaacttcgccactttcatggaggcaaatgctcaatgtaacagtaacatctcacaaggtaagacctccattcctccaatactgcgattaatattaaacgatatttggataactcatttaagaatttggagaaggaaaaggtgaagataactgatgaggatatagaagaggaggttaacttctggaactcaacaattgtttgctatgttcttggaactaatcctccccattctgttattgatgaatttgcaagacgcgtatggaaagataggattgacaaggtaggaatgatttcatatggatttttcttgattcaattttacaccatagcacaaagggttaacgtgctaaacggagggcacatcttttttaacaaatgccctgttgtcatgaaaccgtggaatttagatggtaactttaaaaaggagaatctcaatgtgatttcaatttgggttctgttggaaaatctggagttgaagtactggggagagaggtcattattcaaaatcaaagggcaattgggaaagccaataatggtggactgaattaccaaagagagaggtaaattaatgtattcgagaattcttattgaagtctcgatacatcgggatctacctgagcttattgattttggagatgaacatggctacaacacttcggttggagtcaattatgagtggaaactagtgttttgtgagcattgtaaaggaatggggcataaagcgattgaatgtagaaaaaagacaggtggtacacaagaatgggtggtgaagaaaaggcctgaggagccaactgggacagacaagatgcagatgaattcagcagactctgatggcttccagccagttcaaaagggctggaaaccaaaggagactcgacaacctgtgatgactataacaaaaaactcatattagattttagaagaagctggtatggaggccatcaatgagactataaatgagaaggatacgtcgggaaagaagaaaatggttaacctaggaggagggggagatccgcctctatccaatggattgaattttatcgtggaacgtctggggaatcaacaa

SEQ ID NO: 232237 - DNA, 796 bp, Cannabis indica
ccaataacatagcagaccaaagatggctgccagtagttaacctcatctgcaatatcctcaaattcaatcttaattttcttcttcacttctggtttctctgtttccagccctgatttaacaaacgaagtctccagatttctcacaatgctagatctgagaatcgggggagaaaccctcttcccagtgttgacatcctgagaagcacggtttgcaatcgtgagccactccgaaaaatcctgtcgaatctcactttgcctgaaaataatcgcctccgattcctccggtgaaaaaaccttctcaatgtactgttccattggttcttggtactgttctattgattcttcagcatcttcgacttccaattcttgtatccccaaaacagcatccatagatctagtcttaatgactctatcagaggatgagggaccaggtttcttgcccttcgatttgcctttcccggccattttcgctctttttgccatagctccggtgagatcaccagaagagagagaaggagcgggaaaaaaaagatatctctattcttatatactcataattcttttcttcttagctaatgtccacgtatcaattttttctatccttaagaaataagaaataaaaatgagagatacgtattagctttgaagagcagagagaaattgaattttattgattggaaaaatgagattacaatggcaaagtgactgctatatatagcagagtagagtcggtggtgaaataactaaccaacggaatatataacagatattaacaaccataactaacttaactaact

SEQ ID NO: 232238 - DNA, 944 bp, Cannabis indica
ttaaattaaaatttattttttaaaagctaaattaaatattatttaaattaattttaggatcagtcaatataattaattttatttcatagaagcaattaaataaattaaaattatagattacacaaatattataaaattagtccaagtattaataagttaataaatctaattacaagttaacctaaaaaataagctatggaagaaaaattcttaggcctttcagcatcattcgtccaagccttcatgaatcaccgccatcaaccgttttatccactatcgttgtaatggtaataattcaatttttgaattgtatgtctgcttttctccaaattgtaaaaagaagtaaaaatttatattagtttatatgtatattattatttgttaatataataaatactataattaataattaaaacttgcagctttttgatcttgtatataacagttggagtttgcatgtgcgacgatgtccgccatatatgtatttcaaaacataaaaactacattcttagttttttggttgtcttggacaattgctagtgcaattcctggccacgacccaagatacacatttgatcccctataatctgatatgctctgctttaaaaattatattaacatttcaattcattagttaattaaaaaatttgttacaaaaagagtaattaaattattgccttatcaacatttcaataatttattagggaactttgtggccacatatagggtttaaatggataatttccctgacgcaacgatctctagtatccaatgcacactaaaaaattatattgggatatatgtaagataatataaaaataattttaagttataatatagaaaacaattagtactaaaaaaaattaaaataagtgcttacccgactatctaggataaagaatattgtggttagttattcatcgatgataaccaaagggccgaat

SEQ ID NO: 232239 - DNA, 1566 bp, Cannabis indica
aaccatgcaacataaaatgcgatttctaatcttatattaattagtaaatttgattatgttgaaatgggtttatttagggcacaaaacccaacaataaaatcccaacacagttcgtagaggtaacaaccagtaccgtccaaacattccatacatgtcacccaaaggtctttcctttaaaaatcactctcttgaatggttgatgggccataggaaggtacgatggttcgcatgcattgtactatgacctaatgtggggggataaaaactgatgttgtaccaaaaaaagcattgtcgtcacctcagtggtctgacaagtacggaggtggccttccgtgacaccgtatgggagtaaaacttattttgagtctttccgctgcgtacatggacatactggaggagggccttcgcttttgtaagtctcttttgaacccaagagaaacacatttccttctgcacatgggaataagagacagcatgcacgactgatcttccacgtgcccctactttgtaatggatgtccctttcgagggatccctttacaggaactagggctgaagattaattcagcttcttttgttgggtttcgcgtatcacgtttacaaaaatctggacaacaggtataatccttaatctatatataggtataatttaggaaacctaaaaaaggctttaattgtatcattattctctcggaggaacaaaagttcttgctcatatgttgatctaaacacaagaacacaaatatagttatatcctattagtccactctaatccttgtgtgtggtggttgatctggaagatcaaggtctgagtttgacgcaccatctcttggatacaacttataaaaggattcaaggatacctaatttacttcaaaaggtaaatatatcctttcatattttattttaaatttaatatgtgtacatatggagatcttggggtgtggtacaatgataatccaaataaatgcttccaccacatacctaatttagtaccacaaaattaacactctcttacttactttacttaacttttattgtctctcgccaatctagcgagggagtgttggcccattttatgcatcaacagtcacactttgagtatcttgcttcaatttcattagatttttactcaaattatatatatgtggcccgtttctttgatgaaatcagaccttaagatcattccaaagagttgcagcgatttcatcatagagaatactataagaaatttccttagacacaaaatttagaatccaaaaaataactatattattgatctgacctatttattatgaagaatgtaatcagatggaggtggtttaggaataaagccatcaagaaaattgagtatgttcttgatagatatagatatctgcattactctacttcaagaaatgtaattatcttgcccagttaataaaggttgagagactagaacattacctagattatctccatgatggagattgtgacagtcagtagtcccgtgatccgtaaggggaaataccgggtaagctgtgcaatcccacatcgcctggggaatgtcatgtgtgatgattctgaga

SEQ ID NO: 232240 - DNA, 1684 bp, Cannabis indica
gccttgttagcagaacgttttacaaaataaactttaacattattcaaagcagctaagagctgttgacaatcagctactagttgtccaaaagcagaggggagggaagtcgaactgtgtatagcttgaaccgctactaaacagtcggactcaagagaaactttgtgccatcctttacttttgatccaactaagggcctctttgatgccagcaacttcagcaacttcaggagcaactcggccaatctttccaaccgaagctgcctcaagaagagaaccatcgcttcttctagcaatgtaaccaaacccaaaagaatttgtagcttcaaagattgctccgtccacattgaccttaatcgtatcgttcgcaggtgtaatccaatgctcaacctcgacattatgttcattgaacataagcagaggatccattcttctttgatgagcaaaactccattgattaagggtagatcttgcagacaaaacaacgtcagcagctagcatactctttttatcccagaccagtttgtttcttgcgttccagatagcccacgcgatcatcaaaatctccttcaacaagctgccattttttccagcaacttgtgcttcgaaccaggcgctaaaagagacaaacgtatcagtagaaatactgatgcttgatctgatccagcaagaattggcatacggacaatacaccagtacgtgaatgatagtctcagctgcaacattgcagaaggggcaaagattgtcgaccggtacatgcttgatttggagttggacttttgtagggagacaaccagtgatagccttccagccgaagtggagaattttagaagggacttctattttttagaaatctttccaaagagcagagttttgttggccattgttctttgattgttgtaaaactctgtaggcacttttgacagaataaatacctgatttttctagcaaccaactccaacaatcctcacggctagcctgactaagagggatgcccaaaattaaagctttatccctatcatcgaacatatcattaagtatctcagagtcccagctagtttcacctacacacataagactagtcactttttggccaaataaagctgggtgtgcagaggtaaccttcgggttgtttaaatcaggcagccatggatcagaagtgatacttgtgtgcaacccattccctatatgaataatagttccagctttaataagatctttggtttcaaaaagactcttccaaataaagctaggattacatccaagggaggcagagaaaaaagattcttggggatagtatcttgctttataaactcttgaaactatagaaccttcattagaaatcaacctccatgcttgtttaccaagcattgctaagttataaactctctctttaatgtaatgacaaatgtaaaattttaagtgaatatttagttatgatattctaatgttattacaattatatcattctaactaaattattttataataactagttatttattataatttaattatttcattaactttttatttttacttaattacaagcaaaaaaatatatatatttagaagaaaaaataaccacattaaaaaaatttaaataatacaatacatatatttaaattatacatagattaattgcaagttttttttttaaaagtaaaaactataataagtttaatgta

SEQ ID NO: 232241 - DNA, 855 bp, Cannabis indica
aataaaataaaaattaaaaatactaaaatttgttaaaaataaaaattttaactaataagtaaaattaaagtaaacttaaaaaagaaaaaccctaattttaggaaccctaatcccctttcccacttcttcttcctctctcagtcgctcttcatgttcacttttttattgttcccttgttccctctacctttacgcacagtgatgctccaagtttgatcccattattggccgttcccgttaaaagatgatcgaagaaacgagagctccattataatgattgcttaattaattatgagaattagtagataattagagtttaattcagaatttagacttttaattattatttatacaaatgtggagatatatttgaattctaggtatgctaattatgctatatatgttttacgattttttttattttatgtccagtaacaatagaatgcgatgtatgtcctataaagtcactctattttagtttgatattttaggaatagcgtggcgatttagatagacattgaaaatgttgggaatatttagggttataagtttgaccaaaatacccttaggtggcaagattacttcttggtgaagcaaaggataaaatagtaattttaccctagtttgtctttagtgacaaaatgattttttttaattatttactttaattaatgttatgctgaataaggaagtgatttttgagactgaatttagaacaaattagaaacacaaagtctctttttctctctcttgggggtcggtctaacctagaaccataggagcttggattttcttgcatttcctcaacatttgagaaggttttctatgggaaaattcttagggattgaaggcagca

SEQ ID NO: 232242 - DNA, 1559 bp, Cannabis indica
tggtacaataggtgcttaaaatttgcgccatgataaaggtatgatatggttcgatagtggtctgacggtggtacgatatttgataaatgtatgatatgatccgatggtaatataatagatgcttaaaatttatgtcataaattttaagaaacaacttaatccatatcctaccctatcgtatcccattgtactactatcgtaccctatcaaaccttcatccctaacctctagattacaatactattatacccaccgtcattctgctatcgtaccctattgtaccatacacaaaaaaatcatagaaaatacaaattttaccaaaattcaattttttaattaaaaataagaaaaacaacacaaagaaaccacaaatctaaacaacaatagcgaaaaggatctctgtggtttctttgatttatctattttttggttcgtgaatgggaattcgcgattcgcacgggcccaagcttccattcctttttcttctttgattcccactagtcgtgggtttgaacacaatgatgggtttggaagtgagtgcaaatcgggtcttgctttcgtcgagaatgtgagaagacgagagagagggaacgagagaagaaagagagagtgggtaaagcttttgatataagagaggtattttttagagatataaaaaatagacttaaattgtcagcagtgattaagtgtagtgtagattttttttttacctaatataagcatgttttattaaatttgtcatttaaaattagtgtgaaccaattttgaacaaaataaatataataaaatgataaattgcttatttaaaggaaaacttgttatcttatcacaaactacaatcatttttttcctgtataaaacaactctcacaataaatacaaagtactttgtagtacatccacaatttataaaatatacatacaataaggtataaaaaacttgacgaacattttcaaattttgccaattttgatttgaaactttttctttgaggttatttcaaaatttatatactattttgaaaaaaatttagcacatccttatagtacatcctcaataaggttgttctatacactttctgtttgctttgacattcagtaaaattttatagtttacttttttacaattgtgtaaggaatttataatgtaaacttcagcatatggttctttgagtgataaaaaaatgactgaaatgcctacaactattggttctttgagctttgatcccacgagctttgggtctataatttgaaaattgaaaagagtgttagtgtgggtattcatacttcgaagctctctctaactcttttagatagatttatcgtatacacaaactgagtaatgagcttgaagactggtaccttatatttataggtgagacactctatgagcatatgtgctacattaatttttaaaatattttgacaattaattcaagaaattaaatcgattaattataatatttggcaaattaaaatctaactataattagattatttataattaatatcaaataatcaattatagaaaacctttgatcaaataatcaattatataaaa

SEQ ID NO: 232243 - DNA, 945 bp, Cannabis indica
tggatgacgccaattgcaacctacctcaacacttgggaactcctagataatcgaaatgaagctcggaagatgagaaggaaggctgcatggtacatcatagtagagggaattatgtacagatgaggattctccatgccattgcttagatgtgtcacccaagaaaaagctgcacaaattttgtctaaggtacttgatggattttgtggaaaccacgtcgccggggagagtttatctaagaaaattataaggcaaggttatttctggccaacaatgatattagattcaaaggcctacgttaaaaaatgttataaatgccagagattttcaaagatacctcgtgcaccgctaaatgagctaacccaaatgcaaagtccttggcccttcgccaattggggaattgacttgatcggacaattacccaagggcaaaggtagagtgcagtatgcagtggtttcggttgattacttcactaagtggacagaagtcgagccactagcaaccattatgtccaaaaaaattcaaaactttattgtgaagaacataatctatcagttcggattgccgtacaaaatagtctcggacaatggcaaatagtttgacaccagtcctttactgatttctatttgaaccatggtatcatcaaaagtttctgcgcagtggcgcatccccaataaaatggtcaagttgaagcagtcaacaagacatttaaggatacactaaagaaaagacttgaggacgcttaaggaaactggctagaggagcttcctgaagttctatggtcgtaccgaacaaccgagaaaacgacaaccggaaagactccatttgccgtggcatatggatatgaagcaatgttgcccgtagaactcgaaccaccatcccgcagaagattgacgtatagccaagaagccaatcacttacaccttgccgaatcacttgatgaaattg

SEQ ID NO: 232244 - DNA, 1281 bp, Cannabis indica
ctttctttatatagacttcactttgagataggttatatgagattggggttaaattaaagacttgcactgaagtctaactctagggccgaatttcttattgagctttagagtcaaatttatgccactttatttcatttaaattaaacaaagagtcttttcttattttataatttttttcttctatttatttaaataccaattttattttaataattgtaaataattatcaaataaaataaaatttaaatatatttattaattagacccacgtgtactgattaacaaacaaacacttatttctcttttcttctgaaaaaatccaaacttgatgaaaattctcaaataagaggtagtctattttcgcattccaattgacttattaaatcaaatagttgagcctacaagatgatattatctcagacaatgtggggacccatgggtttatgtaaccaagctcctaataagtaatctgaaatttgccaagtacattttctaacttattaattcctcttgactccactataaattcagaatcgtacttctgattacataaaacgctctatatatcaaatatagatacgctataaattattcattgttacaatttaaatagtcaatgattctctacagacggtttacattgagtagggacaaaattttagttttaccctcaatgtattttatccttaaaacacttagctacttgtaaataatattttagtaaactaatataattactgaaaggaacgctagctctatcatttatcgcgttaagctaaggaaactattgtttcacttttaaatgttatagaagatatagattccatatctatgattaacgctcatacacactgttattatcaccatccataccaccacactacctactattattatcaccaccactacaaccaccataccaccaccaccaaaaatcaaagatcttaattttttttaggaaaccaaaaccaaaatagaaaataagagtttcatgaggaatcacaccaagggaaagagaaatggagctcaaaacaagtcctggaacaccatcgacaatggctggccgagagctccaccgagcgctgtcgtgcatggtggttgttcccggtcaatggcgttgtatgagggagagaaccacgagatctgaaatttcttgagaagggaaacacaaaactacaactcacttggctcaaagaggctcaaacttggccagatcgaagtcgagaagcctcggctccgacgagcacctgacatcggtgaaatggtgaagggggaacacgg

SEQ ID NO: 232245 - DNA, 1041 bp, Cannabis indica
ttagcttccctttttataaatgggggtgaaaaaatagcctctaaaggccaacattgtagtagtgagagcccatcgatctagaggtttgtgacaacgagatccaagaacaagttcctcctctagtcgtttctgacaccaatgctcctcttcctgaggcaacccctgctactgcttcttcgagcaaggccattgagatcttgtcggccgcatcaggagaggtcaggtttgaattttcccaagcatatggagttgcctgttggcacaaacttcaagctcttcttcctcccgattgggatttttttcaatcttaggagtccaaaagatatgctttcaaggagcttggactataactttatggtacgctggctttgttattataatcatattattctctttatacctcttttatattcatctctttgcaattctccaagcttctttttcttcttttgcttccaattgattactctctgagtggctcgaatacttggagggctaggtccacaagttattatcccaatgcaaggttgtgagtaagcaccgggacgacgccaagcaggaaagtacctgccttaagcaagaagccgagaaagcgaaggaggaaactgagaaggcaaagaaggaagccaagaagtcaaaagaggaagccgagaaggcaaaagaggaggccgagaagaccgccaaagcccaagccgatgagtttgagaagaagcttgcttaaaaaaagccgagaccgtagaacggtgtgacaaggtcggttttcacactgtctatcgggcctgaatagcaaaccctaatatggaaaccatcttctttgaggagaaagaggaggaaactttagccctttgcgagaagaccaagatggaggaggaagatggcgaggtagaggaagaagaagaagaagatctgtccaagtctcccagcatgtagacttggttctttatttatctcccttttcattttagaaaatggctccctggccgagacaatggtttgcccctagtggcactcttttttttaaagacaattttgcaaggttgg

SEQ ID NO: 232246 - DNA, 546 bp, Cannabis indica
tttccgtttttttttttttgttttttttttttttttttaattaagccatgtatttaagaagttttctatagaattgatgaaaaaaaatttcttaatcactgtacacgttgactaaattaaataaaaaaaaataatatattttggatgataaaaaacgaaaaagtaggtttatgataatataatatagtataattttatttgtttatttatttatttattttaaaagaatatttatttattgcaggttgttagtttgttttctctctacgttctttttctttgccttttcttggtagaaatttttatctgattcatacaattttttcttttgtcagctaaacatggacagtgagaaataaattaatgaatgaaaaaaataaataaataaaacagctaccacaaaaattgtctgaaaaaatgaaataagaatataatacaataatgacaacgacaaaaaaaaagttcttttttgagaaaaataataatattgttttgacatacaagaaagctaattgagaaaagagaatgattaaatatgtcatacat

SEQ ID NO: 232247 - DNA, 2034 bp, Cannabis indica
gtctttgaagggtacagtatcaagctcaccgatactttgatatcgatggtattcttaatccaaggggcctcaatatcccatatctaaggtgtgtatcggatcctaaagctagacagattatacaagggttccattaaggatttttgcgaagatcacacggaggcccaaatctctccaagaaaatcctaaggcaaggatacttttggcctagtatgaagaaagattgtgtagactacgtccttaagtgcgatccatgctaaagatttccaaacatcccaagagcctcgccaaatgaaatcaccttaatattaagcccgtggccctttgcggtatggggaatagaccttatagggtctctacccaaaggaaagggttgggataaaatatgcaatagtagatgtggattacttcacgaaatgaatagaggcagaacctatgaagtctataacagctaagaaatctttggactttgtcgtcaaaaacattgtttgtcgatatggtttgctgcataaaatagtcttagacaatggtaagcaattcgattgtgatgagttcatggatttctgcaacaaacatagagtcatcaagagtttctccattgtggctcgaccacaagcaaatggagaggcagaagccgtcaacaagatactaaaggttacccttaagaaaaaactctggcatgcaaaaacaattggcctaaagagttgccaagcgtattatgggcatacaggaccactaaaagaactaccactggacattccccattctcaatggtgtatgggtgtgaggccatggtcccagtagaagctgtcatcccctaccatagaagaactacttatgatccaacaacaaatcaagccttgttacaagaagcacttgatttagtagatgaactcatggaagaattacaaatacgcatggcagcataccaaaagaaattggcaaagtattttaactccaaagtcaagaaggaaatttgccattggttatctgaacctaagaagggtcttcctagcttcccaagaatcaggagtggaggtactccgaccaaattaggaaggctcgtaaaaagttgaagatgaaataggctctaggacttataaattgaagcgaatggagtgatccataatacccagagcttggaatgctgatcatctccgaaaatactatcagtagttaagaattcagtacttaatttcatctttgcactttgtaagttagcatgtagcgaacaaagatatatgcattatcccaggtaaatctaagctaagtgacccgaaaattcctttttaagtcacttaggagggtactaaggcataactatatgcagagacaggcaaaaaattaaaaacaaaaagaggcgacaaatagataaataaaagaactttcttaaaatataagtagtccaaaaaagataggcctggggaaaggctataaaaatgtctcccctaataaaaagtaaagatagtataaactaaaaattaaaagtattgtcttaagggggagagtagtaaaaggaagtaagagagaggggtttaattaatcagctattggaggaagtcgagggcccatccgcttagccaaggcctcctccagcttcttgttctttcccagaagcgaaccactgtatcctcaggatcaggcatgaagtggaggcgaggttcaaatttgttcaatttccaacacataaaaactccatcctcgaagtgcatcacacaatgcttatatgtcaccggagttaataaagcttcccctgcaccttttgcagcctccctctgggtttgttcccagaactcgcgcaactctttaagctcagccgacatcttacggcagtctccaagtcagtcttatgtagctcatcaagagtcttgagtttcaccgtgagtccctgaatctcctcttgagcatttagaaggtccttctagtttgaggcaatagtgtcatctttggccttcaaagcctcctagtctcgctccccgagtgccttctccaccagacgtgtcattgtgaagagtctccatctggctctcagct

SEQ ID NO: 232248 - DNA, 1287 bp, Cannabis indica
catcctcaatcaacagaatgatgactttgagccatgaaagcccctacctgtttatcctcatcagaactttttcatgcaacataatctttttcttcgccactattgctctaggtggcaacaatggcttttttctttttgagagtgttggcacactcagcctgaatgtgtccgaacccatcacattctctacactgaatgcccatgctcttactttcactcggttgttgaccatgcctgaagttcccaagaggatttctttcagggacattttccctacccttgaaaaaaaaattcttgtacttctttttcaagaatttttcatagttcctggtcaacagatctacagcttcatctgagaaaccagcagacacatctctgatagacttcttttcttctttttgaataaacgcaatactgttgtccctttttttcttgttcacatccttcttctttttttctttcttccaccttgttaaggaaatttcataattctgtaaggatccaatcagttcatcaagatccagttcctccacatttctcatttcttcaatggaggttactttagacataaatctcgtatgtagaactccatgaactttgcgaaccagctttgaatttgaataagtctttcccaaagcataagactcatttgatatgtcacacaatttagcatggaactcaaccaccgtttcttcttcctccattgaaaaatcttcaaatgcttttgccaaagcacaaagatgagatttctttactgcctacgttccttcatttttaattcgtagtatttcccaagcctctttggccatctcatagttcgcaatgaccttcaattgatttgtggacacatcattgaacaaagcatgcatggccttcgaattaaaattggcccactccatctcatctagagtccacaaactcataggttttggtttggtgacaccattatccatctccattgggcatgtccaatagtcttctatggtcatccaaactctttcattcaccgccattaagaatgctcgaatttgggttttccagtatgggtaattgtcaccttccagcattgggggtcgtgatgtggaccctccttctctgaacatctccattcctgtacgaagaaggaaaaacaaaataaagatagagagcagtatactcctggagtcgtgtctggatagcgggttagttccaactgggtgttgtagacagacaaaaaatgcagaaaaaacaagaattgcagcaacaatgaatttcagtacaacatatcttgcaagaaccctaaggatc

SEQ ID NO: 232249 - DNA, 1322 bp, Cannabis indica
actttctttttatagaaaaggaaagtttagctctagttttctcctcaagataaatctcatctaacaagatggaaaactcacacaagatcagaatataacagctggttaagtaagaaagaaatgagtaaccaaacttaccatttttactttattttccataaatagtaaagctagacaactttccttctaaaattaaattaattaatataaaagttaaataaacaaaatattaaaaccaatttaaatactgcagctgaatttaataataaataataaaatatttttgtcaattaaataagtcaaaaatagaattaacaacaacaattatagaacaaaacttcctttttagcatagtgtcgtccttaatcatcgttcctgttaagattgtaaaagtcagttaggtttagttaggcaatgggttatgattttggtatctgttttttgttagttgtctaactgattagtacagttgtggtcaactccatccagctaatgattgtgggatttaataataaatgagcgacatataatactcaacattcgactcaataattcctcatccagaaacactgtttgatgttattcagagacttgttgtgctagatgtttatctcccttggacgagtcatctgcccgtcatctggatggcttgacttcgctaatgtatccagtctattatcttgattgggcatatgtttgggcctataataattgaattaagcaatcttggaattacatatgtcctccttctgggaacacggataacatttaccctcaaactttcgaaactctcaggttttagaggcttgcattcttcctaccatatggcattaggataggcagatgctaaaaaggtgaaaaacctttttgaattccaaatcgataatttctgattgacagcctctcatttttttaaatgaagctacatgtggaattattttttttgcttgtgaatattacacttattgaaaaggtccatgtagcgtggatttgcaaaacaacgattgatcatgtcaatgagtgtcccaaggagaatatcaacatttaaatatcttcattccaagcaatgtataaaatgcaaatctgacaactttttcggaccgtcagatgtattttgtgttttcttagatgcaatctgagccattaatgtagggggacgcggattacaattttgttctacaaatactgtgaaatttgtctatttaccacttttgcctatttttcattctgtttgaatattttgagagatagagagcaaaaatttctttggtgaatgaaccattacttgacgagtgtcttcatctctttttcaaatttgtgca

SEQ ID NO: 232250 - DNA, 1778 bp, Cannabis indica
tttaattataaggataaattcgttatgaggagaaaaaaaaataacagaaaaagaagatataattgtaatttaactaggagaaatgtcttttaacaccaataatctgtgacgtggctgtgaaactggacaaaacgacgattatagaattatgggagggaaaattaacgaacgctggatgagaaagagaggtaaagagaaatgtacgtcaatggcggacagacactacgatcttctattctattcaattccttttctgttgcgaacgaccattgttccgccctaatctgatgaagacgaagctcattgatcgcatcgttatcatcatcttgcagagtttggatcacaactcaggttaacatttcttctatataagtttctgtttttgagatattcagaaaaaagaaaatgcagaccaaaataagaatggaaaggttttgcaagtctgaataaatttcatacttacaattttcgcaaaattttaatcactttggctgaaaagattgagctacattgcatttgcatatagcttgattatatacgtaaaacattcttcctcttagttttataatgtttgtttatcattataattttaatttgcatacagattgggctttataatgtttatcaagttatatcttgtcagctctttgaagattagtctattcatttgaggtctctattctgaaatagaacaaattcatgtcatcattttcaaatgagcgaaacatatggcttgctgctttgatttccattttactgtaatttacatgttctactagtttgatgtggtctgagggggtttcgtttacaacggctggacttttctgcaacttgaatggctgatttgcagaggaatcaatatatttttgataaggatacctcacaggtaccttggcattttaaatctttcacttgttattacgagaatcttgaactttgtatggaacctgctcttgtatccatatttaaaactctgaaagagtcattcaatgtccttacgtataggccattatagccctgaagaaaggggcacatttgctgaagtttgggcgtaggggaagtccaaaattttgccccttccggctttctaatgtaagttcatcaattttaatgttggtgttttttttaacacatttggatttggcttttgttgaggagacaaaaccattctaatgaagttcctttgaaaacacaaatattagatgttgggaaaacttgtgataatttatggctgtaatgaaaacatacttttgttaagattggaattgaaaattccttagtaattttctcaatgtgatagaaaaaaaaggtttaaaacgcagaaaatggtcgacaagacttggcacaagcttgcattggtttaattctgctaagctttacagttatgacaggattcggctgacattttggaagctaaaacatttcttgagttttgcaaactttgactctactctttcttttattcctcaaaagctttgtatatcctcttatccgtatacatataaacatctgtatgatcatatagtgcatgtactatagctcaagttcttatattatacctacaggatgagaaattgttgatatggtaccgcgggaaacatgagaaacatcttaagctaagtcaagtctcaaaaataatacccggacagcgtactgtaagtttgtcccgcatttttttgaaaacgtttgtcccacatatttatacacatactgacacacacacatacacgtgtatatttgttcaaagttttccaagaaaaatctggtagttcatgttg

SEQ ID NO: 232251 - DNA, 1652 bp, Cannabis indica
agtaacaagaattaaaaagggaggttttgatgatgagattaaaataacaaaaataataatgaattagatgtgatattacgatatgagataaatagtaaaggttattctctaccctcaacaatgattctgaactcctattaatgaaagtaatttcaattatccaatcaaactattaatctcacagataaagctgaagtagtcaaattatcccaatctccctattacatgtaatcaaggcaaagcgctcaataattaactcttttacctaagcagtaaatccacaaagcatgtaatttttttaacttagataaggctttaagatttatggagatagactaatccaggcagtaaattaatgaagcatataattcatttaacctatgttctgttctttatcatgattaaaatacatttgacaatattagaaattgtaatttatcacaaacacttagaatcctagactattaggtgaatagtaatcctaagctgacaatagattaaagtaaaatctaatttagcgatcgtctaaacaagattaaaataataatcatgacattgaatataaaagaattgaaactgttatcctattttttgtaccgtgacgtggcaataggaatgaatgacacatgttctatattttcgatacctaggcggaggaaaatatctgtagcagcccataaatgactacttagcatttgcaacattcagatattcgagcaggatgattgaagagatgcccagccaagatgcagatgtgtttatgtcgagcaaagcatgaaagatgaaaattccagagatcgattttgttgtgtccagactcgaagacaatcgctgtaattgagtcagagaataacgacaacacattctagtttcctatttcttgcattgtaatgatggaattaatatagtttcctattttactcattataagcaaaagggaaacaatctctcatgtattaagtccctataaatagcgacctaacctcactacgaaggggatcgagaatgttgcttcagaaatacattcaagaaagaaaagagtgatctaagagagaaagtgactcagagatcaattgtaagaactttcgagtggaagaacactttgttccttctctcaagtcaatacaaatacaaggggagtaggctattaccatacttacgaggttgaacctctttagaatctagtgttcaattcattttactatttttgctttcctttacttatcttatttaattactttatttttgactcactgtcgttggctaaaagcgaggtcaatattttggtttgagagtaaaaacacaagcctttgtcttaagttttgacaggtaaataggatgattgtccaaactcgaaggggaggccttgctgatcaggatgatctaatggtgataggtcccaacatgcaaactcctgtaaacacaagaggaccaccaaggacaaaccccgagcaggttaatacacaacctcctactacaggccaagaagtgacttcccttctggctgcgatcacaccaggcatataggagactggaaataccaatttggaagccgatcaatccactcccagcactggggtctcgtccactactaatactcaaaggtcggctaaaggcaacactgaactccagaatctgtgagaagcacttgg

SEQ ID NO: 232252 - DNA, 644 bp, Cannabis indica
ttcggaggcctcgggatcaaagagaaaaggcgattccaaaaggctacccaaggataagaagcccaacaagtatatccctctttatgctgaatatactgagcttaataaaactcggaaaaaaatctacctcgcacatgtataggaagccgtttttggcaagccaagacctatgaaacatgcgaggcgcaagagggatccaaataagcggtgtgagtatcttgatgatattggttataccacggaagagtgtcatccattgaaagatgagatagaaggtctcatattgcaaggacaccttcaacgatatataaaggggcaggaggatgcctatgatcagttcgatctgcccaataactcgagtgactgaagattataaccctcctccgtaagaagaagggacgctttggttatctcgagagggagcgggtaaaagaatacaaggggtggttactctggtaaagtaattgtgtaaaagaattgtgacgcgagtagatatcagcccactgtggttgccatatcaagctgccacgtggaaagctggatgtcaaccagtaacagtcaaagatgttagggattgtccctagatattgaaacaattgtgggagtatgttggggattgaccctggacatcaaaacccgtttta

SEQ ID NO: 232253 - DNA, 1393 bp, Cannabis indica
aaaaaaagtcgttattaatttttttttttaaaaaaaaactgaatagctttcccaacgacattcaaatgtcgttattgataccttcatttttaatgaggacttttaggcgttggtaatagtggtattgaccataattcttgtagtgtgaatctgaagtggaagaaggaatcgagctcttagctcatctccagattgcggggtcacgaaggcactctggtgaggcatctagaatgaagtctagattttctcaagacgacccactataggagtgttctttcaaagcatggtagtgattacttccctcaaagtagtcttaagctagatcataagtgtgaagagaattgaattagttgctcaggttcaatttctctccatgtacttgagggaagtattcatactattggccattggagccacgggcaaagtaacagaaaaactcacccctttcatctcagaagtacttccgagcatgaagcggctcattggaccttacctaccagatatcgtccccttcaattcaaagtagcatctcctactactttcttcagtttgagtagtagatccctttctccttgtagggtctcaaggcctggtttcatgagaatgttgagaaagacttggtggaggagtcatgttggttctctcattgttgcgaggtcgttcaatattaggtggagggcccattggttggcatccttaagccgagtcttttgggctcttgctcaaaggcaccttccctccacgagctctccttgcctggtgttttctttgttcttgcttagttactagtgttaggggtggtgttccaagcgttaagggtttttcttgagcactatgtgaccagtttgtcaacggggagtctctcaccaacttagaaatacatctacaggaagtagttccacgattagagcgataagtttctctaattcgttgagacaggttagctctccgttgttcatgcttaatgcgttggctttcgatgttcctccaattttccatgaaccagtattgaaactgttcatgttgcttatcaatagagtctcgcatttgttgttgtaattgagttgagtgacttgaggattggcctacccaggctcctctttaaacatacccacgagtatgtgggtcaatgagttgcaagctctaaaaaactcgttatcttccctttctacttaactcattctttcctgctattcacttgccccgtttatctcagtctagttaggaggatttaacttgtaatcctggcatccttctaaatcattatgctgatagtacctcgtcatgtcatcacatcttttaaactgtagcttattgctacgatgggacattcattcctagcattcattcattcttcgcatttattatttccttcattctattagacttatat

SEQ ID NO: 232254 - DNA, 915 bp, Cannabis indica
aaacaaacttgcagttctttcaagtcaattgttaagggcatagaaatcttagcgaagcactcaacaaatcttctataataccctgctaatcccagaaaactcctaacctcaattcgagacttaggtcaaggccactctcgtaccacttcaattttcaccagatccaccaaaatgccatctttattcaccacatgccccaagaaactcacttgaggcaactagaattcacatttcttaaacttagcatacaacttatgctccttgaggtgttgcaacaccatccaaatatgtctttcatgtgtctcttcggtatctaaataaattaaaatatcatcaatagagaagataacaaaatcatccaaaaagtctttgaacaatcagttcatcaaatccatgaatgccgtcggggcgtttgctattccgaaggacattactagaaattcatagtgtccatactgggttcaaaaagctatcttggggatatcctcttcccaaatcctcaattggtgataaccaaatcaaagattgatcttggagaagacggtcttcccttgtaactactcaaataagtcgtctatccttggcacaggatatttatttttcattgtgaatttttttaactccttgtaatcaatacacaatcgtaaagttccgtccttcttcttcacaaacaaaactggtgcaccccaaggagaagtacttggtttagtaaattttagatcctacatcccctgtaagtaaacttttagctcttttaaaacaataaaataaacacatataaagtttaggaaatcttacattgggtgcagcggaatataatgtctccttccgctcagatctctaacccttgtctgtcgcagagtatcaccaagatctgagcccgaatgtccttctcttgattctggattcttcaca

SEQ ID NO: 232255 - DNA, 1164 bp, Cannabis indica
agggtagcaaactgatgagtcgatggactcaataagatatgcataacatatataagcaatgctatcccagctttatgctttaagcgtcctaagcccaacaactgatcttagcaaatggttaagaacgttcttaatggaattacgaccgctataccatatacactagagcaacgactgtgtactcgtgttcgtagggtcgaccattgtaccatttgcactagagtacctacttcgtactcgtgttggtagggccaatttgtactctctggagttaccgagtgttgtaccacatacactagagttccaattctatacttgtgttggtaacacataaactactctaaaactctacactgtaccaacacccttaaaactatatattcatttgtgttagtagtgtaatcaattaataacaagcatacattcacatgtatatactttatgctatcttacctcatttccatgctcaggtgtgccgatcagtttgagtggaattgcaactcgacgtttcacaggatcctaaatcacatcatttgtaattttggtgagagacacgctaaaacacttttcggggactttaaaatcaaactaggaataaccctatcgatgaaagacatggccataccctaaatatcaacaatttgggtaaaactagggttcttggaaaaaccccaactgaattactagtttcccaaccggttaactggttcactggggtttcctgagggagaaactggtttaccggtttttcaggttccactaaaactggttaaccggtttagtgcagggaaacccaaaaatcaattccctaatcacaaatcaaccccaaactctccaatcatctccagaagacatgtatacactatagtgaaccagattcaagcattaaaacacagtaaacaaaccagaaaataaaaataccattagagctcaaagcttgagctctcaaactccaacctcacccaaacctcacaactaccaaccaaatcagctataacccacctaaataatctcaacctaatctcaaattcaatctcaaaccatcccaatacatatagcaacttagaatcatacttcaacactaaaacctaactttcatgcaagaaacacaaagagggggagactagggaaaattaccttgagccaaagcactcaattacaact

SEQ ID NO: 232256 - DNA, 1650 bp, Cannabis indica
atctagcaaagttacaatcaattaacacatgggcaatggtctccctctccgagttgcagaatttacacaaaaggggcacattaacatgtttagtctgcaactgagttgtagttggaaggcagccagaaatggctctccaaccaaaatgaaggaccttgggaggtacttttatttgccaaaagcttttccaaaaattgtcactggtttgagcaccactttcctcatcttgaagaagtctgtaagaacttttaacagagtaaaacccagcagcttctctgttccaaaaccagcaatcgggtacatcatgttgagaaagaggtatgcctaaaatcagagctttatctctctcattaaacaaatcggatagcacgtccacatcccaacttctatggttaatctgcatcagacttgccacggctttcccttccagacctggatgaaaagaagtgacatatggctgctgtgaatcaggtaaccaagggtctgtcaagatattagtatttgaaccagtgccaattcgtatcatagcacctgccttgatgatgtccttagtttcaacaatgctcttccagataaaacttgggttgttcccaacatttgcattgagaaaattatcgttggggaaataacgagccttgtagatctttgtaaccaacgaggattgagctgttaaaagcctccaagcttgtttccctagcaaagcaaagttgtaatttttgaagtctctgaatcctagtcctccaagactcttatgtttacacattttcttccaactaacccagctcactccttgtttatccttagacgattgccaccaaaacttactcataagactttcaaggccgtgacaagtttctaaaggcaagagaaagacggacatagcatagctaggaaaggcttgtgctactgtctttaatagaatctcttttccagcttttgaaagaaaacgactctcccactggtttattctcttctgcactttattttttaggaaacccaagattgcatttttgttcctaccaactaggcaaggtagaccaagataagaactagactcattagcttcctttatccccataacattgcatatcaagcttctaacagtaggtaaagtgtaactgctgaaaaataatgaggatttgtcaaaattgacagtttgtccagaggcattctcgaaaattctcagcagttggatgacattggaggcttcattctcattagctctacaatagacgtaactgtcatcagcaaacagcatgtgtgagataaccggagctctatttgccactttacaacctctaattcttctactaagctcgaaatgcttaattaacgaggagaaaccttcagcacagatcaagaacaaatatgatgataaggggtcgccttgacgaatgcctctctttggaataataggacccatctctctaccactgttaagaatggtataacgaactgaactcacacatttcagaatcaaatgaacccaatgagcatcaaaacccattttaagcatcatgtcttgaagaaaactccactcaaccctatcatatgctttactgaaatccaaactaacagccatgtaaccttctttaccacgtctcttccgctttaaatagtgcattatttcataagaaatcatgatgttat

SEQ ID NO: 232257 - DNA, 1454 bp, Cannabis indica
ctctgataccaagttgtaacaccctaattcctagggaaaccacgtgtgttgtttttgaaacatagtttgtaatagtagattagtgatataataaaatctgtgatattaataaaaacttcccaagaataataacatagcaatgaacaggttggcattgctaaaaatttgtttcgggaatcccctgttacaaaagttttacaaaaagggttgtatacacaaatatgtcaaaatactcattaggtacagctcaaaacaactcctgacaactcggccatacaagatggataagtcgatatgtacattttctggagaagactgtcacctcatggttgccttagtttgcatttgccctaacttgcaccacaaagcacccgtgagtcgcgagactcaacaagaaaagtaactaacaacataaatcaaatagatagtcaatctaatttaaagctcgaatgaatctcatactaattatcacaaacataacaacaatccataatgaacaagtaattgcctcattaggcaagccataaacactaccatatagaataaaaattctacatgaaatctagtaacacatccctgagacctaaaccggtgctccaacattattgtcgttgtctagccaatatccctgatatatcattgtcgttatctaatgagataatcggtaagtaggaaacctaacaataatttcagtttagagtcaagactcttcttttatagcggtcatgaccgctttctcaccttcataatagtaataaccaacttgttagtttcataatggaaatgactatctcgttgctttcataacagtaatgaccgtcttgttggtttcataatggtaatgattgtcaccttgctctcataatagtaatgaccatctcgttgagctcataaccaactaattcacaaacgatcatgatcgtatcttaacatgctatgttgtacagatgtactttcttacctcaagttttaatttaagtgtgttggctgacctgaatgaataaaaataacaatcacatgccctatgtcacaacaacaaaaaagaataattaaacacttgacctaactcgttttaggtcattaattcatcaccacaagtccccttatcaatcactagggtacccataccctaaacatcaagaaaacatgaaaaacaagggttccaaccatcaacaaaaacagtaagctgttttgaaaaacagcaagccattttttggggtttcctagcaggaaaacggttaactgtttttactgaaacgatggaccatttttctacaggaaacgagaaccctaagttttacacatctcaaaaccccaccaaaacctaaccaaataattccaaacttcacagaataatcatacaatatccatacaccaatttctacgtgacagaaatcaaaagcatggccacattcaaaagttgtcatgagcgctcaagctttgagcttaaaaac

SEQ ID NO: 232258 - DNA, 887 bp, Cannabis indica
acacataaacataacaggtaaagaagaacaaaagccatgcccatgtcctactttttgtggtgagagggagccatcatccatggtagacgacaatgactagagcctcttcctttcttgaagaatcagaagaagaagctcctcctgctcctaagtcatgtataactgtgttattgtaattttctcttaatatttagtgaaagacaatcaatttgatctcaaactttacaaatcaatcaacagaaaaggaccaaaccacaagtgataattgtcaaaattaataaagatttgtaataatggtaattctgttgtatgtatttattgatagatgaattaataaagattatatatacaggaaaagaaaggataattcattgattctctctgtttgaattttttacttattttatttttgtgaagaattctatttaatttttttttgttcagattatgccaattacaactgttggaccaattagattatgtcaattgttatcttctttatacttgtgtatcaagttctttatacttgtgtatcaagttgttgtagttatgtaataatgtgttatactcatcacacaataataattaacaaaaaatgaaaatcttagtatatttacaaagcttactacttcgtggggtttgaagtcatgagaaactccactgggatttcccttactcaagctaagtatgcagctgatattttatctaaaaccaacatgttaggaccaaactctcagctgccatgggaaccccttcggccaatcttaccctaacttcaaaccagttgagtccttacaccatatagcaaatacagatgctgattggacgagttcaatcaatgatagacgctctacctcaggttacagcgtctacttaggagggagtct

SEQ ID NO: 232259 - DNA, 583 bp, Cannabis indica
aaaaatttgtacttaaaacttttttaagtatgactcaaaaaatcactatacaagactagaaaatataaataaaccttcatggagtcttgttttaagttccttgaatcttggaatccacttcgagttactttcaagaattttggtaaaattactattttgcccttatagttaatttcgccttagaataattttattttacctttaattatgatacaaatcaacaaatcattagtaaaaaataataatcaaatatttatcaatcatcaaaagaagaagacctaaaagtttgagttaacatcctatgggtcacttgagataactcgagcctacccaccattagaagattgcaccagggaagcatcccataactttatgatgagacttgacccaaatggtctcgtgctaggggccaccttgcctatgaccccctcgcaagagaaaaacaaactaaagtcttatccttcggccttggtgggaagtcacatgctgatgagacaaatggagtactaggggtgttcgcggtgcgggtggtgcggtttttgactatttttcaaatcaacccgcacatgcaccgcgaaactaa

SEQ ID NO: 232260 - DNA, 1055 bp, Cannabis indica
ttaaatctaaaaattaaaaatattttcaacataaaaaatatatctcattaatttcatgaaatattaatttatattaaactttaaccttattaaatgtatatttttcactattaatcatcaggccttgcaggtctgttatcgttgttacttgtatctccttgctctcagtctttagaaagcgtggttgtacgctattcccttacacgccttgtcctttaattcctttcccaatatcattcttgttgtcttgcattcacccttcccgttatcctcacactccaccccaaaacacattcacaccatgcacaccatggctcgcatgcgagccccctatcccctcgcacaatgccaagccctcatctcctcgcaccatgccaactctcatctccatccctcacggctcacgtgcaagccctcatcctctcctaccatgccaaactcacactcacggctcaccctaagactcacgacccctcttcccccatatccatgggtcacacaccctgctaccccctatgactcgcatgtgagccccccatgggcttgcacgcgcgcgagctttcgcaccacgctccaacattcccccgcacacccatggacatgacgcctatccacgcatgcacaacctctccttttgtccacgctctcaccattgaatcactcagggatttaacactaaatggcacgggtgtaccctgagaatcgcaagaatcgatagtggcactgcgaattatatatcgagtgggtaaacttatcggacgcacttgcattaattgcttcgagactagttttggaaattagcaccgctaatttttggggttaacacatattatatcaattgttttggattttagtttttctttttatatgaggatatatatatatatatataaatatgaatattatatgtttaaaataaataaaacatattattatttaaaaaaagtgaaattttagagatgcattttaaagaaggtgtaatgtaaaaacttgagttagtagggaagcacacgggacggagaatcggcggagaatgctcccccgtcccacttctg

SEQ ID NO: 232261 - DNA, 718 bp, Cannabis indica
gtattatagtttatattatcaagaatttagattgtattagggtcactactacaagaaatgtcacttttacaagcacagttcgctactgtgttggtaaaaaaaactgcactgccgaaaaggttaaagttttatcaccgcacatttgcagtggctaaaatctagcgtttactatcacatttacacgctgggaaaagttatttttgccagcgctttttattttgtgctggcaaaagttctaataccaatgttgatttgccaacacatcagaaataaattttattttaccagcgcaatatcaaacttctgccagtacaaaaatgtactggtaaaagtgacatttcttatagtggggtaaagtctgggcaaaagtaaaagtcgaccttcgagttaagattgagattggtcgtccaagttgttgtggtaattttgcacacgcaaatgtacgtatcgtaataagtaatagactcaccagaagtgaggtcgatcccacaagaattgtagttaagtacttcaaaattaaacatttacttctatttggtgaattcaattaagagaaaattaaatttaagaacactaaagaaatagtgaaattaaaaagtaagtaattcaaaagagaaattaacaatgattaaagttagtgcttcggtttcaattgtatctaacaattgtggcctaatattatatttttcggttaccaatttctatgcaatagcaggtt

SEQ ID NO: 232262 - DNA, 954 bp, Cannabis indica
tttacaaagaaacatttgatggaatttgttagactatttttagtctaactttcaggtcaatttcagagtgctttctttgttaatgttatcttttggaatggttttacgcttgatttctcttgtttcatgttaccgaggtattagagttcaaattctaccaattggtgaaaagatggggcaaattggagaaaaatctgctgaagctggcaatttgctatagtagtcgcgaccaccacaatccatagttgcgacaaattatgtggtcgcgactataaggctaggcagaaagcctattttttgaggtttgcctatggtcgtgactaaactttaggaagtcacgactatgggctaaatacaggatttttgggcagttttagaatttcgccattcgaagatatcaacattaattactatataagggtatcgtattttagaaggaagatacttaataattgaaccctaaaactaaataaggcagcaaaggaagcaattgtggcgacccggagcgagatcaccaactagttcttccttttcccttttttatttctttatgttaatttttgtttcaagaattattaaggatgtgaacatgagttttatgaactaaattcccgatttagggatattttgaatgttagatgatgtttcttcaatttagttaatgtgattattagtttttcttccctatattgtgtgatttgttcttatttgttttaattacatattttagactggccattttaaaagtgatttatgatcctaatatgaaaaatgagaagtgaatattaggaatgctttaataggacaaacataagttttaatgtaaaacgagagtatttgttggggattaatttaccaagatctagatttaaatatgaatcttctaaaacaatgaatttaaacatatataaagttaagaatttgattacaacaaaataatatgtctccttccac

SEQ ID NO: 232263 - DNA, 1013 bp, Cannabis indica
actagaaacaaagagtaaaaactacctgaaaatacgacccgaaacttagactaaaattagcctaacaaccacgaccacgaaaccactgcgtgaacgtctcatagaaagcacaaaggctcccttcataccccaaatgattgaggaaaaagaatttacttttagtaggtaggaaattagccccgactcaccacaagaaaacctaaagtctatgaggtaacttgctcaacaactttcttgtgtttgttatccatggtgtaggcataaccaacacaagcctgaagacaagaaaatagtgtcagttgatgattaaactaaagaaagttaagccaaaaggagacaagataaacagttaccctaaaaatgtttgtgaagcatctttgagaaatgacgtgtagaggcttgatgctaactaactgatgcaacatgatgttctcagccttagcaccaattaaggtatcactatgagcaagaagccaggagccttgctcacgcaatttcttcaccagatcatgagcttgagctcagaatattatgcttagtttcatccggagagagattaatcaaagatctcttattagcaccagcaatgttagacctctccctaccagagtcttgagcaggaaaagcagaatcagcagttctaccccttttcctgacctttttcttcaaaaaagtagaagtagaagggatgccatgaaccacttcccttatcagaggctcaattttcttcagcaccaaaatctttctctttaagttcgaacaagatgtcatagcagccaagaagctcatattgtctacaaataaaaaatactagaggttaggacaacaaaaaagacataaaataaaaaagttagctgtatagcatggagcatcagccacctactgattccccatccttctccagagcagtttgagtgagggtaacttctccatcatccttgtaacgtcctgcttcaagcctctattaggcccttatacccacagaatgatggctcttatacacgagtacgtca

SEQ ID NO: 232264 - DNA, 2075 bp, Cannabis indica
gtaaggagataatgggcaaccctgttgaaggcctcatgttggagttagcgaacccgtgacttccccattcaagagaaaatagaaactatttgtagtcaagcagcccataataagagatatctacctatcttcgaaccccatttttgcatgactttttcaatgaaatgccattcgacacgatcaaatactttgctcatatccaacttcaaggaagtaatgctgtttccacccgttattttgtttttgatagcactgatcagttcaaaggctacaagaacattgtctgtgatcaaacaattcagcaagaaagcactttgcgtgtcggagataaccattgggagaacttctttgaatcagttgacaagtaccttagtgattagcttagaaataacattgcataggctgattggatgatagtcttggagtcgctaaggctttttgatcttaggtatgagagtgataagtgtcttattcaaaatagttggatcagcttcatcattcaaaatatttaaaacagccttagtgaccaaatctcccacaatacgctaattttgttggtaaacatcaaagacattccatcaatacctaggcttttgtctggagccatagaatgcaaagcctgctctatttcaacaacaagaaaaggttgagtaagattgtaattctttgccggtgtaaccttggagggaattgcatttaaagtagtagagagagcatcttcatcaattgctgaggctataaaaatggtagaaaaatagtcttgtatagtagctgccatgtatgcttttggagcgaccggaacccctacagcactatgaagaaatttaactatgttattagatttccttgctgaagctttagaatgaaaaaatttagtgttttgatctcctgaattcagccagtcaatacatgatcgctgctactaatagacttttttcttgttccaatagatcatcaagtattgcttcagattgcttcaaagtattcattggctcatcagttcgagaagggaggttattcaaagctgccactattgattgagtttctgcaattttcttattcaagtctgtaatgcaggacgtgtggttagagattggttactgtcatgggatatggttgaattctagtgtggggttgtattgcagtaactagtgaaagagttacgcattgaggagggtctgttttatgagtttatttggtttgtattggtgtgtaaacttggttatgcatgccgtggagaagcaatctgaggaggggcgacaaggatcgaagaagattctccccaaaccaggattcgtggttgtgattgggcaacgttgtgtaaacgaggtatagttgaatgaagagtgttttgagcaagacgtgtcaaaagagtccaagcatttccttagtaatcagttctatatttgtcataacccgtagtaggaagtttggctcctttcatccaaggtccataaagaaagttgtcatcattacccatatccatacgctccatgaatataatacatttttcaaaagggtgaccaagtaaaccagattcaaagtaaaattctggaagacgctcataacaacattctatccaaaattcatctcttatccttgggagacttatccaaaattcatctcttatcattcaacatcgaggaagtggcttaataacaaaaagtttaactctaacacgaaggaaaggatcgtatcattcatcaagcgaatcttcatgtacccctatatattcaccaataagatcacccaatgcttttgccagagttttggatttacatagaaaaggaaagcgataaatctgaacccaaaaaagagtagagattaaatttttaattgagacattctgcaaaacatctggggcgtgcattacaataaggtaattttgaaagtgtcaaggttccttattcatctctcggaggttgtcccctgcacaactgaaagagactttgaacaaatcatcaccatagtcagagattacaacagtgtaacgacctctttaatattcactcatctgatctataaatgttagcttgtggacatagttgtccataagtactctggccaaaaaaaca

SEQ ID NO: 232265 - DNA, 1280 bp, Cannabis indica
aaactttataaactttatataaagatttacaaagccagggattccattgtcaaactttttacaaaatattccaaaatacaatagtctggttgcacaacgactataaaatgtaaaccccagatatcccgagattgaacactccaggtcgccccgccatgacatgtacgacatcaccctagctcgaagctcactcctgttgagccttcgccatttctttacctactcatgaaagtagagttgtgagtcgacagacttagtaagaaaaacatataacaaatcatataatattgacttctatctaggcgctcatacacctatttacaagacttaacaaatgagtaagaaccttctatactatgatacgaccatgtacaactgtaccacatgcacttagtaccaccatcgtactagtgtaggtagggtatgaaccgtaccttgagtattgttaagtgttgtactacatacaccatgtacctactcatactagtgttggtaacaccgtaatgtactcttcagacatcgtaccctttaccaatgcactctgtactgctattgtacaagtgttggtatgaatcacaacaagcatgcatatatatatttcacacatacatacattcgcatatatatcaatatgttgtatgctattcttaccccgtttttaaattcaagtgagttggcagacctgaacggaaagtctcgtgctggatggatgccctaatcacccaacatagcccggcaaataactcgccaaaaccctaatctgggaaacccgaacctccaacttaaggttctgttattactaactgaaactataataccctaagaaatagggaatcacccaacaaggcattgaaatggacacaaatcgaggaaatgaattgttcagggaatctgccaaaatcggttaactgattttagaggtccttgcaaaccgattaatcggtttgcaccgggtttccccaaacaattctaaacctgctcaaaacatgtccaaatcccaaaaaactctccagaacacctataatgctcttccacaatatattgcagtcaacagaatccagaaaattgtagaaaattaaaacatgctattgatgacccaagtttgagtaactcaaacttggtcatccaccacaataaacctcaaatacagctgcaagaacctatttccaaattaaattaaacataaaaacaaaactacacatcactcaaaccctaatagtccctaaatcatcaatttgcatattcaaccaaaaaaacaaagcttcaacaaaacaagatta

SEQ ID NO: 232266 - DNA, 1037 bp, Cannabis indica
aatgaacctaaaccctaccatatatgtataataaaattaccacttgatccatttctattatataaatcatagaagttgactgtcttgtttgataaaaatcttccaaaaacaaccttagaaaaaactaagctttcttgattgacattaacaacaggaaaaacagtattatttgactctatagtaaaatcataactgcgtataatttattaactttaaaattttattatatttttgaagttcatgaaatcgtgatattttaaactaaattaccctaaataattaggggccaaccatattataggtgcaaaagccttcaaaggtaccaaaaaccattagaagtgacatgactcattttaaaacattatatctttttatatatgtgtttaatattttattatatttgatttttctacttttctttctataaattgattttttttagttatttaaaattgttatatattatttgtatatcctattaaagttactttctaaattttattgtattaattttataaagtagatatttttgctactattaaaatttattagttatttattatttaagtgtattagttattggttattagagttgtaaaattattaaatgatttaagttattaattgtttgaagtagcatgcgttcaagatccatcaattatttttgacaagataagtattttaattttctactcaaaaatgacttttgtaactatttatcaatactgtttatttgtagtaaaaatttattataaactttgtaataatatttatttatttattatgatgtttatttatttatttttttttgactaattaatgtaattttattttttttgcagttaaactttttctcacttcaaggaagtaaatcctcacaagattctcacatttatgctgctaagatttctttcctgctgagagttgttcattactgtttggttcatctggaagaagtagaacaagcggttgttaacttaggagtaaaagatggagattatcagtaattcgagcatattgtttgatatattagtgac

SEQ ID NO: 232267 - DNA, 1219 bp, Cannabis indica
gatccgacgaatgaatggatctttttgccatgcctagtcgaattacaacattattatcagttaccatagtacctaacactcatcacggcatgacgttctataaatattagtgcttctttataattcttatttaagtaaaataattgagacacaatattaaattttaccaataacgatataatatttcataaaggtgttaaacaccttgggtgtcctttagcatttttcttctaattataatattttgttgaaactttttaaaataatggaggagtgtcttagtgtgtgatttgacaagagtttcacatgggataaaaatccttatctacaatgacatataaagagcaatcttgacacttaggttggtgccccaaggagtacctaagagttgtcacacacacgcgcgctgccattatcgttcatccgaccaagttgaacaaagctaactaggttgtgtagtgtgcaccttttaaatgaaaattcatttaataatacaattattttttaatgttacactattattttcatgtaagttaaaggtgttactttcttcccgttgttattattcagtcgtgtttactcagaaatttggactacacttctaagttactctcgctagctaggttggcgagaatgaaaaagtagttatgttattataatagagacacaacatatttatagtagttcacttgctatatcgcgacagtaatggacctatatttacttcgactttttatttctcacaacatggtaattacagaaacagactaagtggcagaaacttcaatttctaaagagagaaactagagagagaagctctgaccttgtgggtagttttctaaaagtgaaaaatgagcttatggagctctccttttataggtgtgttgacctcaaaaagtaatcaaccgacagaggggccgtgcagacttgatgcttgccacgtgtgtgcacaaataagaataaaaagcaatagacacaaggatttgttaaagaggttcggcacctttgtgatagtgagtaatgacctactccccttttagctgtattacaccaagaaaattactatacaggtcactataggtggaatctactgtagtatccttaggattacaatgtttgaatcaatgctcggcaaaactcaagtcttggacggtctatggtaggcgtgtatgttaggctttatgccctaaataaaactctatttcaatgtaatctccat

SEQ ID NO: 232268 - DNA, 1413 bp, Cannabis indica
acactctgcccatcaagctatcctcaaccgtcaaaagtcgccacccttgcttagccagaaaagctaaattgaagtctctcaaatcacgaaaccccattcccacatggttcttgtgatttgtgagttttctccaacttaaccaatgaattcctttatctttagccgatctcgaccaaaatttgctaatggctccctcaatgtcttgacaaattccaatcgggataaggaacacattcattgtgtaagctgggagagcttgcataacatatttaataagaatctccttttcggcacgagatagaaattcattgtcccaagactgaattcgtttctgcaccttgtctttcaaatagccaaagatcacatttttatttcttcccatagtactcggtagccccaagtacttgctgtgctcagatgcttcagtgatacacaatctattacatatagacagtcgcctggtggatgaagtattagtactaaagaagacagatcacttaccaaaattcacatgttgcccagtagcgaatgtatctagcaattgctgaacccgattaacctcctcatgtgtcgccttacaatacaggaagctatcgtccgcaaagagcatatgagaaatgctaggtgccccattagccactttacacccatgaagccattttctttcctcatacttccgaataagcacagaggaagcttcagctcacacaagaaaaagatatggtgagatagggtcaccccaacgaagccctctacttggcacaatagggcccatggttcgtccactgctaacaatctgatacttcactgaagccaagcaaccaaaaataagacgtacccatttgtcagcaaagcccattcgagtaagcatggcacacaagaaatgccaatccactctatcatacgctttacttaaatccaatttcaacgccataaacccatccttacctacttgcttcctcttaagataatgcaaaatttaaaaagagaccataatgttatccgtgattaacctctctagaatgaaagcactttgatgtttggagataatatcagataacagtcccttcattctgttagcaagcactttagtaatgactttagcaatgacattgcaaagagaaatagtacgcaactcactcatttgatcaggcttcttcttctttggaattaacacaatatttgtgttattcattcccacgggcatttgctcagatccaaaaaattgcttaatcgtattgatcacatcattgccaacaatagaccaatacttttggtaaaatttcgaattcatcccgtcaggtcccgacgatttatccggatgcatttgaaacacaacctccttgacttcttgatctagaatagggcaaagcaactcctctttatgctcatttcggacagtaggaacaacac

SEQ ID NO: 232269 - DNA, 845 bp, Cannabis indica
gtgtcgccttacaatacaggagctatcgtccgcaaagagcatatgagaaatgctaggtgccccattagccactttacacccatgaagccattttctttcctcatacttccgaataagcacagagaaagcttcagtgcacacaagaaaaagatatggtgagatagggtcaccctcacgaagccctctacttggcacaatagggcccatggttcggccactgctaacaatctgatacttcactgaagccaagcaaccaaaaataagacgtacccatttgtcagcaaagcccattcgagtaagcctggcacacaagaaatgccaatccactctatcatacgctttacttaaatcgaatttcaacgccataaacccatccttatccacttgcttcctcttaagataatgctaaatttaaaaagagaccataatgttatccatgattaacctctctggaatgaaagcactttgatgtttggagataatatcagataacagtcccttcattctgttagcaagcactttagtaatgactttagcaatgacattgcaaagagaaatagtacgcaactcactcatttaatcaggtttcttcttctttggaattaacacaatatttgtgttattcattcccacgggcatttgctcaaaagcgaaaaattgcttaaccgtattgatcacatcattgccaacaatggaccaatacttttggtaaaattttggattcatcctgtcaggtcccgacgatttatccggatgcatttgaaacacagcctccttgacttcttgatccagaatagggcgaagcaactcctcattatgcttatttcggacagtaggaacaacac

SEQ ID NO: 232270 - DNA, 3158 bp, Cannabis indica
ttattaccaacatcaacatttgagaaggcgacatataagatcgaaattcattgattagaagatcttcacgaatgcctaaattaagagaaattaattcacacgacactctttttcacttattcgaatttttgtcccactagatttttcggtaaaatttttaaggagagagttattatggacatctaagggcgaatgttataaaatattattaatggatgtctaaattaccaaattaattatcatcataaatacttgattgtatatctttttattttattgatttaattttataattattttagtcatattttgtataaatagaggttcacctcattgaaataaactatcgagaaaaatctcattcactctcatcctgttcttatttttattttctctcttctcttatttctttttttattctattatttttataatatatctttaatttatattagtttttaattttttttttcttcttgtattcttaaaaaatatatgtataaaataaaaataaaaataaattattttttaaatattaaaacaaaaattaaaataaagtattatgtgaaagtttattagaaaaatataaaaataaaattaaaataactattaatattaaagaaaataatttgaaaaagaaatttttaaaaatattaaaagtaatttttaaaaattaattaaaatatttggatgtacgtgtaaaaatagggaaataataacgttcaaaattaattgttgggagtaaaagcagaaaagaaattcaaacaagagtcacaccaaattactccttccttcactcccactcatcttcttcttcctcagtcctcccttttataatttatgcaaaaaaaaccgaaaatttgaagaagaagaagatgtatgaggcacaacaacatttcgtagaactacaagacaatgcaagtggttttgggaatggagaccctaatttatggctttcaggggatcacgccttatctcctactcaccgtcggaatcacccctcttccgtcgccggctccaatgtcgatcgcgaccttttcaaggacctcgttgagatcgtccctcttgttcagtctctcattgtaagctctttctttctttttccttgggttttgaattttcttggggattcttgttagtgtttggtttccgcataattcggggaaaaattacttcaatttttacatgggtgagtggtgacaccagttgacttgggttgggtttatcatttccataacagttatgggaaagttatctttctcttaggaaacttaaggaagtgtttgactttcttagaaaattgacaaggaaagaaaaatgtggtgatttttctcacaatttcttagcaatttttttaggatcgtaaagggagtagttcatttactcgtcgtgggtcaatgatctacaccaagacgccttctagggaatcactatccaaaaaggtatgtttttacaagtgtgtatgttgagatatctacatatgtatatagttatattgtgttgccttggcttacgataggaacattttgtgaaagtttttaagcgttacttgttggatatttcatagaaatgatggagttgtttgatttgatttgattgctaagtaatgagttcttcaaattagataattaaatgctattaacttctttctgttattttgttagtgtggagcaatcaagcggcaatgatgagtaaaacttataaccatgacctgtttggaatttaatgataaatgttctattaagaggcgtttcatatttcttattataataaatgttatggtcaaaagtctcatcgtaatgcataggcagtatggcctgcttaaatggcaatgctcttgccatggccatggaatcactgatggaatgcatttgttacagtgcatgatctgttctatctatgataacgcgcagttgaaaatgaactgtgttttccttactgtattatcttttgactgatttgataatgttatatatgcaatttaacaaagagctagcttgagctagtgaacaagtttgctgctttagtgtcttctaacgctttttcatcctaagcataatttttcatttatcaataatacaatacaatcttgcttagggaatttttcgttgttttaatttttcactgtgttaatgtttaatgtctctgttaacccttatgcttctagcatatacaattttaggaagtttccaggattgacaggtctccttaaccattgtttcagttgtgatcatttaatagatttatattcactcaagatattatttcattgtctctctttattatataacatatatatataaaaacattactatatattgtattttcagtttgaatttgttgtctaaatgtgcgcttatttctttgtgatatgatttacagtaagaccattttctcttcaagaataatttgattgattgctgactacagatatttcttatcacctctttcttttctttttttttttcttaaaaaaaaggtgtctgaaccaaaagggaggaatgcagctcaatctattccaagaagaaagaaaagggagcatgtagacaagaatggtactaataatacagatgctgaggcattttcgattttttcgtcaaaggggttgaccgcagatgacagagaagagttggatctactgaagggacaggtggaggatttgcaaaggaaattgttggaaaaagatgaatctttgaaatcagcagacgatttgaagaaccaaatgagtgctattcatgcagaacttgataatctaaaacttcaaatttcagagaaggactctttcatcaagtctacacaacgacagctctctgatgcaaaggtgctaactgctattttacattgttcattcatgactatgttatggtgaactgtttccctccctgttaatactagcttttggttgctagatcctgcaaattattatgtcaactgtgtgtttagcttgctgcagatttattgcatgaaatatatatatttatatatataaatatatatatatatatatatagatatagtatattatagtaactaggctctccgcatagtcaatttgctatagtacggtacctagggagaaccgtcgtaacgttcgagaccgtggtgagagcagtaatgctagttggtaccttacaagttacaacagtcatcatacctaa

SEQ ID NO: 232271 - DNA, 2037 bp, Cannabis indica
tgtgatcaacccttccaacttaataatattagggtggtcaagccgtcttagaagaaggatttccctcgccatgaacttgacactctcaatatcaagattatcaaaccgtacttttttcaaagcaacaaacttattgttaatgacatcacgagccttgaaaacactactataagttccttgaccaatctgacaaaaaataatgtcatcaaaatacaaaaacaacaaaccagagcaatcaattccctagtaatacttcagtatttacttaaatttgcatactatcaaaatacttgcagtgaattgctttacacttttctaaatggtcataaaaaaatctaaaagtacaaagatagaaggattacatggagcaaaatttcaacacacaaaatttagtgagtaatctaaatcgttcttttcaaatagcattagtcaacactataataaaaaggctaatggaaaatctaaattaaagaacaaacgtactttattcaacttctcaaaagtatcagcacggcgtggtaaccatccactgatagcttcaggtgcagccatagaaagccaggtcggccaacctgcagcaacctgctctccctgtgtagcctttggaacttttccaaacccgggatgattgaagacagcaacttcagtcttctctgtcttcttcatctcaacctgatcctcataaattctcacagagccactgattttcttatcaattaacataactttgacatcaccaccatccagtctctcttttgtccaaaccccttcttctctttttgaagaattgtgtcttgagaccttcagttccgagtactggttgtttgaagatgacaatatctttctcgggctttccctgctgtctttgacagcagatgtctttgaacaaatacaacccattttctcaaaaccaaatagaagatactccccaacaaaaccccactccacaagcgaaatcagaacccaaaaccaatcccaaacttcccaaaaacttgttctttcttcaactccataaaaaaggaatatcacccaatgatcaactaccaataaccactcaaggaattcatatttgaaattcttgaaaaactatctttacttcttatatccaagtaaaaactttccaacgtcaaacttcacgactatttagaattcagatgatggtcctaacgaaagaccccaagacgaacccaattataagaaaaatgcctaaaagtttgacgaattcaaacaaacccagtaaaaaaagtctctgaattcagtcaccctcgtactccgccatgtggattgaataaaacccaaaaacaacgatggatgatcgatcaatacgctaaaagggtctgaaggaaacgaaatttcgttgaatacccaacaaaaaagaaagtgaatatgatgaattgaaatgggaagaggcttagttaccaagaaagaggagaaagcttgttgagtggcttggtttgatcgttcaacgcgcattcaaaagataatcgattcatattattaatatatttgtatgatatgaaataaaaaataatgatttttaactaaagaagacggctttgccggctattttgctgagtcaataatattaatttaattaatttttaactttctcagaactaataaaaagtaattcccctttttttctctctctctcttccccatttctcttattaagcagttggagttggtttttgtgttcaaagaaagttgtttggtatttcaatgcagcaataacgcgtttttatgaaataacaatatcccctaacttatatagcttttttaatttcatttatttttttttgtaaaatttaattaatatgcttttctcataataataataagaaatttttacactaaaaatctaaaatgataaatttattacattaatatctatacacggctaaaccaacttttttacacatcttttatattttattacttattttaacctacactgcacacacaacttaaacctttttttagtaccacgttgattgtattgtatttgatgcattacatcaatcactctatacatca

SEQ ID NO: 232272 - DNA, 1633 bp, Cannabis indica
gttgtcctggtaggcgagagtcaaggttattcttattttatgagcttccagcattgtttcatactatgtaaatttatctctaagtagtcactgaaggggagagtctaatagagacaaaaacttataaaatacttatcttttgagatctttacgctattaaatgcttcaatgaataactatccataagggagatgaaatctagcgtctcgaggttatattgcaacaattaaccatgtaagaccaacaatgaagatcgaatatccttataactaaagctcattattttaaagagttgtattttcatttgatacttattttaatctatttattttaacatatatatttatttaattcaaattactaatttatataactctaaatataaattttaatttaatattaataaaattataccctaggaagatctaaaaaatagaaatttattttccacctttagtataaattttctaacaaatattatgaaaattacttaatttaagttggtctaaaattaataaataattaactttcaactcaaactaaattttctataaatatatgtatgatagcatttgaaatctaatctatttaaataatacattttcgaaatcttattaaaataaaaaaaaatgaaaaaattattctaatttatgttggtctaaaattaactaataaattaattttcaacataaatattattttcctatttaattaaatctctaagaaaaatatcaaatatttaagtggcttgaacaaaatcaaattaaaaattaattttctatttaattaaatatatcttgaaaaataccaaaagtctacctaaaaaagatctatatagatatttcataaactaaatacttatttttttaagtaaaatataatatattttagtctatatattttattaaatcattaataaaaactacttgatttaagtttatctaaaattaattaacaaattaattttctactttaaacaaatgtcaaaattgaaaaatttcaaaatacctacatttaaaaataaatgtatttcaaaatgtatgtgggaaataattattaaaatataatatattctgaaaattattctaatttaagttgatctgaaattgaaaaattctaaacttaaatataattttctatttaattaaaacatttaaaataaaaaaaaataattaagtatcttcaataaaattaacttaactattaattcttatttaaaatctaagaaaatattataatttaattttgtctaaaattactagaaaaattaatttttaacttaaatatattttctaattaattaaatttcttaaaatagaaataattcagtatcttgattaaaatcaattaattattaatttaatttaaattctaagaaaaatatcctaatttaaatttgtctaaaattaattaataaattaattttcatcttaaatatttttttttacttaattaaatattcgaaaacataaattagttactagaaatccttatctagatctttttctttaaactaagtgtgtttttctaaattagtttttaaataatctaataaaaaattaatgtcatttatttcaaaattaattatgttgttaattcaattttaattagcctaatacaattatttaaataa

SEQ ID NO: 232273 - DNA, 1196 bp, Cannabis indica
cgaacctctataaaaaatctgcgtgtttactactttcttgttctgtttgtgtaacacatggcaagcatcagatccatacgaccctgctgtcggttgatcactttttgagatcaacagttactacaaaatttaactataaatattaattttaaaaagatgaatctttgagattttgatccaatgaaaattaatagaaaataaatttaagtttttatgcttaatttaactatttaattaaaaaaatatcaaaaatatctctttttacaatatatcaaaaatatatttatataaaaatatataaatgaaacttaactttttttatcttattttttttgttgaataactattttttaaaatgtttttgtcaataaaacaacctcaaaccatattgttatcttgaattttatccacctgacgtggtaggtccacgtaagccaaagacagagtacatgtggagtacatccctaccagtagtagaacatggtctccatgcaataaatgccaaaattttcaagcaacaattgaaaggagtaaagcgagccatcaatgggctattctaacattcctaattagccaagaggagtctataggccggctagggtgagcatataggccggccaggatctggggaaaagctagcggacccaaaaagtgactttcagaccaagggagttcgaccaagggaacctgtcctcgacaaagaaacagtgtactaagctgtcctctactttcaaaaggctggcctccacatctaaaggctggccttctcttggtaaagtcataatacctgtaggatcctcgtaggcacatgaccactcaggtcctagcaggaccatggtcggccaggattgatagcatggctggccagacctcccttgtaggtctatgagcggtcgagatttacctggtaagactctatgtatagcccaaaacgtggacaacacgctacctgcaaattaggccatttaacagcccaacaactgatggaaactatctattttagagggcgagtttagtcttttgtatttaatcaatttaatatgtaaatatctaagggattcattgtaaattagggttttaggcttcctctaaaaaggccttaactctaacctagaaaacctaagtcactaagcctcccaatcactctaagttagaaaccattgtctctcctttctctctctgttacactcccaata

SEQ ID NO: 232274 - DNA, 636 bp, Cannabis indica
atcgaataaaaaattagggctctataaaattgaaaaaaaaataaaattaattaaatatttttattacttatttgtttttaactaattgaaatttgctaaggattgacctcatgtcatctaactagaattaggagaatttaccaaaattgctacaataatcaaatgaaaaatggaggctctataaaattgaacaaaacataaaattaattaaatatttttattacttatttatttttaactaattaaaaattttaattaaattatttttttacttcaaatttacataataaatttttaattaattttatcaaaaggttccaaataatttagaaatcgttatcggtcgaacacatacatcattacaagaaacaagacttttgccagcacatttttgtgcaaaagttaggtattatgctggtaaaacataatttacttttgctagcatatttttgcgctagcagaaggaattggcaaatccaggttggtattggaacttttactggtacaaaatgaaaaacactgacaaaaatgacttttctcagcgcataaatgtgctggtaaaaaatttaacttttgccaacacaaatttgtactggaaaaagtcttttaccagcgcaaatgtgctctaagaaaaat

SEQ ID NO: 232275 - DNA, 550 bp, Cannabis indica
gcaagagaatcagcaattacttggatcttgtcaacataatccgagatcgagtttcctcccttgcgaattgtagagaactggttctttaattgaagcagtcttgctttagattggctagagaacttctgttcgagggcacgccaaacagcatgggaggatgagaaattggctacagatgccagtaccccttccgtcatcgacgatcgcagccatgacaggaggagctggtccttgcgtttccattgatgatactcgggatttggttctccggtgacaagatgttgcaaaagaggagttccagtaagcaagatctcatccaattcatggccaataaccgtggggatcacctgagatttccaagacaaaaaattagtgcgatcgagtttagtagttaaaacagaggtgagagagtgagaaaatgggttccagttggagtgcaactggttctgcgctactggaggtctggtgaccggagcaggatcggaggaagttctggtgaccggagcaggatcggaggaagtagactccattgatgacgtttgtcgaaggc

SEQ ID NO: 232276 - DNA, 777 bp, Cannabis indica
cctgattaaataaaataaaaaaaaaaatgaaaataaactttacagaacacacttttgttttctgtttttaaaattgtaaaataaaagtagttacaggacgcatttttatttttcgaaaacaaaattttactttcattttgtgattgaaaaattaaaaaacaaaagtgttaccaaacgacaccttactttattaaaattaaaaaaatgaaaacttgattaaataagggataaaaaaaaggaaatacttaccctactattatttaaaggaatgtcattatgcttattaataagtaataagaatcattgataacgtaattattcttttacatttgtttacttactttattataattaagaaagtgagaacttgcttaaataaaggataaaagaaagggaatacttctcctttaattttttaaagaatgacattaaggataaaagtttttatttatttttattttatttttaataattaattaaatatatataataataattttattctttaaaatatgcctctatacacttcctaggggttgatattatatatggacactgtgggtgcctttcctcgccttaagtgcttggccacatcaatctcataatattgtagtacaactactattgttaattagatataggtatatatattatatccatatattgggctcataattataattatatatacataccgttcattattaaaaacaaaatacatatacatatatgcacactgtaactaaggatcgaaatacctctagtcattgaatcttt

SEQ ID NO: 232277 - DNA, 1748 bp, Cannabis indica
aatacccctagagtttaataaaatctctgaaattgagaaattataactctaatactcatttctaatagtggggtccacaaataattaaattcttaaataattatgaaaataacagaaaataatgctaatttcctttactaatccaaattactaaagtggtcattacaccttgagtcataacaaacacttttgagcaggacccgtacacttttctcctttgacgtcagtctttcttaactacgggtaggttctttttagatgacccactaccccacaataaaacaagatctggatctacattggttcaaattgtacctttttgcatcttgaacactcaggataaggtcaccatttcttattctcaccttgaccgctatcctgaccaccctagaacctttttgtcatgtcccataattggttgttcatttagttttggcttcctgatctactagtaagttggcttcataaattccaccacatctagtggtacaataggaagtgtcggtagtacaagaacagacacaagatgagcctattgttctttcagatctcaaatttattttccctttttgtttaatcatatcctacatagcagaatttacatattcccaacattatggcaataaagaattctcttccttaccattttccccgagcccagataactcgctaatcaaactatttgattgcccttattgcataacgtatcacacatttagtccacatcttctaaccatttagaattcagacgggtatcaatatcaaaatgcaaataccatacacatattcttatcacaatcatcactatcctacttttcccaacatactttataatagcctagggaggtaatctaatagcaaataatataaatgcttactataccatgagtcgacatgtcctcccagcaaatgtacataatcgaccagtcttcaggacttttaaaaccatggctgctttgataccaagttgtaacgctctaatctatagggacaccacgtgtatgattttataaactagtttaatactaatagattaattaattataaaaaaatgtgataatatataaaaacttgaataaaataaaacacaaaaaatggacattataacgacataaatgcgtgtttcgggaatccctgttataaaaagttttacaaaaaaactatatacgacgatgcctcaaaaataataaactaaaatacacaataaatacagcccaaaacaactcttggcaacccagcacacaggccagcgaggtcaatatgtacattgttggagaagactatcacctcgtggttgatctagcttttctttgtctttacttgcaccacatagcacacgtgagtcacaaggattcagcaagaaatgtaataatattaatcatatagtttattatttgaatattgtcatttatacacaatcagaatcaaaccaccacgaattgttcataagataaaatctaaatcactactaacatctgccacgaataaacatcagtatacaaatatttgataatacaaaactattataccaataatagaattcatattcatttaatcatataaattatatatatgtgttacctcataaagtaaccatcttcattacatcacgtcgcgtaatcaagcaagtcgatactttaatcagataatcaagtattgcattgcctaatcaggcaaagcttgtgccatagcgtggcaccatatatggcataattgtatcacctaatcaggtgagctcatgccaaaaa

SEQ ID NO: 232278 - DNA, 1361 bp, Cannabis indica
taaatttaacaatttcaatagcttgtatttttaacgaccttaaaaatttagaggcatgattttgtacatgtaaaagttggcaaaaaaatcttaattaccctatattttaagtgcatatattaatactcttatccaatacattgttgtgtaggcacctagaccaatgaggtgattcaattgtgcaacatgattaacagtgaaaaggtccggttatgccaacttgttactaatgttaatttgttcaattccgattaataaccagttactaatgctatatagcctgataatttcaaaacacgattaggcttaaaaaaatgaaagaaagaagtctgtagtagtaactagttgtcataactttcagttttcttttgggaagtagtaaccgattaatgatatgtcaaaatctgaagaaaaaaaaaagtaaaattttaggttcccttcttattttgtccaaaagtgcccaaattaattatatcttataactctaataatgttacaaataaaaggattgattatacaaagctattattataaatgatcatagcattgaaacacctttactagttcttttttatactatccatgtcaaaaatatttggcgttagtttccattattttaagatcgttttgttgtgattcactctgagtttgactaacattatgataacatcatattggcccaaaattaatttcgattcaataatattattatataaatcaattaaaatatatttaaaaattttaataatttgaaaaccgttacaattttaaagtccaaacatgtacaacatgtgttatcctgctaagtgccacaatggggataacaaatattaacaagctcgaagcccataatatctttggtcagcccattggatttaggcccaataggcccattattctccttgaataaggtgtatgcacccttgttataagatgaaggggataagtgtgtagctaagtgtgaagagagtggtagagtaatacccaaccctagctcactttattatcttctctatgtgtgtaggtggaagagcatgaaacgtccatgaaatgaagaatggttcaaggctctttaagataatactaaacactgaatgaggtatattgcatattaaattcatgatcagcattattataatttataagatattaattatattttatgattctataatgctcaaattgtatattaaaattaacatatattctctacatgcatatattagagcatttgtacgatattacaacaatgtccattgcattgcagaacagattatcgtcataaataaatgaatcatgacattccttctctctaaaaaaaaaactatcttaattgggaatatgagttataattattatct

SEQ ID NO: 232279 - DNA, 1355 bp, Cannabis indica
tctaattccaaaattctattttgaaactttagttttgcttttcctcttgctctaaccgatactatttcgccattaccaaccttaagtttcaactctccatatttcaaataattccaattttcaagcaattgcaatgaacaactaacatggttgtagatccagaatcaagaatccagatggagcaaaagaaggtaatttccttattcgaccgagtggtcgaatctctgttttcttattgaagcgagctttagaattgattggtgtcaagttttctattcttactcatttaatagaggaagagcggactctagtagactagtacactaagaggatgtctttcataatgccatcatcttctgatattttggcaagagccaagaaggccacggctcaaaaaactagttccaaagggcaatcatcaattacggggcctttaggcacttttgcgtctctgaagggtgttgtcactttgaaagccaatatgagggaagatccaaataagagatgtagagtcgacttggggagtaacaacgaagagggcactattattccaagaaatgtttatgtgcactcgaatctgtctatgattgcaggacatgttgaggctctcttgagtcctctggaggagaggcatttgcatgagcttggacacactgcatcttctgatgacttggtctcttcaatatatcgagtaagtatctttttaaagtttctttcttcttgaggtttttatttgttctaatgtttgtttgctcctgataggctcttttcgatgtgatttttattcgtcgagatcgcaaacagcttgacaagtagaacaccgcccttaagaagtttaacaaagtgcttcaggaggaaaacaagtgggtcgttgaaaagcttaacactttacaaaagaagattgaagagattgataaagagcttgtaaatgaaaaggagaaatcagttggtttgtatgctcagctagatgacattgcatttaaagctatgtgtacagctcgcctagagtcattcacagactttaagaaaggtaagtctgatatgtggatggtagatgaggagttagaagtttatagaaaaatgtttatggatgaggttgcctctggtgatgaggaatctacggtccccgagtttggcactagtgttcccaaggttgaagaggatgggaatcaggttgccgagtttgacaaaggtaccactgaagttccaattgattctgaggtggctcattagtatgttatttctacttgttaaatgtttaaattattcgagtaatgtcttgtcttatttatgatgggaatcttgttgttttttggattttcattttatgcataatgctctatgttgagctcttt

SEQ ID NO: 232280 - DNA, 932 bp, Cannabis indica
ctatctgcatggcattttgcatggcgatcagcacctcttgcatctttttgttttgctctttctgggcagtgatctcagcttcatcataagctgccttttgtcttaagagtagtagttatctgtaacagcgttcgtcgtaggtgtcgtactcatcaaagttttcctcgtattcgtcatcgttggcctcctctcgctcctcagaatccacgttgactcttgatcccacttcctcatcttgagggttttgagcgtcttgaggaggatagagctgacttgtgttgcgagtttccaccatttatgtttggcttacaaggttgttgtctagttgcagacgcttccttcaactctcaatgaaagcaccaaaatgttgatcgaggttttcgacaaccaaattaataatatatgtaaaaaagctgtaggaagttaatgcatgagatttttacgtggttggggcattaatgagccttagtccacaagtcttttttatttatgagagtatttattacagagaatgttcttggtagatattcctcttagttgctctctttaattcttatgaacccagaattctcaacccccatctcagtgcgtttggggggtatttatagtgtttttctggggtgatccctagaactgaatcacttgtctttctgtgcaggtttgataggggcacatattcctagtcgatgcaaaataggaaatacatggcctatactgtaggtatcttaggggttaggtggatataatcctttatcccttcttgattgatgtgatccctcataaagtagccgtcactagccttattaatcataccgtcagacatattgcttatggaaattccaatacgttttctcccatgcggcattaaatgagaggtgactgttcaaatagggtccagtacctcccggagatgccttagcgttcccctcggt

SEQ ID NO: 232281 - DNA, 550 bp, Cannabis indica
acttggacttcattttgtagtcgcttgtgacatgtctataaaagttattttgaatgtaaagttaaaaattggatcctggttttgtgtataaatatatgtatatgtttataaaagtttaaagttaaatcaaaattttaatttatcacgatttttgagaaaaccctttgattagcaaaggtgtgcactgtaattagaaagtcactgtagcatgcctatgcattagagcgttacaattgtggtcccaagggacaaggtgacatccaagagctgcaggttgcaggtggtggcctcacgccttgtacctttgtctggtgttaggtgatcccaagttgcaggggcaatggttgttgtgcactcttggtcgggatgtcagcacttgcaggtgtggtgcctccactacttgtacatccttggcatcaaaacttgcaggaggcgtggttgtactccctttgcatgcacgtctggtcctttgtatgcattcctcgtcctcgtgatcgtgcttccactacattcgtcttcaacacttcggaaaacttcactaagaatttct

SEQ ID NO: 232282 - DNA, 1191 bp, Cannabis indica
ttacaataccctaaaattatttcgctaaatgaatagttattaaaattggtcatatatgaccacattgttaatttgccaaaaatacctctcacatttgaaatctctaaactcaagcctctcttcctctctctaaacccacactctcggtcagcctcctcaacccaccaaaaacccgaacctgttgttcacgatgacggcgcacggcgcaggcgactttgacccagccattaaaaaaaaaagggggcatcgggtccgatgggtccgattagtccgattggtactcatcggacccacatgaaaatcggaccccaaaagaaactaaacaccatcggaccccatagcatcggaccatcggattagacccatcgggaccatcagaccgaacccatcgagaccatcggatcgaccccatcggactgtcttcttccccaaaaaaatttcggttcggttcggcgtggatctacctttgacatggtttcgattcagcgtggatctctggtggtgttcggccgattttcgtggttcaccgtgcgtggtggatcggcgtgcgtggtgatcggcgtgggtggtgaacgccgtacgtgggtggttcgaggaggaagagagggataggcgttgataacggtgggtgtggggttttgggttgggtcggaggggttggggtcggactggggttgcttcgatggggtttcgggtggtggtgggatgtgggtgtggcgcttttgtggtcggcagagagagagagagtttgagtttgagagggaaggagagagaaatggttagaaattatgaggagggtattttaggggtttttgtaaaagtgacatgtttttaaaattacccttattattagttttcctccccaatttctctttataaaatgcataaaatttcaaattttcctttgtacacttttacattacacaatatatcaacttttttaaaatacatcattaaaaccttagttttttgtaattttattatattttattcatttcaaaaatataatattaatatatacatatatctctatacaaaaataattattaaaactcaaaacaattaataaaatatattaaaagtaataaattatattgtataaatgtaaaacatgattaataaatttaaaaaaaaaatgaagtatgagtttagagcatctattatatcatatttttagtacgattctttaaa

SEQ ID NO: 232283 - DNA, 913 bp, Cannabis indica
agacgcatcggttccccccaaaagcaaatattggtaataaaatataatcaagtgtaaccgtcaaacgtggtacgagaaagctgggttttgaggcattaattgagtcagagcattaattagacgaaaactgaagggacgcctggttagcctcacatcgaatcgcgagcaaacgcacctaacatgtgtcacccattcaaacacaaggacaactcggatgaagtctacacgaaactttgaaagtcctgtgcagacttggggggcaaatgttatctcaatttttgcactctgacgtggcatcacataatggtgacacgaggaatcaactttatctacctgctcgcaagagatatgccaaacaaagcaccacatatattcgcttggacgaagcccttttaaccgggcagtgagcaatccgcatagcacgccaacacttcgcaatttcagctttcgcatcgtgagtcaccgaagaaatccctataattttgggatcagatcacaaagatatggcaaggtgtccgaatcccttcattagtgtattatgtatttaatatgcaatctttcaaattacatcaattgtaatcagaagggaaattcttccctcccaagcttatatccctataaatattgatttatactcacttggcaaagggtagaaaaagttgtctaagaattcatattcagagatactattataagagctctaagaaaagggattattttccttgttcttaagttaatacaaaccaagaagattaggctattaccgaactgctcggggctgaacctctataaaattctcatgtcttcatttatttcattatattacatatacatcatactacttgtcgcttacaatctagactcactgtcgttgaccaaaagcgaggttaacaaactagtttaatactaataa

SEQ ID NO: 232284 - DNA, 1227 bp, Cannabis indica
gtagcaatgggcgtacctgcagcagtagaatttggacggcctatgggtaaggtatcaactatatttggtcggacaatatatgtccaactgaacggtaaatatcgcctccaccccttcctgagctcccaaatgaaacgtccgtagccttcaccttcgatctggctggggtaaaaatggtgttgcactttgggttctggagaaggtgtgtgctcgctgcttatctcccaatcttcaaagcttgaattggaaagaccatcactagatgaggacagactagcacaaagacgatgatgatccttgcacaaaagttggaaaagatcctggtcgattcgatgttcgcttccccaaaactcaccagagttcatctacaaaaggtaggacacaagatgagtgtttggctgggataacgaacacaaatagattggttataccgaccaggtccagtcaagaaatcaaaaatagaaattttgcatggtattgaggtttacaatctagaatttcaaaatcacgaattaagggttgattttcactaagccccgaatgggtaagtgaatgttaataccgtggaattaaaatcaaagcacattcataatcaagcaacatgggtaagcatagtcaagatctcacattcctaaacctaagttttctatggttttcctagaacaagttcaagaactatcaagttttttacaatggaaacccaaaaaatcaaatattcaagcataaaagaggaaagaaacgaagaacttactcactgtttgaagctttagagttgctcggatgatactgatcgatgtttcctagggattcttcaaaggatttgagaggaaaggatttcttgctctgattcttcaaaaataaaaatggctaaaagtggttgattagggattttagcccttgttatacccaaaattctgcgagcacatcagaggaagacacgtgtcaagctgggaagaataaagaactcaaacacgtaattgcaattacacttgacgtggaataactcgttaaaagcacaatttgcagagtatgtttataatttatttgctgaacagtcttatgcgagataaaaatgtactaattgttgacttgtgcctcgatgagaaaccatgtagctgcaagtgtgcaagacgaggcattaacctcgtcgcatggatgagatataatgacaacagaaatacttagcgtatagtacacaatatacaaactaagtataagcagatgggt

SEQ ID NO: 232285 - DNA, 1251 bp, Cannabis indica
aagaaagttaaggccctattttcaacctcatgctgttcgggtgtacacagaccaaccgttacgccaaatattacaaaagccagaggcctctagacagttactcaagtgggcggtagaactgggtcagtatgaaattactttccaacctagaacagcaatcaaaggcaagaccttagcaaactttgtagtagaaagcacgggcaaggaagaaagtacatgtggacaagtcggctgcagatcaactattcggtgcaggaatttcccttgtcacacctggggggcaacacttgcatgctatagtcaagtttggatttaaagcatccaataacgaggccgaatatgaagctttgattttcggtgtaaaacaagcccgggagatgaaagctgaacatattgaaatctatagtgattcacaactggtggtaaatcacgtatttggagattacaaggcttgaggagaaaagatgatagcatatttgagcaaaatacacgatctgctcgcacaattcaaaagctacgctctcagacaaattccaagggaagaaaacacgactggtgacgcattagctcggcttgcaagtagtaatgtaagtgatagagcgaatttggttcctatccagttcctcgaagaacctagcatcactggcacggaagagatccaccctcatgttccggccaaaaagcttaaaattggaaaagttttgttggtcgaagtaaaatctgtattgataaaatttttgggagcaaatcttgacatttttgcctggtcacatgaggatatggtttgaattgatcattttgtaattttgcacatcctaaatattgatcccaacttgcgaccagttcaacaaaagcgaaggctattggacaaaaagcgagctctagccctgaaggaagaggtagagaaactacgaaataacaacttcataagtgaagctttctaccctgcttgggttgccaatcccatacgtgtacccaagctgaacaaaaaatgacgagtatgtattgatttcatagacctcaacaaggcgtgccccaaagactgttttctacttctacgaatcgatcagcttgtggacgcaaaagtagggcatgaaatattgagcttcatggacgcttattcgaggtacaaccaaattaaaatgcgtccaccggaccaagaacatacaagtttccgaacatatatgggtctatattactataaagtaatgccatttggtctaaaaaatgctagagccacataccaaagat

SEQ ID NO: 232286 - DNA, 2464 bp, Cannabis indica
ctttagttgaattataagcttttcccttaacacgtgttttgaaaaaacacttagtatatatatggagcctctttctccacaattttctccttgactttgtggtgaacttcaaggcttcttcccatagattccttgttcgactccaaatatatctcttttttggtgtatggagtgaagtttgaaatcactcatggctgagtgcctttgaattacctaaggccgagtgaatctaacggttactcttaggtcgagtgacatttgtaaatgctcatggttgagtgacatttgcaaatgttcatggttgagtgacttttggtcacttaaggctgagtgaattttgaaattgatcttcgtctagtgactcttagggttactctttggctgggtgacatttacaaacactcatggctgagtgacttttagtcactcaaggccaaaattttgaaattgttcttggccgagtgactcttatttggccaagtgaaatttagaaacactcatggccaagtgacttttagtcactcaaggccgagtgaattttgaaattaatcttggttgagtgaatcttagggttacacttttgtttgagggagttcatttccatttgggctttcttaacctctttttcaatgtaatcttattatgaaaaaagtgttggctctttgagtggtctcaacctcttattggttacttattggatgttaagggagctttatagcctcttgggccgcacttagcctctttcaagtttcgaatgttaagggagcttatagcctcttaggccgcactctacctcttgcattgtattcgtggcacttaaagtgcattttcaatgcgagaaaatgggtatcccttttagagaggtatccctttcatagttataccagtctctctctgtctcactacattacttcactaactttgataattttaattgacaagtatagtaggtgagttgaccaggcgtatgaagagtgatgaatgtcatttataaaatgaaaatatttcattgataatgcaagtatgtcatcgcccaaatacatgtgcttcgttcaaaggcctatataggttccctctttaatgtagagcattgtgctaaaggcaaacttgttgttgctaagatcaccttcccgtagagtggaactttacattgaggtatatcttggaccttttctttttgtgggatgtagagtggagacttcatttgaatgcatcagcttatgagtattggggtatcatctaatagaccccgtagggatctatcaagcttcctgaagaacacttacttgtatctatttttgagattcaattttctttacttttctgcccttccatagaagtcttctattgttgggttttgtgccctaactaaaactttatttcaatgtaatcttgaatattcatttatcaataataaaaaaactatattttattacttgtttaatgtattatttggttcacatgtttatttcatgatcatttgtttgatttataaattcatctaaatccttatcatattgatattcttgattactgtgttatcaacacagtggaaagtaatcaaaattatgtgatcaaataaagtcctacgatttatcagtatacaagatttcactgatatgataatcaacaatgtagtttacttgaaccttggataagtgctatgtcctttccagaacattggtaaagtaagcttggattggatgtgtatggagtatatattggatgggatcgatattgaacttggataagatatcatcaacttactttaatatctatctaagtcaatatcacctagttgatcttagatcaatgatctcaatcccgagatggttaggttctagttcaattgtattatttatgttctttgaattattcgttaaagtgaaccaattgtatcatcataatacttatagattaagaacatggtagttcaattgagtgagagcgctaatcatagatacaaaatttatagcttctgtaaatgcatagaagtgaaatgataatttccttcgaacttggcttaatagagataaatggtagagtactcatttcagtaattatattagtttactgaaatatcattttataggtagctaagtattttaaggatagaatacattgaaggatataatggtaaatttgtccctactcgatgtagatcatctatagaggatcattgattatttagattataacaatagataaataatagagttctatatcgtggaacatatatagcgttctatataattaagagtgcaatttcaaatctatagtggcgtaaggaggaagttagaggatttacttggtaacttctagaactgcttattggaagcatgattatataagccaatgctccccacactagttgagataatacttcttgtagactcagttaaatagttttaaattgatcaaatttataaatttctaaaaatttataactatgtcttatttattg

SEQ ID NO: 232287 - DNA, 801 bp, Cannabis indica
gctagaagcaaggtcaatattttagtactttcattgagagtaaaaatacccaagtttttgtcttaagttttgatagggtacagaatggttgtaactcgtgggggagtttaaactaatccagtcaatctaatggtggcagatacaaccatgcaaacacttggaaacacaaaagatccaccagggattaccccaagagaagttaatacgcaaccaccaatagtaggcggtggagtgactacccctctggctgggttcaccctaggtgtacaagaaatcaagaatacaagtacggcagccaaatagaccactcctcgcatcgaaatcccatccacaacaaacactcaaaggctagttagagatgatactgagcttcagaacttgcaagttgcattagggttgatgcaaggccacaataacatcttgcaccatgaccaataagatatccgagcaactatcaatcttgccttcgatgaataaagacgccgattcatagagtggagggatcgagagatgcaagtcatgagagcctagtaagcagccattgacaattgttccaagcaggctaccgtactaatcagaagggcttatcaagtcaatggtcagcaaccaatgactgattctagcatccccttgtgatctcagaatgggtcgtaagagtatgtaattggtcatgctatacagacttatatcgatcaatcgtccaatccaaggtcacaggtttaaattatggaccaaacgatagatgggcagatcttaccagacttccccttgggaggaggtagtcagctaaacaaccatact

SEQ ID NO: 232288 - DNA, 1223 bp, Cannabis indica
atgcccgcctgagcgttcattggagggggtgggttcatgtcgtccatggtggcattatctccaccataatgaacaggcagtctacttaccatgttttgagttgccgccattgttgtagaggacaactatggtaaaaatctctttgagctctcaatgaaagcactaaaatatttaccgggatttttagaaactgattaataaacaaataaagcttaaagaagaatcaattaaagataaagaaacaagaatttgtacatagttggagtgttaatgaaccttagtccacgagtcaatattattgagctaaaaaagctttgaagtatttttacagaagagtgttcttgccaaagtttaagaatcctaatttttagccctttatttgagaaattattttcctaccctttacatgaagggataatgttctatttataggcttgagtcgggtatgggtgaacccaaacccgttagggtttcaaggtgtcaactaggcacagtgatggggtaaaatacaatttatattgactttgggcaggttaggtaagacccaatttacaagataacaaacatccgtacttgtggggaccgtttggtggtggcatgtgtcatgcgcttccatgttggtacagtgaatgtcagagagtatgggttggacaaaaaggtagtttcctatgtcagagggatgtcacaaaggatgctttctagatgtctccgagtgccttttcatttgtcctttttagattaccccatgaggatatctgaatatatcctgatggacctttcatcttctaggcaaaacaatgtttcccggaccaaagtggtttggctttatcatgcatgtaagttggactcgcatccggatccgaaaccattgcctgattttgatgtgggttgatcccttaacttgattgtgcctaggaatgggcccattctggctaattttgggtcttggaagtacacatgtcattaatcaaaaatgtgaataacaactggtaatgaacaagtcaaagaactaaaataatacattaggttaaagcttaaccatctcaggattgagatcaattgatctatgatcaactaagtgacattgagttataaaatatataaatgtaaatttatgatatctttttcactgttaatatcagtctggtctgatatatatccaatacatcatatgcgagtttactttgctaatgtcttggaaaagacattccacttagccaagt

SEQ ID NO: 232289 - DNA, 1608 bp, Cannabis indica
atgccttcatatattttgtgtttcttttgactatattgcttttcccgtgcagaaatgtctcaaaagatgattgaggctctgaagaaaagagtagggggaagctcgggcttgtcccctctggccaagaagtctaagggtggtgagactccatccaaagagaaggcaccaactgaagaggttattgatctctttgaggaacaacctactgtggactctcctgccttgaaagtcgccaagtgcaaaagttcccgaggagggagttaggatggacatgagcaggctaaaactggatctgagctagtcagcagtggatctgaacaagttacggctcctactctacctttagaattgtgcacggagaccaagagaggtagagacatgctcaaccattatgggagccgatcggttccaaaggtgaatgaacagttgtctagggccaataattacttgtctttggagctggtcttgggaggagtcttgaaagagctttcacgagtaagtcctttctaataattttctttcatttctctttgactagttcggggtttaatcctgtttccgcgcagactggtgtgaagatggcttacgcctattcccgagctaaatcagctgctataaagaacctttccacttctaacacaatgtgaagggaggtagactttgccaaaaaggatgccgaagatgcacgggtcaacttgagactatgcagatggaacttggagaggtcaacaagaaacttcttgccgctgaggagatgttgtcaactgagcaacttgaggcagacaatgtttctttgtctcaggaaattaacggtctttaagacgagagagagggtctctaaactctccttcgcaggctggaggatgaggctaagggtaagaagaccatggaggaggaacttgaggctgaggtggagaagcttgggcagaaggtgaatgccttagagatgctggtcttgagattttttatgacttctggaaggctaatcccaaagaaaattttgaataccttaaggcttctaaatatatgtttctcaactacggcacaactcaggcagccaatgagaatcctgaggaaactacttccgcttctcctaccaactagatgtcaaggttcctgctatccaaactgatgatcgtctgacctcttcagacctagctgaccctccagctcctttagatccagttgacctgtacaaagagcctgggactcctgctgtttaattgctttcgttttactatctttattttatgtatatttggctaataggccttcttttgagacaaagtgaccggccaaacggtctttaaacttggaatatttttcattttatgaacaactggctgactgggcatcctttaatcctgggtttgaatgcttttgttattctaaatgaatttcctcccttgtttaaaatcattgtgcaactgtgtttcgttttgttctttacaaaatgttttgtacaagtataggtgcccccaagtgactgagcagacttttgactcttggtcacttgttttcgcaagtatgctttttgtctgttcggggctttgggtacgaccaaactgttgggttttatgccctaaataaaactcattacaatctgat

SEQ ID NO: 232290 - DNA, 1764 bp, Cannabis indica
tggtcaatatatttccaagactgcatttagagttatgtaacatttcacacatatatgcaatacaatttaaacagtttgcaaaaaggtaaaagcttacggaaccgtgagttgagctcaacattggccttgattgtacatatcttgaccctcttcagtgaacaacctggtggctctgataccaaactgtaaagcccgtatttgaaaatttgctaattctaatttaaacttatcttattatatttacaaactcattggtcgagatcctgagtataaaacaacggcttaaaatacatattctatacatatatagttacatattaattttttttacaaacaacaggcaacaacaaaatgtaattcaaaatgtagtatgaccaagaccctccaggttgctctgccgcgatatgtacaatctttgtcgagctcctccagcttagccttacccttacctacacaaggtagcaaattgatgagtcgacgtaaactcagtaagatattcataacatttatataagcaatgtgataccagcttaatgcctaagccgtcctaagcccaattaccaagctcaccaaatggctaagaacgttctcaaagaaagtacgaccactgtatcatattcactagagtatagactccgtacttgtgttagtatggcctttattttacttttgggagttactaagtcttgtaccacatgcactccatagcccttggtattcgtgttggtaaaactgtaactatcctaatgccctatactgtactaacacccttaaaactaactcatttaggcgttagtagtgtaataaataataagaaacactcaatcacatatacatactttatgttttcttacctcgttccaaattcaagcgtgccggtcgacttgaatggaaaatcttcgagctgaacggaggtcctaagtcacattacacaattgggtaaataactcgaataaatcgtctcgaaaccctagctcataactaagggtaatcttaatgacacatacaatatacagctaccccaaataccaaggaaaaccaagctcgaaaaatagcacggatttggaaaagttgcaattttgggggccttgcttgtaaaccgattaaccggttttacataccctgtaaaaccggtcgactggtttgcaccagcaaactccaaaaattgcacaacttggccaaatcttccccaaatgaaatgaaactttctagaacacctatgcacatattctagaacaattcccacacaatagtagtaagaaaacacaataaattcaccatgccattgttgagtcaagtttgagttcaaacttgctcaacctcaaaatagacaattacagcagcacaaacaaccctaaatcatcaagtaaaacctattaaaactactcttaatcaaaactcaatcaaacagaaccgaaactcccaaaattcaacacttaaccaaccaaaaccttaagaatatctagagtagggtttcaagggtcataccttcaatcaaaggcttcaaacctaaactgaatcttcaagataaaccacacaatttcattgttgcacctctagttcgaagatggaagaagaagaaggatagaaactctaagtttttttctccatttatctaatttctaatttttttcttttcttcttgaattgttggataaaaggttaattagataaccttactttaattaaatggcagctgtcaaccaaaggtggggacacctatccaaaaaaaccaatttactaatggctaattaggatttttgc

SEQ ID NO: 232291 - DNA, 1259 bp, Cannabis indica
taatttctgagcaccaatttagtctgatatatttataaattccaggtggttttgtcatttcactcgcaataaccttatccagctagtggtgccgacctcattaggaaacttaaagtgaaggcctagggtgttgagtcattttttcagtcaatgacctaggatgctgagtcatttcactcaatgatgatattaaaagatgctttccattgtgaaaatggcggtaagtttctagcttgaccccctcctcctgttttccatgccataataaacatatatagtagcattactcatatacagtgttttcaattttaatcatgtgtggtagttctgaagttgggtagaaaggttatttttaacaatgtgtttctatcaaatattacgaaacagagtgatttttgttacttctttactcagtcaaaatactacactcctctcctacattaacacataaaatatactgatacaaaaaaactatatttcagtacatgtgctcttaggcttctatttcaggttatgtgcattttggttttgttggtgcccactatatattctcacttgcaaaagtttcatacatgacaggtggcagggttggtcagttaattgctgtaatatttgacacataaataaaagcatttgtttatgaatatggtatatttttcattagttcactttgttgggaactgaagtttgtttcaccagtttgcgtttggctgattaaatctctgaaaattcaacttgcagagaagctgcagttaagttcaccaaattcaagctaaactttacttatgtatcctaacaaaggttgaggtgaagagctactatttttaatgtcaggtgataaaatctgaggaagactgagaactttccatggacaggagacttatgtgcttcggcaagtgtacatgtaagatgaatgtccattgttagttattgtttaatttatttttcacatttggatttactctcattgcttattctattgaaatgtaagtccactgaaattttgtatacacgtcgatcattttaacttgaagccaaaaaaataaatcatgtaacctctcttttgtttcttgggatcatgatattgacatggatatgatagtgttgagagggtctgtattttgaaacttatgtgctttaacaattaatacttcataaattcatttttttttaaaaaaaaaaacctcataaattagaaatggtaaaataggtaaattttaatattttaaaaatatgggaaaaattattaaggttacgat

SEQ ID NO: 232292 - DNA, 645 bp, Cannabis indica
atatgtgcaatctcgacgcttggaagtgccgagatagggtagcaatctcgacggttcaaaaggaactgtcgagattactaccctatctctatggttaagaacccacgagataggttaataacgataattttttaacaaccgccgtaattgattttagtcgaaaaaaaaaattcttttcaataaatctagctaagattatatagtattgtatacttacttttgtcctcattataagtaaagttgcaatatccaccacagttgcattatattgcctgcaagtggcttcaaggaagtccgtcactagcgagaaatccacaataatgggacgccatgtacattaagaaggtgctaatcaaattctacatgagattattcaaaagacaagaacactgtgaagccaaaagtgaaaagttaaactaaccagcatgaatctttcagtgaggttcctaagtgcatttgcagcgtgctcttcctctctaaattgaacataaacattacccacctgccaaaacagaataccaacatgtgactaatctatttcagaaataaactgacttgactttccttttttgatgagaagggtaatatgccactttttcatggtacagaacttgaagaaggcacaaatattcaggattaaatcta

SEQ ID NO: 232293 - DNA, 1549 bp, Cannabis indica
gatagacataggtaacttctgataaccgtcattcacgtgtgtcaccatgcacactgtgtgagaaaccgtttgcatgcatgccaatgcaaagtcacgtccatcaagcccatcacgtagccaagctaagctaacatcccccaatgttgctgtgcgcctatgctgctgctgcctgctgccccctggcaggtgcacttcactcatatgctgctatcccacaagctaagcatcgagtgatgtcaaggtccgccgagcgaacccaagttagggtctcacaaaccacccccaccagaaggaatcgacgtcctcgtcgatatacttctgatatagcactgcacctcgtcttcaaaatgccacaaagtcacagccttttcccatttagcatctgccacatcttcaccttcccattgaaccaaatactcggttctctggtttttcttgctggctccaagagtgcaatgatcaaggatcttcgacaacttcttctcaaattatttcctcacaataggcggggccctcaccccctgctgtcttccttcctctttgtcctcattgtatatcttcaagaaactaacatggaaagtcaggtgtatcttgaaacgttccggcatcttcaatttgtatgctacaacccccactttctggacaacttcgaagggaccatcgtatttaaggaccaagcccttatgataccttttatcagttatctttttccaaatctgtggagtgagtttcagcaacactcgtctccaacagaaaattccaagtctctcctatgctcgtcagcatatttcttcatcctccgtgaagcttttcccaagctgtccctggccaattccagcaactcagtcctatccctagcgaaccgataggctgcaggacagaccccttgagatttctattttgccactttgtgtggcgtcagaggttgtcttcccaagacaatctccgctggactcattcccgttgtagaagattgttgaatcttgtagcaaaattgggacacatcatgcaaatcaacccaattcctctgactagcagtcacataatgccgcaaatactcttccaacaactgattcattctctccgtttgaccatcagtttggggatggtttgctgttgaaaacttaaggtctgaaccaagcatgttgaacaatgtcgtccaaaacctccccgtgaatcttgaatcccgatcacttataatgtcttcgggtaacccaaagtacttgaccacatttttcatggtaagtttttttgccacatctgctggacacgcatgaggcgcaggaatgaatatgtcgtatttccagaatcgatccaacactacaaggatagaccaaaagcccttcacttctggaaatcccacaatgaaatctatgcttatagactaccatggtttcccaaggattggcaaaggttgaagcaaccctgcttctttcctcgtttccgtcttgtcttgttgacatacaaggcatgtcctcacatacacttctatgtcttgctccattttccaccaatagtaagactttgacagtaaagctagcatcctagc

SEQ ID NO: 232294 - DNA, 896 bp, Cannabis indica
tatagattgcaaactgattgtgtatagattcttggcccttctttgggtgcttataggttgtaaaattttgtttgtgcaatacaatccattgatttattaccgtgggactcaaatttagttaacgaaaatctccgttaacagtttggtgctttcattgagagcctctgtgaaaaagttcagaaaaaaaaaaaccctcccttctcctaaagaaaaactttctccttcatggctgaaaatcaagaaaatattaacaccccacatgaggaaactaaccatcgttctggaaaagagcacatgggctccagaagatctaccaatccgcagtccaaaaggaccacccgttcatggatggctcaacctgagggtggccccagtgctcggagtccccggagagctcaacctgacgttggtcctagtacgcggacaacacgctcgaggagaactcagcgtgggaatggtcagaaccccgaggcgagggatgaagagctcaatcgtggaggtgcccaatctctgggagaaagaacttatgaaacggaaagccgccgcctaagacgccgtttggaaaaggtgcagcatcaaaacgctgagttagaatgtaagtacccaaactcatagagcgaggacttgtacgtaccctgatggggaaaatacgacaaactactctcgggaggaaagaacagaacgtgaagaagcaagtgtgagttcaaggcgatccagaacccatagtcgatcaacttgaagaggagaaagtactcaacgagctaatgatcgagaaactattggaactagtaaatctgcgagccactcacagataaagtctatgagtaggacgcggtctataagtaagacaagatctatcagtaattactcccaaccagatctgcgagagcacttga

SEQ ID NO: 232295 - DNA, 916 bp, Cannabis indica
ttgacaaacatcacattgaaaatcagatacgtttttattaataaacaaagaaggaaacaaatgttttaaatataaaaaactaggatgcccaagtcgacaatgccataacataatagtttgaaaatttgaatcagaaacagaaatcgaactcgaagtcaaacaatgcaaggaaagttgcttctcttttattggatgttgaaagaaataaaggccatcacgaatcctagcactgccaatcatcctccccgatgatagatcctgaaattgacacgaattggacacaaatttagcaagacatctattatcagaagttaatttgtgaacagagattagattgcattttaatgatggaacataaagtactgatttaagaattaaatcagtagataatttaatggtgccaactccaacaataggtgaataagaaccatctgcaatcttgacactagatgtagtagaacatggacaataagaatcaaacaaatgaggtaaacctgtcatgtgatcagttgctccagaatctatgacccatggtgtttggcaagcagaaaagaaattaccagagtgtgcaactgaggcactatgagactcggaaccagatttggatgtcatagaagattgactgaggagtgtgtataaatgttcaagttgttccttactgaatgaaggggcattagtactgctttcagtctgagtgtggtagacttttttgtcatgttggcgacgaggagtccagtttggtggtttaccatgaatttcccaacaagtggatcgagtatgtccgtgacgctggcaatgatcacaccaaggtcgatcacccttacgattaggccgcggatcagggttcgatttgccagatggtagtggtccagactttgagacaagagcagaactttcaatgggtgacacatcagga

SEQ ID NO: 232296 - DNA, 1367 bp, Cannabis indica
attaagaaacgtgtttaattaaactgattacttagtcgtatcagttaacaggactgatgggaagaaaacatctctttcgtatcagaaaaatacagtttttcatcaaattaaaaattccatctgcgatatcaaaattttttgagtgtattcgacggtgctctacagtgcagtgggattccgatacagtgcaacgactgggctgttttattctggggacggccggcaatttccgactgcttgcacactcttgggcagtatcgcaaacgtcttaaagagaacgagatagtccgcgactcaacccaaaattcttcattcggtaatatcgttcctcttttattttgctaacagtttactcaacaacatatcataaaattcataacaaacaacgcataatttcataataaagacataaaattcctataatagcaacactaggctctctattagtcctctttgctgcattctttatcggatggaaaatcatcaaaagaagaaataaaggtatttatacataaatatatacatatatatatatatgtttatatatgtatatttaccaatccttatcggaatgataaatcaagtatgtaaataaaggttaattataacgataacaggagcagaagttgggataagtcaacccaacaatattgtctcaaagtcaagtaataacgaaattaataatggatcgggatttgagccacaaaaccatcaatatacttacgctgaagtaatgagaattaccaacaactttgagaaagttattggaaaaggaggatttggaactgtttatcatggcttcttaaacaacactcaagtggcagtcaagatgctctcggagtcatcagctcagggctacaaagagcttcaagctgaggtatataaatttttaattaattagataattaatttctcatttcatatactttgttttgtttagagtgtttattattatctgaatttcatggtttaatattactgacaggtaaaaattttaatgagagttcaccacagaaacttgactagtcttgttggatattgcattgaggatgacaaacacatgggtcttatctatgagtacattagctgaggattatgatttagtgtctaatgcaagataacacccaaaccatcttctattgataaagttgaagatgaagaatgttctaaataatgtataattaatatagctatgtcattggatgcaaagataagaacacaaattgtctcttcacttaattgtcaaaacaacattatgcttctctaagctgatcatatcagactcatcgacagagtaattcacaaatttataaatcaatccgaaaaacaaaacttcaccagtattcatcaaaatcccaaatcaatca

SEQ ID NO: 232297 - DNA, 1470 bp, Cannabis indica
ctcggtctgggtttgtatctgggttcaggttcgggtttaggtcctggtcctaatcctaatcctagtatgattccaattcaagttgcgattctgagtttgagtttgggtcgggattcgagtccttctccgagtttgggttcgagtttggatttcaatctaggttcggatcaggctctgggtgtgggttcgggtcctgggtctgggtctaggtcaaggtctgagtcccatgtttcgatatcgatctcagtctgggtttagttcccggtctatgtttgagtttgggtccaggactaggtctaggtttgggtctaattctaagtctgaatttgagtttgggtctcggggttgggtccgattttgggtttaggttcgggttcaggtttggtactagtccgtgtctaggttcctgacctagtttgggtctagggtaggtttcgggtctgagtctgggtctgacttcacattcctaagtgcaagtcaggtcctggttcgagttcgagtcctggattctgatgtgggtctgggttccaggggctaggtccctagtctaggtcccattctatgttcgattcctaggtcatggtctgggtccaggttcgggtccaggtctcggtcccaatcttggtctaggttcgagttcgggtccctgttagggtctggatcttggtttgggtctcggcgagggtttcagaccaggtcaggtccaagtcccaatccaggttcgggtcccaggtctcaagtcccagtcctagtcaaggtctctgtccaagttctggtccgagtttgggttatggtttgggtttggttctggtctcaagtccgggtcctagtcacagttcttgttatgattctgggtctgggtttggttctgggttagggtctaggtccagattggggtcagggtccgagtcttagtccgagtccgggtacgggttttttcaaatccttggctaggtctaggtctgagtttgggtctgggtccgagtctaggtcccgtgtttctatcctagtctagtgtctgggtcggtattcgattttgagtctgggttcgtgtccatgtaacggtcctaatcctagtctcgattaggggcttggtttgggtccgggatcgagtcccatgttcaggatcaggttcgggttcgggttcgagtctcagtccaagtctgggtcctaaaccgggtccaggtcctggtcccagtcccggtcctattcagtttctggtccttgtccgagtcctagataaagacaccaactatgggtcttgtccaagcccctgttcctagatcccgggacaaaatctagatcccaatcacagtcccagtctggtttcgattcatgttctaggtcatggtctgggtttcggtctaggtccaggaccaagactagggtgtagttctgttggaaattattttaccaggatcttagatctactcaaaagtatgtttattaacatcctaaataagaactttc

SEQ ID NO: 232298 - DNA, 1032 bp, Cannabis indica
caacttgttgacttgtttataatggcattagatgcccacacttttactcatatcagaaattgtacttgtgggtgcaccatctaatctgctcacagttgcatatggtattcaacacagttttgtttctatgatttttttttagttagtatttcatttcttgttcgcttttgtttcatgtctaatcacatatgagcttcacatggtcttcttagttgtggtttgaacatatagtcgtcccagttgaaaaggctacctctcatagaaataatgggaagagcttcctctggaccaatgtatggcttgggaattttgctccttctcttgttattcattgagaaaaataaataaggcgacgactacttctctatgggggtgtgaaagccacaactagttggaaaaactcattgagtgttgttgtaaaagagatcatgtgttttcaaaattgtgaaaaatagaaatattgccttgagaagattgagctgccttgattcacctcttggtggctcacatgaggacactttcacacactaatgacgacttaagctttcagatctccagttgagttcttttgcgagcttgaatgtgattttgacttgtttttttgagcaaactttaattggaattctactcatttgttctaattctgcatgtgttgattactagatttcttggttcagatctagttgaactttagtgatttgttgtctaatgctgtttataaatttgtcttgtcaaattgctcatcttctggattgtgtgtttctttacatggatatattcagttatttgtgttatttttttaccgtgtgtctttgttatgatctggaagcacattgttgcacttggcttttgtttgtgttaatgagctagggttatttctaaatgggcaagggttattttttttttttttcaatccagggggagtttcaccattttatttttttcttctctaattccctctgctagtatccagagggactctttgttgggttttatgccctaaataaacctcatttcaatataatcagattt

SEQ ID NO: 232299 - DNA, 714 bp, Cannabis indica
cctgtttcgagtcgttcttcttccttcggagattccagtagtaataacggtagctgtgtttgtggtcagaagggtgatgatcggaaatcggtggaaatgacggcggcgccggtgccggagaagaatgttccggtaactgaaagtggtagtagtagtagtagtagtgactctgttcttgaacatcagacccattaaagtaatttccttttttaagaaaaacaaaattaaaaattaaaaaaaaaaaagattttgtaattttgagcttttttttttggggagtttggtgatgtgattttctctcgggagctgtaaattatcattttgagaaaatataaaattatgaattaattgagcataatttccaaacaagaaaaaaccaaattgtatgtatagctttttatctttttctttttcatatatgctatattattatttatatatatatataaaaagcatatatggcatttcttaaagtagtttaagttacctaactctaatggtttatgttatttatttatttattttgataaatcagcataaatttataaattgttcaaacaaaaagtaaactttcaaattgaaagttttgtgagtttctcaatgaaaataccaaggatacaatattaggaagattaggaaaaagtcttaatttttattcattttattcataatcttttaacattatataataaaattacagtaatagcaatagag

SEQ ID NO: 232300 - DNA, 2248 bp, Cannabis indica
ttgagatcactggaacaaagtttgtgtcgagacgtctccagatacaacaactaaacacgtgtttaatacacgattattttgacccagtatatgcaaaaaaatcatagctatatgatttgtcaaatcttaaactacatttacactacgtgatatgtaatcaaatcccgcgattttagggatgattgttgtgaacatattccggtcaaccttgtaattaagtgtccactatgtaattataaatattgacaaacaagataaaaaaagagacgaaaaaactcatacaagagagttcctaaaaaaacaatcagaaatctgaaaaaaccctgtgttcataatttttgtagctttggagaaatgtgttaatacatttttcaagtcatcgggacccccacaattttacactcaaggtggtgagtttacagtatcgtattttattgtgtctaagctcatctttttttatttcttgttatcattgtgtgtctttcatattaaaagaaggcaggcttgcatttacaactaaattagggtaacagaatctgttctccaactataatatctcgatatacctaatggtaaataattaggatttttaattatattatgggttaattagaacataagtgggatcatggtcctactaatttagttcaatataaattttaaatttgctataactggataaataaacgtaatttataaattacggagatttgtatggtatatgtgaatgtaatataagttattggtgtaataaaaatattttcaggtttggcaaccttggagactcgatcaggagccaaaaatgtcataacgggtttaattgatcgaattattggaaatattgtgataaattgataatatacgtattagagtaattaaaagtatggaatttggcttagtgtcctcaaaatagaaatttcttagtggctaagaaatgataagataattataaataataaaattttcataattactatattattattaatattattattatattattattattgtagtattatttttattatacaaaacttattagtttactgataagcgtttattatatatatctattatatgtaatacgtttataaacataagaacgaacgaaaatgaaactttcgtattctgtcaaaaaaaattttcttcctctatttattttttttgatttttaatctaaaacgtggcgatttaagctccggtagtagcaggatagcaaattctcctagcggaaaatcttaaggtaaggtttaatttggtttcatataccggttttgcaaattagaatagttataaaggctctgacctcatagggttgttctcgggtagtcataggactagttctgatgttttcttactaaaattgaggtgatttttgattagaaattgagtttgaaactttttatagcttaagttcgaacattagtagtgtttgccaatcaagggctcgattttagttcctattgtgcaagtatggtagtatgtatggtatatatgtgccctatgaaagttggggtggggacaggttctggtagcgtttcgatgagtgcgtaaacttaaaaaatcacattcttacctttgaaaattctgtcaacctgttttgaaactggtcaactggctctggccaatcggtttaccgtttcaggcagcctcaggaactagtgaatcgtatttttgccataacttactcgtgtgtccgttttagacgttctatatatcgtttcgaagcttgcgacgagctctagcatatggtgtatgttttagagccaaaatataagatttagtttagtgtatttgaactacggggtttggtaggaaaccctaggttgtcctttgcaactattaagcagtgttttgggataattactcattagtctattatttttatgacatagggcccggatcattgattgtactctaagtaggtcggccaacatacctgaaccggaacttgaggtaagaaaagtatattgtacggcatagtacgttgtacgtaatacaattaatatttttatgaattgattaatattgagatataactaatattgttatataatgaaaagattgattagttgagtattgataatgtgatgatattatgcatgtgatgtatgggctcacccgattaggtgatgcgatatacctggcgacgtaccgggcgtaggtacgggcgtcggtgacatatgatgagtaccgagcgtaggcacgggctcacctgattaggtgatgcgattctcctggcaac

SEQ ID NO: 232301 - DNA, 890 bp, Cannabis indica
tcttgccggagccaaagggatgatgtcgtgtgaactgtgaagctttagaataggttttttggaatagcaatttttttttttttaaatagcaggtttttttaaaaagtgtcctatatttacaaataaaatgtcatttaaccgtataaatggaataaatttttgtacaccgtatatttgaataatatttcagcgacctgtgtacaattaaaaatagcccttaagatttttacatttaaatttttaaatgtatcaaatcttgaattttttttgttgttaaaaaaattattgaaattgttatctttaagaatttttgttcaattacaatgagttttacttaggggtgtacgtcggtcagtttgtcgatttattcaacttaatgtaaaaatcgggttacaaaaattaagtgcaacccatctaattaagaaaaaaaaaagtagtgacccgtccaataaaattggtcggtttggtcgggttaacccgtccaaactgacaattaatgtttttttttacattcaattattatatttagttaattgtgataataagataaatatatataaattgaatttaaaattgaaatcaactatcattaaaaaaaacatagtaatttaaattttatatttttttaaatatgtatgtaaattatatgataaaataaatatatatataataaaacatatatacatatatataaaactcttttaatcaggttgatcgtggtagttcgggttgattgaacgggttggtattattttcaacccacccaatataaagattaggcggattatattttcgtcgggttattcggtttgcattatttatcgtgttatgtcggtttgatttgggcgggttattcggtttgggcggtttacaaaaacttatgtacaacc

SEQ ID NO: 232302 - DNA, 1735 bp, Cannabis indica
gtggaggcacttcatctacatccttcaatgtcctaacaataggtactctgcaatgaccacctctgcaactcaggaccacctgacacccgaccatagtacaatgcgcaagaccacctccttcacctataattcgcagtcttataaggtcagcttgtcccttggggaccacaagtgtatctcaggccattagagcctataaattcctcattctcaaatgtgaggggggttggaaaattttgtaatacacgatactctcaagcaatatacttctgaatattcatattttatgttttgattctaattcttgattctaagttttcaataccatcttcaatcttaattttgtcgaccatttcttagttgacgagttcttgccattaacgatttaagctcaggccatgttgtttccttacatacaatcattgaaaaaggcccaggcgctcttgtcgtctcaaaagtatggaagttcgcctaaacaacacttaactgatctcttcaaggcaatagttgccaccactcgtcattggggaagaaggtgtgaacgatcaaaggccttaagtaggagtagaaggtgtgaacgataaaaggccttaagcaagagaagaaggtgtgaacggtcgaagatctcaagcaagaggataagacaaccaccatgaagaggtcccagtggacatgcatcaagatggagtgatcgcttccgtcacacctgatggtgaaaatggatcaaaaaggcaaagagttctgtcgtgtataaggtgcccactgtcgccaacactaagaaatcttggaacctcgcaccaccaacatggaaaagagaaatgggtttactcggtgagttcaagctcctaaactcgtattcacaatgaggagatgaacgagttgaggacaaacaacttatagctggaagaaaccattacaaacatgccaaaagtgcttgatgaactcctaaaaggtcattccgaggcacctttgattaggtgaagagagccataagcaaggaagaaaggtgggagtgagctaagggaagggggaatgtccaaatattaaataagtaacacactagacactccatctaacatctaatctgattcaattggatatttaaaaatgacatccaatccgattcgatcataattggaaatctaataattagcgataaattataattagatcggatcgatttatgaacacccctaaatttgaagagggcaattactcgcattcaaatacatgtgagtccgtccttgattgtgttaacctactttcgactcacacttaatttttgactctaactcgtaaaatttgtattacgtggtattgtcaaaatgttttggcacccctaaaagatctatagcaaaaaaaaaagtaattaatttgccaaaaaaaaaatggggactgatatatagttgtctaccaaacatatatataaaataataaaaggacattaatttgatgttacacatttacacgttcaatctccacgaactaatcaaacactattaaattctagtttttaataccataaataaataaataatgcttttctcggtttttcttcttttgatatatattactttggttctgctttcaaccacctccgatctccatctcaaacccaactcaaagccaactctttttaccagctaacccattttggaatcatcccaaaagatctgtaaaaagaaatggtagattttcttcatctctatccatctctttgaaagcaggaaaaaaa

SEQ ID NO: 232303 - DNA, 1629 bp, Cannabis indica
caatgtaagtcacttggccatgcgccaagtttgcatgtcactcagcatgctcaaggccatgtcacttaccatgctcaaggataactcactcagcaagcatgcaagtctctcaagaaagacttgcatgcaagtcaacttggccaatacttgcatgcatatcacttgaaaatgctcttctcgatgatacaaaaatgcttagcaacgttttcccaagtgttgaagatgaatgcagcgaaggtacaattgcaaggacgaggcatgtatacaaaagattatgcgtgcatgcaaagggagtgcatccacgtctccagtaagttgtaatgacaagaaggtacaagtagtggaggcaccacaattgcaaggcctgacatcccagacaaggttgcccaacacccactatccctagaactcgggaccacctgacaccagacaaaggtacaaggtgcaagaccaccatttgtaacctgcagcctggagaccaaggataacatcatgtcccttaggaccaccaatgtatactaggtcatcagagcctataaatatctctttctcaaatgtgaggaagggttgaaaaattattgtaacacttcactccaagaaatacaagcatttatcttcctccattgttgctctaaatatttctttaagttttgaattttcatattttcatcctcattctaagtcttgtgtttgagttttaattttctggccttaagttagttgatgagttttcaccatcaacaatcctaaactattatgtgttaactattcttgtatgtattttatattttagatgttagattatattacttataatcaacatacattttcataaattaagatcctaaaaataagttccaacattggtgaatcattaataagtaagacaccaccgaaacttatatcaccttcacaatatctcatcatacctgctataaggaggagataaacaacatatgtctgaagtactagaggttggagactatattgggcggtctagaaaaagtgttcaatggaatacataaaggaaaaatgtgtgcttgttcttcaagtgcaaaggtaatcagcaagagagggggtaatgaactacacatgctaacaaggggaacttcatgttctctacaattaatacctctcgggattagccaaagaaaaacatattgataaatgggtgcccttcatcttagtttggttggcctaagtttattccccctcatagggtcacatcgaggggaacaccatcataggttagttgagggttaatgcttgcgagaaccttgcctatagaaccctatataatatcctaaaactataattattttgtaaagcatattttatgaaatatgaggtaatatgtcaatttggagaataaatgagtaagattgtaatcttactaggttaattatgaaaaatggaactattattagaaatgggtaaaataagcgtaattcattaattacggagattttatcagaatatatatgtaatataaatgtaatttttgaaataaaatatattcaggtatggcaatagtagaaacccgattagttggccacaaatatcatatcggtattagaatgtataattgtggtattaggaagtttgatttatgatagaattagtaggatt

SEQ ID NO: 232304 - DNA, 1441 bp, Cannabis indica
gtaatatcaaccataattcaagacatcatgaataaagaaaaatacaaattgcagcaaaatgtttgagtcaatcaatcaaatagtgtactagacacaaagcttagctcataaaatatgacagacctgaagccatgaggacggatgaataacaaggaagcctccgagtcaattttctctggaaaatgagagaaaagagaaagggtaagataccacctttttgagaaaaacagactattatttggtttgtccacaattatgattctattgtaacaaatatccacaacatatcgcattacaggttgggaatttgcacgcaaatctggcaaaattcatcccaaaacaaaaggatagttaggtaaaaactatcctgttcactaattaaataaaaaaaaaggctcagataagatatatacacattaataaatcaaaacacagtgctcctcagcaggtaaactgtactttgcacaaataattcagaaaagtttaacatacttttaaagaaaaacaaaaataataaatagataaagcagattacagactaaatcaaccacacaccttaattacaaaataaaattctcagatcagagaaaaataaaaataacatcttgaaactgaatggaccaaactaaagaaagaattaaccaaacaaaatcaacttacagagtgagatagagatctgccaaacagaattttggatattgaaaatggaaaagaaccaaatatacacacacacatactagtgaagagaagtatctcagttaaacttgatgttagtaatttctttcctttgagaaaaaacaaaaaaaaaaaataacaactttatgttaggatacatatgctaataaaaaaatatcattctgtaatcaaatccaggattgaattttttaaattagggaaaacatatctcacacttttattcatcaatacaaattaaaaatgaatgaagaacagaaaaaggaaatggaataattcagtgatttcatataatcagttatggaaatggaaaactaacagctaattttacattaaccttatagtaattaggatttagatagcattagagtaaaaaatgacatgtttttaatcaagtcagagtggatggtaacatataaaaatgaactggagattttcaattctatataaaatcattgtggggtggtagtggtacaggtttgaagttttcaaaaggggatgataagattatatacctttatgcagttaggcgggtcgaacgttgtcggaagaggaagatagtatgcttcactccgaaaaaggtggagaggatggatgagaagaattttaggatttttcaatttcttctctctttttttgataattgaaattatacttggaaggaaggaagaaaggaagggtgtttttggttttttattttagggcttatttaatggggataatgaactcctatcctgtctcttatcaa

SEQ ID NO: 232305 - DNA, 696 bp, Cannabis indica
tttttttttttttttgttcgaagcaatgaggttcgtgacctccctaatttaaactttcatcttcaacattatcatcatatatgatatatgtatatcatatttgcagaaaataatccataaggacatatatgtatatttcttctacaaaccaatgaatacagagcaagggatactcgttaactccactgcttccatatatttctgcaatccggcgcgaccatgcttccgtccgcctggcagtgaccatactccttcgatgaacttttgctatccggcgcgaccacgattcccatctcccttttgtgctccgatctggaccacgttcgagctcctccaccaatcgaaagtctcgtggtcggtgtacccttgttgcggcagaactccgtaacttgcctagccaactaaggatctcagcccagctcaaatctcgtatggctaagacaacaccggtatcagtatcattccaaggaatgaagagcatctcctcatctgttgatgttcttcgaggtgccttcgttgatgcagatcgagaatccataacatccgatgaagccacgctgatctcttccgctttcggtgttcttcgagctgccttctttgccgtaggtcgaaccgaaattggttgcgatctacctagatcggatccagctgaaatgccactatcgacaagatcgagagccttctccgatggcttcg

SEQ ID NO: 232306 - DNA, 895 bp, Cannabis indica
acacacgtaccaaatgagtacacgcccttcttattattaactagtcttacctttaccttttcactaaaaatctatgagaggagggtgcctttcttaactttctatcttcccttcctttcataactttctttcgtatttgtcttggtttcctctctcaacaactagaagatattgtgtgtggtaatccactttttagaataagttgagatgatatatatcatggcaataataactttatgagacactaaaatacttaataccatgtcaaatctaatattgactgcattgtatcaaaattatggaacttctttcttcaataaatttctttattttcagcttgtaggaaccgaccattgtaccttcaattccacacagaaggcttttgggattgatgatttccggaaaatcccaaatggtgtcaatggtaataaataatattgcattatttataatttttttgtacccaaaatgctgagttaatgattggctaaaaattttaattttcttgttgatgtgtgatttgacataggtattgaggagcggatgcatattgtctgggacacaatggtggtgagctccaatagattatttctttaaatattttatactttctaaaatcactgttttagaaatgggtttttctcttatgtttgcatatctatcaggaatctggtcaaatttctgttaccgactatgttcgagtaacgagcacagaatggtattactcttcttcctttgataatgtattctctaaatattcagttttgtttttccaaataaaacagtacatgttcgcatcataaatccttgtagaaaccgtctattacatgaataacctccatattccatttttttttttcagtgctagaatctttaatatatatccaaggaaggg

SEQ ID NO: 232307 - DNA, 1881 bp, Cannabis indica
ggggcgtacacctcacactgatgaggtggacttgaggcgcatgcctttgagcggcattttctttctttcttttcttttttttttttggctgttatgggctattttttaaagcttttctaatagctattttcatacttttaaattactctaatcaacgttagtttggatcatttttaacagatttttttacaagggataggaaagtatagccctaaaacccccaaacctctcatatggaatctctcatctctctccttctaagccaagtccctccttcctcagtcctcatcaacctcgtagatatatgttttctttatatgtttagaactttcatcatttttcaattgaattttgcaccttttatgaatttagtttatgatttcaagacttaattagtaattttcataaattttatgactttgttatggtattgtgttgtttgttatgaattttatgaagtttttcttcttattgtcgaggcatacgccttgtggtactaagggaaaacgccttagtacccaattccgtttttcaaaacctctagttggtcacttggaagaggtttcatactcacaaaaatcttatatgatactttatttgttttagtccaatttaaggttagttaagtttcatgccaagcacttgtgttaaatatgatgttatatctaataacgatctcatatcttggcataataaaaggtttgagaggatgaggggtttgttgcgacagtcaaaagttggagaggatgagggatatgctgccataatcaaaggttgccaaaaatgagggtttttttcttgccataattaaatgttggagagtatgaagagtttgtcgccataaccataggttggagaggctgaaggattttttgccataatcaaagttggagaggatgagggatattatgccgtaatcaaaggttggagaggatgaggggtttgttgccataaatcaaagtttggagaggatgaggagttttttgccataaattaaaggttggataggaaacctacactcttgaaccaataatctcaagtatttgaggctagtcttttctttataattccctcttccattgatgaagtatggctcaatcatcgtctcattttaaggtattttcaattccccccataaattctagatataattaagataagtttttcatcacaaggataattattcaaatgtgctgagtgtgactactgtaatcttgcactaaactaattttatatatttaaagaaatcacctattgacttataatgttagctttgtatggtttaatatttaggttgagattgaaggaagaggattttgaaactttgatcaatacccatagaaggaagatgtagtgtgtttttcaccagattgtagcttacattggttgtaagttaattttactattaattaattaaatcagtatgtttaagttatatataaaaatttatgtaatctgtttttttatattagaaattttaaaggaagaagattgatgaagcaaggaagaggattctgaaatcttgatcaattacccattgatggaagatgtattgtgtttttcaccaggtcgttgcttgcttgtaagttatttttattattagttaattaaattgttatgttttaagtttttttaatcatcttctattctcatatcagtttatataatttgtcaataccaatgtaagccaaactgaaccggtaggtttatagggttataataaactttacttatgtcatgatagttttcatcttcttataactgtacattactgcagtttgatgtgtgagaaattcatagataagtaattgtattgatgttattaggcaagatttagtaatgctatccactgcaaacactgagactgcccgatgatagcct

SEQ ID NO: 232308 - DNA, 1169 bp, Cannabis indica
ttttaaaatccatttaagtgagcgtaaaattttatccttattagtccatgtagagtgtggttaccccctaagtgactaaaaaggtttgccttttggtcacttgctaaataactagggttttcatgtaggaactgacatcatcccttaagtttgccactatgatttcataatgattaccaagaaactgaccctggtgacatggatatcaatgtttgacatgtggaaagaaagaaagcatcccagatttgagtagtcctgagtcatatcagttgacatgggagaggcccctagccctacaccgaggttgaccctaggaactccgaattgggttttcaaaactcgctaagttgtttcaaactcacaatctttaagtattctaaatcaagaagacaagaagaatcatgtccaaggtctgaaaactaaaacgagatgaaaaaacaccctggaagtcaatcgaggtgcctagggtttcacccagcgcccaggtttgacatcccaacaagggtttttatttttgggtctgtcttagtgaaaatggctgaaactttgtactttgacatgaataagacctgtcacaaacatatttaaggcatcaaaattagaattggagcactttcctttttgagcacctgaggcaccatgcgcctcgggcacctaatgcacctagtgctcaggttgacatattgttaacctatggtgcttccaatcacaatattgaagaagtatcctgagcattttatttttttccatctaaaatgaagaatataatgcttttatgaaagaaacaaatcgacttggaggccaaaatggggacccaatgccaaggttaacctaggcattaggcccagtgcccaggttgacactttatcaacctcgaccatttatagaaacaaatcagaagaaatcttcatggaatattctctgtttttgccaataataaaatatttgggtgcttttggtaaacaaacagagtcatttgggagtccgaactagcagtactacaaaaatgggttttcccgacgtttttaaatagtcgttcaaagtattctcgtcggtttctataactattgcctatacgaccgtcgtaaaacgggcataataggcgacggttcaaaaccgtcgccaatgtgggtttcccgacggtttaaaaccgtcgagaatgtaaaaaa

SEQ ID NO: 232309 - DNA, 1828 bp, Cannabis indica
agagagaaaaaaagagagatagatagagagaggggaacgacaaggggggtctgctttattgtatgtattttttatgtatatacatacatgtatatattattatttaattattattttatatatatacatttgactcggtcaaaaccgagtctttacagttacaaacatacaaaagcttaaattctaagataaagttttgacatttagataaatggtatatttaatatgattttattatataaaaaactattcgttcatttgtttacaatttttattactatggtaaattttttatttaaaaataaacttaccatcaatcaaattatattctaattgaaagattataatcaaaacaccaaaaagtatcaaatgttacaaatattgatgttgaaaattagctcaacaacaaatttgtattatgatataaaattctttacaccaagtttaacatagttgagatacattgttctatcaatttatacaatttccccttagtttctattattactctcgtgtttcccagtttcgccagcttagattgttttcaagatgtattctaacagaattttgattagcctggtgtaagcaagaatcctccttccttttgaacgatttggtttactatttgtaggtgggaatcattgttagttcacttcctttcatttgttcagattggtccacatagattcattcttcctcacctgttttcacgattttcttgctcgcttatgtttctcgagttccttaggctttgcttctaatttctcaagttatgctccgctttctatgattttcaagctttgtctttcctattctgtctcttcctttaagtgaaacgcatttaatgctcctgccacattgtttcatcagatcttctttatttgtaatgaaaggaattacttccttacccctaagatgggtttatcatttacaattacccattaattctacaatttttgagattgtgactgatttagtttgagcttaaattttgtgaaagtagttactcaaaataaattccacgtgtcataatgagccaacacaaatttaatggggtaatcattttaattttttgggaaactatcctttctattttattatcataatatttccttttcactctacttcgaatttaaatctgaaggtaattatttaaaggaataatcaagagttttagtatcttccttgatatttattttgctttttttcattgccatcttattacttttcatagcatgatacccttagagttttctctttttgcattctgcaaaaaatgaatccacgagtttccaagaacacaacaaggtctactaaggagaaagcttctccattgctgaccccaacttcatgtctgaatatgaattatctttcaaggacatctgctcatgatatcgtgttctagaaggggtaacattttgtatgctcacgaaagatgaaatgaacaagaatttggaagatcttgttgttggagttttatgtcttaaataaaatctaatttcaatgtatcttatttatttaatgttgacctcgcttttagccagcgatactcaatctctaaatcgacattattatgaataataataaatagaataataactatgagctataagaatacaaggatttttatagaggttcaaacccgtgatgatggtaatagcctactcaaagttgtatttgtattacgtcaaagatatctagatcaaaaggtgctagcctagtgagtttctcaaagatcttataaaggcttacaattattttgacaatataagtgctctctagaaaatatgaatcgggctcccttcataatagaatgactccactattt

SEQ ID NO: 232310 - DNA, 899 bp, Cannabis indica
ttttttttttattttttaatttactattattctactacgtacctaatttaggaccacaaaactaatactctattgatgtgatgcagaatcaagtcgccacttttggtgtggaaaaaaggcaatgtcaaagaatagtgggtgtgcgtatctcaaggtttatactttctctctctctctctaaaggtctcaactttgggtaaaggtcttacctttatctgatgtacgacatagatacgctacaatatccttccaaattaggaaaacatattgaatacacatccttgtcattatggttggaatgacatccgagattaagtgacacaaaaacatttggaatatgatttgtcaacaaggtcctcaagatcgaggaaactctcgatcattggcatgtctgggttcctttagacccagaacatactcctttctatggcgcgttgtatgtagacaagttgagggcattttcatgtgataccttctcgtggtatgccaagacttatacatctagtataatcttcaagacctcatttcacgagttgtactgacttattccaaggacgacatgtctttgccacatgtctcttgtggtggtaacacgtgaccctcaaaaaatcgagacaacataacatattaaaatatgtaatctttaattaaggattactagtataatttattaagcactacttagtggtgcatatgtgattttgatttcggtcactaatgtggatagacaatttagtaaaagtattgtgtataatagtgattacacataagtggactaatgtaaactaacctcttttattaaggtgtagttatcataaaaggttgaatttatgtcacaaagatgctcattaatagattagtctaaattctaaattttgattattcatgaaatcctgttt

SEQ ID NO: 232311 - DNA, 588 bp, Cannabis indica
tgaaagcaatgggattggcaacaagagaacactgtgaactgtgtgagagtcattctgagaatacagaccacctattctttacttgcaggttcactgcagcatgtttgcaagggataaaaacggctgtcttggaacatagcagcagactatttgcttgctttgaccaggtggattggaagatcaaagcttagcaatttcaagaaaaatgtactagctgctgccataagctgtctggtgtatacaatttggagagctcggaatctttttgtgtgggaaaactcaaagccggatgtaaaaaaggtaataacaggagtaaaacaagttgttacatatagaatcaatgcagtatggccaagaaaagtatctgtagaggatactgaatggtttcaaagcttgtaaagaacacatgaaatgattggaaaatagagtatcaaggaataggaataattgtacaattttattattttaggcccttcttagggtgctatttgtttgtaaaaattttgttgtgagcaatacaaactttctgattcataaaaaaaaaaattattaaataatataggtggcgtttggtaacattttttttaa

SEQ ID NO: 232312 - DNA, 1625 bp, Cannabis indica
ggattggaagatcaaaactcagccaattcaagaggaatgtattagctgctgccatcagttgtctgtgtggagagcacgcaatctgtctgtgtgggaaagcacaaaaccggttgcagagaaggttataacaggggtgaaacaagaagtgatatatagaattaatacaatatggccaaagaaagtctctactgatgatactgtatggttccacagtttgtaaaaaagaacaaaaaatgtagttggttaaagagaggatcaagaaatagaaaactatgtacaaattttattatttaggccctgtttagggtgctattgtttgtaaaaatttgttgtgagcaacacaaatttcctgattcataaaaaaaaaaagttctaataccaatattgatttgccaatccccttttgccaacacatcacaagtaaattctattttaccagcgcaatactaacttttgctagcacaaaaatatgttggcaaaagtgacatttcttgtagtacccccaaaactgcacaaccgcctttttgcttggtctcacaaagatcattatatcatctgcaaacataagatgtaattttggatcctaatattttctagtcaaataaataatgataaactagtcttgtcctatactatatgttcaagtaattaaatatacacactcaagcaactgataattttagggaatatgtttctgcctcaaacataatttctatatcttctgatcagttgcaaacctaatctttatggttgtcttttcttttgggtttttttttttttattattattatttaaaagtttttctctttccatgactaccctgctgtcaatttatcatataattaatattatttatttcctttctgtcaccccttctctcttatttcaattatgaaaaataaaatttttttatttctttttatgaatatatagtattaattatcttttccaatatgatcttcacatattcttgtcaataatgataaataaaaaatgaaatatatagcgaatatatgttcaagtagttgttataaaacactcaacacacttgaactggaaaacaaagaaggtcctaataataatgtagggcctctttgtcacatataatattcaacacacttgaactgtatatatatgcatattattattatttgccaaacatatcttttgggttgttttttcttagatcacattgcttaatcattacatataatctataacattcatttaatgtagcagagaagtttgttttgatatatacatacatatatataaatatatatatatcattctcatctctagctaaagtagggtctaccatgtttctagaattgattaataattaacctataattaattaagttaacaaataaaagttcacataaagttgtgcaatgtttctttaatttatttaattaatatgagtagagttagaagacaatccccatgtgattgtactccaatcaacttctttcaaaactcacttgacaagccacaagtccaatcctccaattatactataaataagcatctttagttattagctctaccataccaacaagccaagtactcatctcaatagcaaagaatccctttcttttaaaaaatcccatacttttcttttt

SEQ ID NO: 232313 - DNA, 1636 bp, Cannabis indica
tatcaagaacattataatacatcaaggctatttagctaaatacagttgactcatggattatggttcattaacaactgaaccacataaaaatctccatcttttactctttattacataatttaatttcttaacttattataattagttttcaaaaatctcggtaaacagatagattaaataaaattatacaatctttaccataaacttcacccaaacctcgaccccgaccctagacttggatcccatctccggccccaggtcacaaatctcaactaggattccaggttcgggtccaagagtggtccgggctcgggccacagtttgagtttggggctgggtctgagtccaggtcagggtctggatttgagtttgggtccgggacttggtccggaggccaagttccaggtttggtccaagtctagggtttaaggatggatcttggtttggttccaagtacaggtgcgggtctagggtttagggtcacgttcgagtctgttctgggtcctggtccgagtacggggcatgagatctaggtctaggtttgaaatcgggttataaggtaggaccgggagtgaggtcctaggccgagtcaggtttgggtttgaagtcacggtccgagtcagaagctagtgtctatggtaggggttgggattggggtctgaggccaagtctggctctgggttctggtgctggtctgcgtccaagtctgaggttgagggtcgaggttgttggggggttttatgccgtaactaaaatctaattctaatgtaatcttatttacttatcaatagaagatcaaagatcattttttgctattgtacattgcgtggttcacatgttactttcatgattatttaattaatatataaattttttctaaattctaaacatatagttattcacaattgtagtgttgtcaccacaatgaaaaataatcatgattatatgcttcaattagtcttattattaattaggattttaaagtattttcaattagttttagctgtgttttgtgcaattttacgcttttgattattaatattttcaagtttagcattggagaagataaagcgaattcagaaaaaaaattgtaaaaagaattaattaaatgaacttttattgctagagcaccgagaaaataattcaagaaagaaatctaaaagatctggtgcgattggagcttctaatgttggaagattggaatgtgtggagtagcccctcaaaattggatttaagtgttaggatgctaaaatgtaaaaatttggcaacaaggtcatggaacccgtaattcttttctgccaaaaattaggctttgagtgcaagtagtgccacgacccgctatggaaaatttagaaaatgaatctcgtgctttaaagatgggtcgtgacactacaagtgagtgtcgcagctcgcctgttattatgaagacaattagggttttgcccctagcacaaagctatataaagacctctttttcaacacttttcaggagataattaaggagggacaaaaattgaagcagaaaacggctctgaagacttttatcaacatttttttaacgagtacatttcttctaatctttttctatgttcttagttaattgttataaaatatttcaattatgatgagtaactag

SEQ ID NO: 232314 - DNA, 636 bp, Cannabis indica
ataattaatgcttaattaatataatactgatattttttaatggtatgattattggatttatatgaacataatatataataataaaattatattggaataaatgtaactataatttggaataaattaatttattttacataaattaatttataaattatatttttttgtattaagatatatatattggtatacattcttaagacggaacttagaaaatgtataactaattacaattttaaagttattcttatttataatttgtctaaattgggactttaattttttataataaattagagattattcttgaataaaatatttttatattattattattattatttgtggtttttttaatatgtacaaaggttttaccatgaatattgttatcggtataaattgtcggctactttttatatgtcctcgttggaaagaatcttataccgaaggactatctaccgatgacttgtgctcagtaaagatttttaccatagacattttgacctataccgagaacaaaatcctcgttaaaaactttgttattttttgtagttatgtactaacaaatattaaacttgcactcgtctttattcaccatatttaaattagtacaaagaaataactatcatttatttt

SEQ ID NO: 232315 - DNA, 1020 bp, Cannabis indica
tatggttttggacactttaaggtgtcaataacaatacttttcaatcacttcctacaatgacaaaaacttatatgaacttaccatctataccaaaatatatcccacacgaaaagtaaattgcgatggtattacaacccaatatcaatttgtatataatataaaacataataatagtatatgataattaggtgtgcatacctgattaatccataacaattaccttaatttaataatgtaatactatcaactaagtcttcctctttaggtttctaaaacagaagcagttttaaatctatttaattatcaaaagtatacaattgtgatggatttagggagaggacttagctacataacccttgttggactggtcctactcatcaaaggcttcagtcaactagaatagtccacacttctgcttcacctagactttacacacacagatgccactacaagaaaaggtacttttactggcgcatttggtcaaatgcgccggtaaaagctgacgggataaatgaaatgctgaatttctactttgattcagccataacttattgcaccggcaaaagttgttaatactggcatattattaaatatgcgccggtgaaagatcaaaaatgaactgccaaaaggcgcgagaatgtttccacatccctttagcttttgccggtgcaataggtgcgctggtaaaactattcgcgccaatgtgagaaaaagcgcaaaccttttaccggcacattaatacgctggaaaaaatatatcaaaccaggttcaaagtgaatttaggtatctgtttatacctgcatttaagttgcgccgacgcttgttttaccggtgcatttcacctgtgcgccggtaaaaactctattaccaaccaagatttgctaacatcttttgccggtgtataattgcgccggcaaagctttgtcggcgcatttagtttacttttaccggcgtatttttgcactggcaaaagtaagtttcttgtagtatgctaagggtgcgtttgggatagcttttaag

SEQ ID NO: 232316 - DNA, 771 bp, Cannabis indica
cggacctagccctagacccaaacggagaccagaactcgggcccacacacggtcgtgtacctagactgggaccgagacccgtaccggaacccggacctagacctagacctcagacccgataccaaacccaaactcaaacttagatagggatccagatacaaacttggactctaacccaaaccttgactgggattgaaacttagcacatagatctggatcgagaccgtgaccaaacccgaacatggacccagagcgggacctaggacccagacctggatggggcacctggacctaggccttagaacctagacctagatcgaaactcaagactcggacccgaacatagacctagactcgaacccagatctggacctagaccaggatcgaaacctaaaccccgattcgaaccaggacttgaaccccgattgggtcctggtctcgaaccgggacctaggactcggacttggatgggggacctagacccgagacacgtacatcggaattgggaccgagtcccaagacccaaccccaaacccggacctaggaaccagtctttgatgggggaccaagactagggacctaggcctcggaacccagacccaaatctaaatctgagaatcgcacccgaaccaggacctgacctggacccaggaatctgaagtcagacccagacccagactggaaacctccctttgacccaaaccaggacaagaacctggacacgaacccacaccaggccaaacctgaacccgaacccgaacccgaacccaaa

SEQ ID NO: 232317 - DNA, 761 bp, Cannabis indica
cgaaactgtgctcaaccgttatctagtaattttttggccaggaattggggaggttactatgacaaggttgtaaggagactttttcctactattgacaaggttgtattcacacgttctcagttttggcttacgtgggcatgccacgtcaggtggaaaaaatttaggataatgagtacataattagcttggtaagattgtaagcttactcattgtgctctgaacacacatatgattccatatttaataaaatatgccttattaaacataattagatttttgagatattatactttgattaaaaaaaattcagaacaaaagactattaaggcgaagacataggtcttgaaatcacttaagacacatggaagacctatatctcaaaaatcacttaagaaactgtgctcaaacgtaaacaatattattgatggtgtgtttgaaaagatcactctgaagaaatttcttttgccgattgggattgatcaaactgatttcgataaagcaatccacaaacagacaacaagcatgcctatgaagactaatgaaaaaagtctttgtgtggacaaagagacaaaaaagaaggataatagcagtgtagttcaaaggaacttatatttccagtaaacatttccaatatagactaaaatagtctaacttttaagaaccgacctgcaaatgatactaacttggaggttctcgctctttcttccgttaggataaaagacaatagatgtggatccccctcattcaatattaaattgcgc

SEQ ID NO: 232318 - DNA, 1263 bp, Cannabis indica
gtttatgaatataaggttcatggaagacccaatatccacaaacttgataatggtggttgtaagattcttgggaacattacaccaataaaaataagaataaataatggtctcttcttcttagtaaatgtgtatgtcagtggcgatggaataatggatggtgtgatctagaattctagaaggcagtccctaaaccctagcctataattgtatatataggcctaagatttgttagttatcctccacaagtcaaggtatctcacttcaaaatctttatgttaatacaaaataatgaataataaatgtaaataaatataaatctaggaaaagatcccaaatttataggaaaatatcccacaattattgggattgtcgttaaatttagtaattcctctattgaagttccttatgtggcattatacttcaccttggggaatggaaaaatttggagaggagtgtccaagggatgtcacttctcggctaggaagtcgcaaatgttgtgtcatagtcctttgagaataacagaattggagaggagtgacaagggagtatcacctctcggctaggaggttacaaaattggagagtgacaagggatgtcacctctcgaccaagaagtaaaataattgaagaggagtgataaggtagtgtcaactctcatctagaaggttagataattggagaagagtgaccaaggggaagcacttctcggctaggaagtcacacacaattggagatgagtgaccaaggcaaagcacttctcgactaagaagtcacacaattggagagcactgtctaagggcttaaaccccttggccatgatgcctcataggttgtgtcatagctctcccaacaccccttgtggtccccacatagcacaacttagtaattcttgagtaaagtgtgctagcctattttgtgagttaattttgagcctgataacttcagaattgtgtgatttccatgcgacatacttagatcctacttgaaaagatctttaaaattaaagttgaaccaagtcatttagtcaaaaatttgaccactgccacatcgtagtggcagttctcagacctgcatgttcctggacccttttgggtgtattttgacttttttttttacgaataatcatattttgtttgtttcggggtcccaaacctcatctcaacctttgaaaccctaattggaaatcactgtcatcagtcggtgccaaaagacgacagtgctaggccagggctattaggaaacatttgatgatttttcttgccta

SEQ ID NO: 232319 - DNA, 815 bp, Cannabis indica
cgacgtgaattatactttttgtagtagtgattatttggtttcacatgtttcttggggtcatccatgatgtaaaaggatatactatgtattttatagatattcctaataatattaaataattttcatctaaatcttgttgttggtgtgtatatgtatatgtataggagattgcataaatctatctactctaatcacaaccaactgatccagtgacaactaactgatctaatgacaacaaactatcaaacattggatatatctaatattatgatcagcttaggttatattttcgtttgctttaaataattcattagattttatattgttatacttaaaatatatacatgcttatatgaaaatagattaaaattttacttaattttttatttctttaaataattttttaaaaaatcatttatgtttatagtaagggtcctaattttttttttttttttgcctatggcccattttaattgaggatcgaacctgcacatatgcaataacacttggcgggttactataagtcaatatttttattaaaaaaaatagatattatggaggttattctttagtgatcccctcttatttctagtgacgcaaataataggacaataacacctaatttttaaagtcaaaccaggcaaaagcaagtacaagaattaagaaaaattatttttcttacttcaatttcgttgtaacgtaagcgctcacaacactaaagcgtttggttgggaggaatgaaaatataggaataggaatgagaataggaatggaatggaataaaatttaaagtgcataaaaaaaattgataaaaa

SEQ ID NO: 232320 - DNA, 784 bp, Cannabis indica
agggtcttgagtagaaatagcttttagatcctgccataaaatcattctaccttcttcatcattaaaagcataaacaaaagtaacaagaaaactcataccatctaaagtagagacttgaagatgtattaattgacttgtacatttgattatattgatgctgaaggtattaggattccacgcaactaccattctccctcctttatgccatgctatattactagtaaagcaccatccattaaaaacatgagagtacaaggaaccaagttttggagccttgactcttgtctcaaggagaccaacaagccccacattttgattatgaatcaattgcttgatcaaattttgtttgtgaaggttgttggctccccggacattccaagctaatattctatccatttggatagggaggcactccccctcctcttgtcttatctcgagttgctgctagcattcctatgccctcattttctttagattctggttcctgtaagagaataaaagtattcctggtgctggtgctatcggccgttgcagtaccatgaactttcagacccttgtgaacttgtttaaatccatcattatcctcaagtaccactggtttctttcccttgtgacttccagcagctgtaacaggatgattcacaccagaattagtgtttaaattcacacaagaattagttcctgctgttgcacaaccatctgtatcagccccagacctcacctcaatatcctctttcgattcacccttaacccactactgtttatgagcagatggtttcctcct

SEQ ID NO: 232321 - DNA, 642 bp, Cannabis indica
ttcaatcctaagcgcggattgcgtcaaggagatcctttgtcgccattcttgttcattctttgcagcgaggttctatcgaagttaattctaagggcggaggctaatggggagttgagtggtgttaaggtctcgagagatgcggtgcctatctcacatctcttttatgcggatgatgcaattttcttttgcaaggcgaatggggggaatgcggcagctcttatggagtgtatttcgcggtatgaacgctggtcggggcaagaggttaataaacagaaaagtggagtaatgttttcgcctaacaccccgttgagatgtagggaagaagctaagaacataatgaacatcaacggccttagtcattcagaaaaataccttggcaatcctttcttcttttcggctaagaagcgaaaggattttcacttcattaaagataaggtcaagggccgacttgaggggtggagggcgaagaatttgtctcaagccggaagaactactttggttggatcggtgttgcaaagtgtcccctgctatgctatgtcaacggctttggttcctaagactgtttgcgatgagttggacaggatcgtggcgagattttggtggattggcaattcggaaaaacagagatatcgttcgtttaag

SEQ ID NO: 232322 - DNA, 1246 bp, Cannabis indica
ttagcgtcactgtagtagctgacgctaattattttcttttaggttcagttatcagctgaagtataaaatctctacctatttttttctcggtcagctattttggtaagacgcgttgactgacgaaaattgggcattttgtagtagtgtatatatattgttcacatatttttcttgttaatggatctaaaatgattgtaagcgagcaagatgaacacaagttaatatcgatcacaaataaaccggtttatggaaaaggaatttaataaagatgaactcgaggattttatagatgttcacccccttttggcgataataaactaatccacttgagttgttattggtctcaatgcttgaggaaagttctccagaattatcttctctaagaattcaatcctcaagtaagttttttaaaatgagaaagtgagagttcatgagaatgagttggattcctttacaattgatatcacatttatatagattttcatctaggactctgttaaggtttaaaatctcttaaccccaagacgtacattcccctaactatgatcgagttaggtttaaaatacaaaatgataacaaaatcatgtttcaaaataaatatttttttaaaaaaagataattgtgtaagatatctttatctgcacgtgctagcttattttcgtcactaagagcacatgcatgttgatgaagaatacacactgagatgagaaacatcttggcttgggccaagatgatgtagggtgtgcatctcggttagggtcgagatggtgccttgtgacgagctccaagatggtgacaatgttgtgatttaggctaggattgagatagtacctaggtgttgtgatctcggcttgagctgagatgatgagtttggaagtgatgccaagataatgcatttttaggttatggcgttggagatgaaggtgaggaggctaaggtgatggtgtggtgagggaggttaaaatgatgtgttggagttgtcatcttggcttgggccaaagttgcatgttgaggttgttatctcagtttgggttgagatgatgactttgtattgagatctaagcttgggccgagatgaagcctttgatatcgtgccaaggtgatgcataaggaaggatgtcgaggtgatgtgatgaactaacgagacttggtcgaggttctcaaaattatattgaggtgatatgatcttccccacatttaggagaaaaattaatgccatatcatccttcgattttcctagggataa

SEQ ID NO: 232323 - DNA, 1365 bp, Cannabis indica
aaaaagaacaagcctattaacactaaaaagtccacaacaaccaaactgaagacaagaaaaactacccaaacatacagaaaaaaatgataatggaattagatgattttactattttaaaaagacacacagtgatcagcttgaacaaaaataaaagaaagaagcaacaaaggataccaaacattgaagcttagctagacccaaataagacacacatggaaggcatcacaactagatttaggtagtaaacatatcaaacaattgtagttcttttatcattttgccaaatcacatatatgctcataaaaaaataaacattgatatcgccattagtgtgtgaagtgacctcatgtgagcaatcaagagattaatcaaggaagaacactcatctctctagagcaaaggccaagagaatagccaatgaacatttttttttattttgtgaaaaaatatctttcgaagatatctacactcaatgacttttgtcaaccagttgcggctcacgctcccatagagatgtagtcgtcaccccatggatttttctcaataactaacaagagaaggaccaaactacttgagtcacatattcgtacaagggtagctcttcccattgcatccatggaaggtagccttctcaactggggtgacacaatattcaccactttacacgagcaattcatctgtgatccgactcaagaacaaacaaacaacaattgaaagattaaatacaaccacatgcatagttgagataacaactagatgctactttgtccaggttagatggtgcacacaccaatagaatttctgagatgagaaaaagtgtgggcattaagtgcttttgtaaatagatcagcaagttgagcacatgtggatacatgtgaaatagttaaaaatttagattccaccatctctttaatcaaataatactgtatatcaatatgtttagtaatgtcttaacacataaggcgccacacgtgtgctttaaaaatcagtttataataataaactaacagtctaagaaaaaaatgaattaattaaaactttagaaaattaattaaagtataacttaaattttatctcaaaatattactagattcgaggatcccattggttacaaactttttaccaaaataccactgtactagtttgttaccaaatattgttatatactcaaaatattactaaagacggatcctgtcaactaagcacagaggacggagaggctgatatgtacatttgttgggagacctcttactcatggctaatccacttttcattttcccttacctgcaccacaaagtacccgtgagtcacaaagactcagcaagaaaagcaggtaaagcacaaacatcatgcataaagtactaa

SEQ ID NO: 232324 - DNA, 1244 bp, Cannabis indica
gaattttcagatatttatcaattgtacttctacattaacatatttatttatcttataattacattttatatgttttataatatattaattcattaattacttacttttagggcataaatcccaacaacccagacccggacctaggacttgaatcctaacccagacgcggatgctgacccaaactcggacctagaacttgacttgaactcgagattgaacttgggacccagacccgagacttgaactcgggacccagacccgaacctgacctgtagtcggtgttggggtcaagtttattgaaaatatattataattttgcataatttattaatacaagtcaatatcaaatgtagtgttgtattaaataatactaatacaatataatataacacaatctaatataatccaacacagtaccctacaccccatggtatttgggatcacatactttaaaattcaataccctagaccccatgatttgttactctcaattgtgtgtaaataggcttaaactggttatttagagattatagaaactattagaaagcatcctcaatattcatataataaagccaaataaaatagcaattggttgctagtcaccagtttttttcaacttttgtcaataaccctctaaaacattcatattcatttccaattgattttatatcacttatacatattataagtgataaaagtaaccattcaaaaataaataatagaaataaatccccaacatctatatttttattataactttaaattttaaaggattaagttgtgtaacctctgtttacataattaacgataatgtaaaagttacaaattgtaaataattcaatctcataagttataaatatttacacttaattaatttgttacattatatatttaatctacacattatattaattaataaataaataatataacaatttttatatcaatggtgttgtgctcaacaaaattgaatgaaatctctccttgctcacaatattcaaggattggagatagagcattggacgaattctttggctaatacagttaagataaatgttgatggggctatatttgaagcagctggttcttttggctttggttttattgcaagagactctaacaccaggccaagttttatctgagattttcaaggcaagtgggatcaaagaggccctcagctggattaagagtaaaaactggcaagatgttactcttgaaacggattgcatggtggctattcaagc

SEQ ID NO: 232325 - DNA, 1576 bp, Cannabis indica
atggtcaacaaattaaatgaacacactcgttgactttgaagttagattaaaataattgcacagctaatgctccaattgataaataaatgcatgtgcgtataatatattttacaaatattatatacaataattgctaaaaggtgtttgtagtgttaaacgtcttcctatatgtcaatatcgctattcgtctaattaagtattaagtctcatataatttaatgtaataatttatctttaactaatctcaacgtgacacgtctagaaataagtactacctacgcacattaatgtcgaataacaatgcttaattgcttatatatgatcatctcctttgttctttcaggctactacaaaaaataactgcttttagtgataattttttaatcataacataaatatttcgtgattaaatataaattttagtcacaacaaaaaattacttgtgatctaaaacatcacatttagatacaagttatcactaatttaattttagtcacaacaagtattgtaattaaaacatatttagtcacaataaattataatttttataactagcacttttaatcatgaatattttaatcacaacataaaaataataatttataattagtcacaaattttttaatttaaattttcttgtagtgagttataaaattaaaattatcctctttctctttctccttctccttctctctatatatataaatatcctctctcattttctctttcattttcttttcttaagagaaagaaactaaaagagagatcatcataagattatatgttatgggaactatatatgatgaagatgaagtttcaaacaaaaacattaatgcccacaaaactcatgatgatcacacagatcaactagatgctggtgctagttttgttcttaaatccaaaggtaattatctattataacacaattttcactcactttctataagttataacacttagatcttcatgcatctttcttattattattttttaggatcatgggttcatagtggatatcatttgacaacatcaatagtagcaccacctcttctaagtcttccatatgccattggatttcttggatggacggctgggatcatttgtttggtcatcggtgctttggtcactttctattcatataatttaatttctttggttcttgaacaccatgctcagctcggtcgtcgacatcttagattcagagatatggctcatgacattttaggtaactttataattaatattctttttatttaatatatatatcatatatcttttacattttctattatcttatattatatatggttatttcgaaattcttagtttatttgattttttttttttaattttttcttttgttaaagttaactaatattattaaatcaattaatattaacttatcaataaaattagataaaaaaatatcaacaaaattagataggtatataccattttggaccatctgttttacaaaagttaccaattggactttgtattttgttaaatgacaaaatgaaccttgtattttctaaaatagtacaaataggaccctgaattgattttttgtcaaaat

SEQ ID NO: 232326 - DNA, 705 bp, Cannabis indica
ggattgggttgagccgccaactgggggatgaacatgaaaatgtgcgcccacaaaagacggaagactgggccagaatcgccgattgttcgaaaaaggaaggaggtgacagaggttatcgtattatttagagatgtaattgaattttatttctttttactaacctaaggctataacgggaacaaaacttagaaaagtgggtataaatcaaagaatattaaaaggaagataaaaattaaaacagatacaataaaggagttatagagtataatttcctcttttaaaaattgatcataataattatctaggcaagcaagcagccaattcattgaacatttgaagctgagtatccgatcctaaatcttgaaattaattcatcaattgatgatattatgcacttattatacaacaaccccttagagaaagagccaagcaaaaggaaactgtaggagaaatagaattagttttgggctctaacagaatttgtactaattattaattaggtattaggttatgagtaaataatatgaaaagtaattaactttataagtaattaggtattggttgatcgattatgatcgagaatgaaaaatggtattgatatgaatcttaagaaacttctggtgtttatttaattattaccagcgaaaaaaagagaatctctaatactttagtgacaagtaaacacaagaattaagccatgttttc

SEQ ID NO: 232327 - DNA, 798 bp, Cannabis indica
aaagagttttatttagggcataaaacccaacaccattatcatccttcaaagcattaatttggttgttgtgtttccgtatggtagccgctttgtgaaagtaactactgttctgatccccctcccgaagccagaactgtttagatctctgcttccaataacactctctctggtcgatagctctaaagagttggtcttttacttccttatattgttgaacagaggcactatcccttttatcatgcagagactttaactgagctttgtaactctttatacgatggtttaaggtccctgttatttcttttccccaactactaagcttctcggcacaaagggttaattttccagcaaaacaattaacctcgtgactctcccagcaatctctcacaatttccatacaaagaggctctttcaaccatgtgttttcaaatcgaaaacggcgtggagaaataaacttgttacagacaaatggttcaaggaatatgggggaatgatcggaagtagtaacctctaaattagtaagagtagcattaggaaaaacctggtgccaagaagatgtaacaagtgctttgtccaagcgaacttcgacccaattgttagtccctcgccctttctcccaggtgaacgggtgcccttgcaactctaagtccgacaagtcgcattgttgtagcatctgattgaaaccagtgatcaaactttgaggataaagccggccacccctcttgtcctcttgtctagcaacattgtttgcatcgccaataacacaccatggtaaccccgattgccttgacaaagttc

SEQ ID NO: 232328 - DNA, 946 bp, Cannabis indica
aattagtaatctgattatattaaaatgagttttatttagggcacaaaacccgacacctacttcactgcggatgaatatttatgatattcaaattccactagccattgataattcattaataacaaaagttggtgaatgtatatacttgtagctagctaaaattaaaattttaattatttaattacttactagttatatcatttatatgagtaacttgttagtaataaaaatatatgaatatgaatgaaaaaaaataactaattactagttagtaaaaaaatataaaaacacataaatatgaatgaaaaaaagaagttaaattcaataagtaaattaaaaatataaagaaaagaactattttttctcatttatttttttaagaaaaaatagatatacatatataataaattatatcttacactaataaaattttaaaaatttaatttctaaactaattaaaactctcctatcttattctcattcacaatattaaaaaaaaattattagtttaaaatatttaatatatgcatatacaatacttagaatgtatataatataattacaatatttttataaatacaatacaactacaaaatatatatgcacacaatacatattcaataaaatataaaatatatacgtatatactattaatgtttaaatttttacctcataccgcaatccgatgaccaatgccgacaaaaatccggccactatgcacatgcacatgcacatacacatcaacataatcttaataatagagaaaaagacttaaaaaaaaaattaacaaaaaacgaaaaataaaagcattgtacattactaaaataaatagaaattatatttatatcttaatggatgttgagatttaatattttctccactaaaattagtggccggagttataaccgccacattatttcttggtttcagtttacattgaaagcag

SEQ ID NO: 232329 - DNA, 1271 bp, Cannabis indica
cagctgctgaactcaaatggattaaatcattattgtctgaactttgcatccaacttactcattgtcctatcatctgggtggacaatcaaagtgctactgccttagctgctaatcccgtgtttcatgcccgatccaagcatattgaactcgatttacactttgttcgtgaccaaattattgcacaacaacttgctgtcagatttgtaccttctgtggatcaggttgttgatcttcttaccaagtcgttgtctacagatagattgtttgaggggggatgttaacaactaattctgttatgttagttttttttactgttttattagttatctgttaaggtagtaaatagtttgtttttctgttattaatcttttgtaacaaactctctgtatatataaataaagcctctgcctttaccttgattagcttttgctatgctaatcttggtctttaccaattgctctttcttgttctattttctctctggtttgtacttgtgttcttacaaaatgttcaaccttctaattttttcttcaattgcattaaagttggcaagaatttcaataatttgggaaaaacttagatttattggaaaaaagctttctatcccttcaaataatattagcagaggtcattaaattcaagttgaaggattattacagccatactaaattctaaatgaggtaattgaaagcttaaaattcacttttattaatattatgggtaaatatgaatttgggtgttaaactttgtttatttttcatcttgttcttaactttgagtatgattcacacggttcaatttgaatcatttgattgtttcacttaatgaattatttttgttatattgtaatcaattattagaaagttactataagtaatactgcaagagttgctaaattgattgttgtattttattattatttctatttacataggattgttggaagtgtttctataggtgttgtcaaaatagttgttgtattcaatcatttgtttttttttaaaaatactgttgtttgaagtactggtatcaagtttgctgaatttctttctttgttctttgtacatatagttgttgtaagtgttgtgaaaatagtttctgcattttttttttttttacaaatggttgttagtaagggttgctaaagcagttgatgtaagtgttgtgaaaagggtttctggatttatttttattttacaaatagttgttagtcagggttgctaaagcagttgttgtaagtgttagaatgttacataagaaacaaacacatg

SEQ ID NO: 232330 - DNA, 949 bp, Cannabis indica
cggaggcactaaacaagccttgtttattccccaaaaaacaaggcttgggggtaaatgttgcccttcattttgcccaaaatacgtgggcctggataaggacgacacgtggaactgagaggaccagcttttaaagaaatcatctaagtcttagacaacagaggagcgcctctgggaaggtgcctcccggaggaggcatgagaaggactttcacgctcccggaggccaaggacatattaaggcagttccgagaggtactggactctattgaacaatcacctcgcatttaatgtcgcatgggggaagacgtattgaaactaccataaaagatatgacagatggcgtaacccccctttctcaactattatactatgattaatgaggctagtgacggctactttatgagaaatcacatcaatccaaaagggataaaagattatatccacctgacccctaagatatctacggtataggtcatgtatttcctatttcgtatctgctgggaatatgtgcccctatgaagcctgcacagaaagacaagtgattcattcctagggatcaccccagaacaacactataaataccccacaaatacactgagagaggggtcaaggattctcggttcagaggaatcaaagagagaaaataggagaaaaagtcaccaagaacattctctgtaataaagactctcattaataaaaaagactcgtggaccaaggctcattaatgcccctaccacgtaacaatctcatgcattaaacttcctacaacctttcctatatatcatttaatcagttaccaaaaacctcagttgacagagaggaatttaaccttaatttaaataatttttattcattgaataggctcaatactaattggacctaaataaaatctatcatatgtgacaattttatttagcaacctagtcctttttaattacaaaaattaaatg

SEQ ID NO: 232331 - DNA, 1415 bp, Cannabis indica
aaaatcctggtgatcacaaggagatccacctcccaaaaggaaacaaaaccacagctaagatgggacacaccccacttagcaagaacataaacaataatgtgtctattattgttcttgcacaccaacataacaaacaagaagaaacgcttcaaattaaaaatcatagtgcgagtcgttaataaataaaaatagcagaacactttattgataaaaatttataaaataaacaaaagagcttaaaccaaataacatagataatgaagaccattatccccaaaataagaaattacacaaaagccatttaacatgaccacaatattgagattaataattaactgaatcatatattatattggaaaagcctcaataagagaagagatagcacccttaatagatctaactttgtatcgagtgaagcctgcttggtgaagaacgtaaacccattgatccaaggtcctctctttgcctttgttggtatgagccatcatcaccatatcaagaaacaaacccacatctttaaactctaactcatctttcttcataccattattttgctctttgttattattttcaatcacagattcaacaattatcactttccctttctctgaaatagctcccctacaattctttagtatttgaatacaatctttgtcttcccagtcatgaagaatccactgcatatataaatccaatattaagtactgatcagtctaaactgaaattttttatactatatatatatatgtatgtataagtacgtaccataagaaaagcagcatcagctttaggaacagactcaaacatgtcaccaccaacatggacaacacgatcagattttagcgcaacagacacaacatggggaagatcaaaaagaattccttccttaatccaaggacaacccttaaccaacagctgcatagcggttccatttccaccgccaacatcgactatgctaccaacaccatcaaacacctccaaacaactatctaatattgcagccactgtgaccctagcattacaggccattgcttcattcaagagctggctgtgttcaggattggctgccgtgtagctccataaatcctggccattcgcctcctcaaatggcatcaaagaattatcagttacttccgccttgagacgggcgctaaggcagtgccacggcgccagcataggcttactgctctccatcaacacaaaagatgccatgcttctttgtccggacttgatgaggagtcgtgagagggatgtttgtacgtatagagtaccagctccttcatcattaacgatgtcgtttttgatctctttgaatattcttcggttcaccaagaatctcatgatgcggtgaatgttgtgaggagtacagcctaaggctgatgataactccttgagagacatggggcgtccatggc

SEQ ID NO: 232332 - DNA, 1090 bp, Cannabis indica
atccaagcttgcataggctatacctggtctcttgtgtttagtgattagattcaatggattgaagacatggacgaaggtgtttgagccaaaattattacagcatgttgttcagctactgtttaccatatttggttaaatagaaactcttgtgtctataatagttgctcttttagagtgaataataggataaagaatgatatattgtacagtgttaatagttattctaagcaaaaatagaaagagcatgagaggaacttggtaaaaaaaatgagttcctgcggtttgttattgatgctacatgtttggagtgtttgtttgtttgtatcgtgtctgtgattaatagaaatctattttcttgataaaaaaaattgtaggctctaaaaatatcatttttatacttgttatctgtttcgacatctaccaaaacttgttagtctaattttattttatcataattatgtacattgtagttatttaagatttacttaattttttttagaaaatttctaaatagtttacagtgtcgaaaataaagttcaaacaattacataccatgataataaaaaaaattacatatgaaataaaatatttgaaccttatattccgtatgtgttgtagctattttggaccacatgtaaattttcagattattcaaatagtttacaatgccgaaaataaggttcaaacaattacttaccatgcgtataaaaaaacagtcacgtgtgcaataaaatatttaaactttatttttgacaatgtaaattattcagaattttttaaaaatttaccagtaatcgtaaataactataatgtacacggctataaaaaaataaattaaaaagctctcctatatatcgaaataaataaaaaatctactaaaatatttctttaagatgatgtattgcagacttaacctttaaattacaatagtgtacatagtatttatacaattattaaacttcaatcaaaatttagttgcaagtaaaaaaaatacctactaaagtttctctctctctatgttttttttctaattgaggtgatatattttttttttgtttgaatagaagaaatctttattaaccagaaactt

SEQ ID NO: 232333 - DNA, 1895 bp, Cannabis indica
tgaatatgcttataagtgtgtctaaggagcaatttggtcatttgaccaaataatgcatattcaacaaaatctgattttggcaaaattagaaaacattttttcgggtttcacttctccctagccacatctctctctcaccctctccattttggtatttcaaaataattttggaaggaatagcttgaaattttgggtgtggctttgtgctagttcttgcttggagcttgatgaatatgtggtaaagatttttaatatcttttgtttatgttaattttgatatttgaagcttcataattgtgtttttggatgttcttaatgttctttgtttgtagatgcatgtttatgaaaattgaggaaatttttgtgaatattgtatgaatgtgttattaggattttggttgattcatccttgttgttttgggtggctttgaaatgttgaattaatgtctaaattttggaaattgctttgaatttctgggtgaagctttgagtttcaaagcttgtgaaataatgtgcaatattattgttgtgtagcatgctttgggtatgttttggctttgatctcgagctttgtttaaagcttaagttcttgctaatgttggatatggatggtgtggaatagaactttaggttaggagtggttttgcttgagttttggtatgaaattggttgattttcgaagctgcaaaaaattggaaattttggggtttcagagcccgtcgctgcgtccatggcatggctcgctgcggtgaggctctagcaggttggagctaccgcggcgaggcccttattttctatgggttcttcatttttcttatttttgccataactttttactcagaactcatttttggacgttcttggtatcgttgaaaagctcattttagactctatgtgttaatctataaatggaattcagattatgtatatgtgtaaaaatgaatttgggattaaccctatttgtgaaatatcgggaatgtgtgactaggattactggcgcttgttcaggaacacccgaagatttggaatctctacatacttagatcaccaagtaagacagtaacctagcacatagagtttagtgcagtaacactcatgtatgttatgtgagaaactgagattagggttattaccctaagtttagcagttatgtggtttagagttattactctagaatgtaagtgaatatgaatgcaatgttataatgtatatgttgatataaagaattatgcggttaaggaaaaattagattagacttggtaatcagaaccaagataaactattcaaagaccttattgtaaatagacgtgtgagcgtaacacgtaggtctatgtcaaattaacaataggtgcaatggcatcaatatttatgtgatttataattaatattcatatggttatctatattgccttactgggccttggctcacggatgctctattgtacaggaaagggtaaatttgttattgatcagccatgaggttgagggcttttgcagtgtattgtacatgttcaggtcaagctagaccacgaggtttgggtctactcagggaaaaggttataatctccacctttgctacttaggtcggcgtgtataaataacttgtaatattttgaaaaaaataaatttatgggatcccaatataaaatgtaaacttctggatgtttgtaaagtttgtaaattacaagttattattttattctacattttaaaagtttaattttcgctcttagctctagtagattctggtttagtaggattagtttatatttagtcgtagcgcgtgatgttcctattgttagggcgttactatttagtatcagagcaccaaagtttttaaacttcctgtaaaccgattgaacatgtacatttatcatcaaagacaagctcgactt

SEQ ID NO: 232334 - DNA, 1359 bp, Cannabis indica
actatgtcttatttatggattttcattaagcaaggacttaattataaaggaaagagttttaaagtttatttattaattgagagactttgtaaggtctaattaataaataagttaaataaaaattttatttgataattaattataattattaaataaataattttgatatttaaatgattgaaattaaaaagtatggcattagtgaaagaaaagataaattgttgaataaaatgataaaattctaactagtggggcccattgtatggccggccacataaggagtaattttagccaatttttatctttttaaattccatataagttaaatctaaccctaggagaaattctatacaaggaataagatggctctcattcacatccaatctaagttaactaagtttttatcctttgtcagacaactagaaacttgaacttctatagatttcaaattctctctctttctcttcataattttcaagcccttagcgatagagtacatgcccactcatatcaagtcaagtactcaatcatggtgtggaagactgtggaatccaacacgtgaaggagaaccagactcatatcttgttattactatgcgacagaaaggaacaagggtcagaactctaagtggaaggagacattattctgctgccaccaatgtaacgttttcttaactttatgtgtttaattctattattttagagaattcatgtttagggtgttaaacaacatacatgttagtaaatctagatcctagaaaaataatttccaacaattactccactattagtagtagtttaattgttcctgctggtgccactccattaccggagaaaccatagagcagctatttgcacgactctaggtctttgactaataggtattcatatttttagcaaattgtaattccaccaccaagggattgttgtggggtagtgaactgttgggttttccccttttgttggaccttagaccaaataagggcactagcccaattaaagaaacaacaattaaaagaaagaaaagaaaaaggaatggactaatttagttcttgtcgtggagaacaagaagtagcagccaagaaaatgaaagaaaaggagaaacaagttagagagagaaagtgagttttgctactttgcattgaagattaagtggttaattctcattcattttcgctcaaattttaagtggtgaatcctggcaaagtgctctacagatctaccagtttcaatttggcgattatcctctctaaggtgctgtaatgtccccgcttcaagcctccattgggtccttacacccacaggataatggatcttatacacgagtacatcactttggctgcttcatggactgatgact

SEQ ID NO: 232335 - DNA, 791 bp, Cannabis indica
  modified_base (779)..(779): a, c, t, g, unknown or other
gcgaggagttcatgtcgaaggttgagaggactccctctgaggaacttatgcctcgctctacagagttggcttcacagtttttgactatgttctcgaaggcctttgttgccggttccaaggaagtcgagcttttaaagaagcaaaatgtccagcttcaggagaacatcaagaagctgaagcaggaaccgactaacaaggacaaatagctcgaggaattcagtaagcaagccaaactcgaagccaagaactctaaggcgaagatcaagcagatgtctcgcgacttggaggtcgagaaggagaatggaaagaagctgtatgaccaagcggtctctgtatatatatatatatacaactctttcaaaaattctagattttgacttctcgatcctcggggcagaggcggctgagatggctgaggcttttcgagctatgtcacctacacagacccaaggaggtgggggaaacctttttcccgaggacgttgatgcttcggacactgaagaagtcgtggacgaggctgctagtaaagtcaaagatgaatccattactccaactgcccctactgctcccaatgcttagtttacttattttatgaatattttgccaaactttttaagcggtacatgggtactcgcgatttgtactgaaaaaaaatttctttatggttttcaatatttcgaacaacaatatttattatgttatcatattcacagtacaacgggtctcgagtcttttgctattttgattgcgtttattatttcagcttggtgtaaaaaggntaaggtgaaatg

SEQ ID NO: 232336 - DNA, 4441 bp, Cannabis indica
tggtaattcagttgatgacttatgtagtgtatagtcccatttgttgttttagaccccaattgttcatttttgtaatccttttcgaaaattatgttttgcaggtcaaaatactcacgttttactatctattttaatcaagcatttagatcataaaaatgttcttaaacatcccaatatgcaactagatattgttgaggttacaacttctcttgctcaccaagcaaaggttgagccttctgtagaaataatcggtgcagtaagcgatgtcatgagacatttacgaaagagcatacattgctcccttgatgatgcaaatcttggggaggatgtgatcaagtggaataaaagcttcaaagaagctgtggataagtgtctagtacagttgtcacataaggtgaattcacttcccaatttcaactaactcttctaaaatttgctattgttgttaactgatctaaaatgcaatgattatcaggttggagaagcaggccatatccttgaaatcatggctgtcatgcttgaaaacatctctactattactgtcatagctagaactactatttctgcagtttaccgagccgctcaaattgttgcttccttaccaagtttaacatatcaaaataaggcaaggataagaaatggattttcacattctttcttcaagcttttctcatccttgtaataaactaataatgtagttattgttaacatgttcatgtttttacttaggctttcccagagactttgtttcatcagctactcccagctatggtccatccagaccatgaaacaagagttggtgcacaccgtattttttcagttgttcttgttccatcttcagttttccctcgttcgttgccatcatcggtttctgattcaaagaaggcctctgattttcctaggacactttcgagaacagtctcagttttttcatcctcagcagctctttttgagaagctaaggaaggagaaattttcatcacaggaaaatgttgttgaggaaccaaaagatatcagtactggaacacttgatagattgaagtcatcttaccttagctcatacagtatgagaaatttgcaagactctatagtgactgaagaaaatagtactaatagctcaactaaagaacaggtaacatttgattttcttttccttttctttactattttagatatcctaaatcatatcatattatctcaaaatgaaaaatccatgaatgaacaataaatttttaagtttttggcggttaaatccttccaactattgtttcacttgaacttaaccctccaagcttaaattttagtggtaaaaccttccaaacaactgtattgtttgcaaatttaaggtgttatctagttaattgccaccatggactgcttgtgtgtacactcttgtacacatgacatgtttaaataataatattaggtgtaccaatataaacgtgtcacatgtacaagaacgtacacataagcagttcatgttggcagttgctaacagttcagtagtttggagtgttttaccgcaaaatttgagcttggagggttaaatgaaagtggaatgatagttgaaaggatttagctgcacaaaactctaaattgttggaaactgatctttacttggtgtggtgatccatgtcaaattccaggaggctaatgctctgaggctgagcagccatcaaatatctcttttgctgtcatcaatctgggtacagtccatctcttctgcaaacactcccgaaaattatgaagcaatcgcgcacacttatagtcttgtgttgctcttttctacatccaaggtgaagtgtgtttaactactgttgctttgcttgttgttcatgcattgcattcattggtttctgtttggcaatgatgacatgatttttcttgtcttacagaattccagtcatgaggttctagtgcgtagttttcagttagcagtttccttgaggaatatttctcttagtgatggcggtgagctttcgaaattctacaacattattgtcattggtgattatacagtatgatttcatggaaatgattaagacttcagatgcttaattgtttgaatttgtctgatctttacagggcgattgcctccatcacgacgcaggtctctcttcgtcttagcaacatcaatgattctctttgcattgaatgcatacaatattctttctcttgttcatgttgccaaggcagcaattacagaaaaagtggtatgtaaagttatgtttacattgtttttctttgaagtcattatataattccatttcatctattaactcttttgtatcaggttgatccattcttatgtttagttgaagaacacaagttaagagctgttaaaccggtatctatggcgaatagttcttatggatctaaagaagatgattgtttggccttgaagtctctttcagagataaaaatcactgaagagcaaactagagaattctttgctcctgaaatagtgaaaagcttagagaatttaactgaggtgaagttcctcctacatcattgttttcggcctttcttaacttcagaagttaaaatttacaagcaggctaatgattgttagtgtttttctttcgcagtctgagtcttcgtcgattagagaacaacttctcaccgatttcatacccgacgatttctgtccacttggagcacaattgttcatggatgctcccaaagaaatctatcaaactgattcaagaagtagtatatccaaggaggtaatataagctttgaattctgagttcacctatcagttcgcaagatctttaacgttttatctatttggttttgaatgctgtcattttctgtatagattgctccacttttttcaatagatgaagacacatttgcagaatcatttgatagtcatagaaaactaccagagttttccatggaaattccaaatcttttgagtgtaaaccaacttctagaatcagtaagctctgctctccacaaaattctcaacttaacattccttgaaagtgaaaaattctcttcactataacattgttctgtccacaggtttctgaaactacacatcaagttggaaggatctctgtctcaacaacacccgacgtgtcttacaaggaaatggctcgacattgtgaagctttgcttatgggaaaacaacaaaagatgtctggtttaataagtactcaacaaagacaagaatgtttgatgcacatctcattacaaactcaaaccaatgaagtgaaaacaacaatcgtctcctatgtcaacgccgattctcttggggtacatcccatttcccgaaacttttaacacaatgcaggagtttctatgttcatacatgttggcatacatttgtgcttagaattaccatgacatttggcttttgcaggctcaaaatccttttgttgatgggaactcattcgacgatggatgcaaaactcccattgcagccgccacgcctatgcaatgcgctactgaatcccagcataatccccacttcttcaggctgccggcgtcaagtccatttgacaactttctaaaggctgctggctgttaaatccaaagaatgaaaaaactccagcacagacattcagacaaatatgtttgtataaatttttcattttaattataacttctgttctttccatacataattcttttatttagttcctctcccttctacatgtgactttacaattgggaatgtgcagaggaatttactttccaacatgtacagccattttaaggttatgttagtactaatgagcttccatatattttgttatagaaatttttacataataaattaaaaatttgaaaaaaaaaaattacaaaaatacattaacacgaagattttatttttataatttgaaattttttatttacaaaaatacggactttattaaactgtgcgatattcatttttaattgttttatagttaatttcttgttattttttaataatttttttacttttgctgaaaaagatcgtatttttataaataaaaattttaaattataaaattgtaaataaaatatatatatatatattgtattgtatatgtcttagttaatgatggataaaactaaggagttgtttggtatgttcaaagaaattagagtaatttataatttggaaagaaacatgaatgagtggcattctcttatgtggataagtggaatttagaaggaatggctgcctacaaatattctatttactatgtcaacattttatttcaatcaaaagaaaattcacttgtacagttaatatatataaatatatatatatatgtatgtatgtatcatctaacatatcatcgtaagaacatctccaatagagtgacgaataagcgatgcattgttatattttaagatacttcaaaacctatttcgattgctatagcagcaattcatcaaaaaagaggatgaaaaagaagccctcattcaaagaaaggaagact

SEQ ID NO: 232337 - DNA, 2399 bp, Cannabis indica
aactagaaacaaagagtgaaaactaaccgaaaatatgacccgaaacttagactaattttagcctatcagctaacaaagttaatcccatttacactatgtgtcgatgttttcttttagctttaccattttgaggagaggagtgtgggcaagagtgttgaaaatctatgccattttcaatgacacactttgaaaaagcttgaaattccccccaatcggttctaagagctttgattttcctatcaaactgattttctacaatgactatgaactgagtgaaagcatgaacaacttcaaccttagttttcaagggatagatccatgtaaatctgctataatcatcgacaaagtggatataaaattaaaaaattgtgttagacatcacaggggcaggtccccacacatatgtatgaacaagatctagtggatgttgttctttactattgctcaaagaataagataaggaatgggatttttcaacttgacaagctccacaaaaggattctttttcattcattggtgattttacattaacatgacttaacacataatgtaaaactctactagaaggatggccaagtaagctatgctacttgtccttaattgaaaaagagggaggatcaacaacatgttgtctctcctttgattttgacactaaactagaaaatgaaaaactttcaacagactgtgggaaattgtgatggtgtaattgacttctcttgtgtctttccaactggtacaaaccttccttaagtgtcctttgaagaagagccctccttgttgccaggtccttcacaacacaaagaaaataaaagaattcaacagagacattattgtctcgagtcaatttagatatattgatcaaatttttagtaatatttagagcatgtaacacatcgctgagcaaaagtttactgttaacagaacataaagtattgattccaacatgatgtataggaattttattaccatttccaacaaataagattttccttaccacgggtactcagacttctgtgtcatatttctagcatcagatgtgatatgattcgtagccccgctgtctgcatattaagctgcatcatctaccatgtctggtgtagcaacaaaagtagcagctccttgtgtactcttgtttgagttttgagatccaaaatcttgaggtgaagaccccataaaagtctcatcatacctattgtaaccgtaggcagatgagtgaccataacatccataatcttgacatgttggctttgagtttgccccactgcaatctccatgacctttgcctttactttccaccttgtccaccacctctgtaattaccacgattttcagatccattttggttatggttaggtcctcttccaccttgaaaaccaaatggtcgagttgtggcaagattcgcagatggagatggtgaggagttactagctgcaatcttgtttatgcctgaagtagcacttaatcttttgactttgctatcaaaacttagtaggatatcctgcaattcttgctaagaggttgagggacgagcttctatcattaatacaataagtaaatattcaatatccaagctagaaagagcattagagactagaagtttttttggataaaggtctccaaccaatgctagaacatttgcccattagtgtttttgtttgagataatcaaccatagtcatgctccattttcgaacagtttggattttggtacgatactcatccatttttgccttcgaatgagatccaaacagattttcaagagcagtccataatgtagcagaagaatcacaccccatgacctctgttgcaatgcctttagatattaatacatacacccatccaagtagcaattggttgtgtactatccaagcctcaaaagctggattcactatgagagtttgaactcctacatctgtctcagtgggtataaactcatctggtttagctcttgcaccagtgagatatccatctagacggtgaccacgaacgaaaccatagtttttcatagagagattccaatcaagttttaaagcaaaagattgggttaaggtacttcctacctaaggtatgaatatatttggagtttttgagtatgtgtgatctgacttggggcagcagttgaagattggccttcgacaccattgttactaatggaggcttgagtgctgtgagcagggttttgggtgttatcagccgttgcaaagccacacgtccatttggctctgataccaagtttgaaaacaagaaaaaggcaacagagaaaaggtagtagagagatatagagagaactgtaaaagtttaactcaagaaattttgtggctggttgattatattatatattaataaatgatacattttcaaaaatacaataatacagtaatgattacatactgaaatata

SEQ ID NO: 232338 - DNA, 694 bp, Cannabis indica
ttccttggttaccttgaagggaaaggatacaaactgtggtgcttagaaaatggtcacagaaaatgcataattagtagagatgttgtattcaaagaacatgagttgactatgaagacagatgcaactaatgacacacaaaatgacaaggagatgactggtttggaaatacaaagcaacagggaagaagaagatggtacagatcacgtggatactcaagggtacttatactcaaaaatagatgaacaagcaactgaacatgaaagtttaccatttgattcacaaggctaccaactttttagagacagagaaagaagacaagtaaagccacctgaaagatttggttttgctgactgtacaacctttgctcttgcatctgcagaggagattgataccacagtaccaactacatatcaagaagctataaactcaagaaataataataaatggcttgctgcatttgatgaagaaatgagttccctgaacaagaacaagacctggaaaactgttgcaagaccaccaggacaaaagttaataggctgtaaatggatttttaaggaaaatgaaggtttgcaaggtgaagaagtcaggtttaaagctaggctagttgcaaaggggttcaatcaaagagaaggtgttgatttcaatgacattttctctccagtggttagaaaaacatctataaggatcatgatga

SEQ ID NO: 232339 - DNA, 1684 bp, Cannabis indica
tcgattagatagatgtttggcaaatctttcttagctgcaagctttttcatttgttaaattatataaccttgagcttttgacgtcggatgattctcccatattacttgaactagttaatactgctacgcaaaggagagtaactctgtttttgttttgagaatgcgtcgcttcgagagcctctgtgttaccaattatagtcaaagatagctgggatggaagtggtgtaacagatgtgcaacaaaaaatcaagatttgtgggcagcagctgagttcttgggggaaggaggttacgtggaactttaaggacaggataaagaagtgtaaaaatgcagtgcaacggtggacatgagagacttaagacctattgccctttgtaacattctttataagattgtttcaaaggtcattgctaatcggctcaaagctgttatgccttcaattatatcggatactcaaagtgcgtttcgccaaggtcatttaatattggataatattatgatttcttatgagataatgcattatttgaagaggaagagaagaggctgggatggtgttatggcacttaagcttgacataaccaaggattacgaccgacttgaatggggatatcttcgggctatgcctgaaagaatgggcttcgatggtagatagattaatttgatcatgcattgtgtgggtactgtctcgtacacgatctctcatgggggaaaggagttgggccctattgttgcacaaagggggctgcgccagggtgatcctttatcaccatatttgtttattctctgtgctgagggtttctctagtttgtggcatagttatgagcagagtggattaattactgggtgtaaagctgctagaagaggtcctattatttcacatatgctatttgctgacgatagttacatctattgtaaagcaacagagaaggaagctcataatgttaaagagttactgtatacatatgagattccttctggccaaaagatcaatttttcaaagtcgagagtgttctacagtcacaatactagtacctctcaaaggcatatcatttgtgagttgttagatatttatgaggctgatgagaatgggtcgtatttgggacttccatattcagtgggaaagaataaaaatgctctcctcggttttcttaaaaatataataaataagaaaattcaaggatgggaaggatattgtctcgtgcggggaaggaggtgttgcggaaatctattgcgcaatcaattcctagctatgcaatgagtgttaatctattacctttggatacttgcagagagttggagcgtctcatggctaagtacttctggtggcaaacggactctgttcgtaggacaggtgttagttggatgagttgggatcgattgagtcatcacaaacatgttcgaggtttgggttttcgaagtctgggagacttgaatatggccctattggggaaacagtgctggaggatgtcggttaatgatacgtcctcggtgattaaagtttttaaagctaaatactatgccaacagaactcttcttttcaagctgaattgggtgtacaatccaagatttgtatggaggattattcttgaaacaaaaggtctaattcaggctggggtaacctgtacgataggcacgggtgaacatacttcaattttatgtgacccttggcttccacacaacacgaa

SEQ ID NO: 232340 - DNA, 1028 bp, Cannabis indica
tgcgaggtgactgttcgaataggtctttcttgtcccagaggtgccttactatatcttaactacgggagaagaaggtgtgccttttgcacttgtccgggagctaactctctaaaccatacttattgcctcttttactaaggttgtacataagtttttgtaaatcgcccaaaccgaataatctacccaaatcaaattgacataacccgacaaataatgcaaaccgaataaccagacgaaaatataacctgcctaatctttatattgggcgggttaaaaataataccaacctgtccaatcaacccgaactaacccgatcaacccaattaagagggtgttatatatatattttattatatatatttacattatcatataacttatatagatatttaaaaaaatataaagttcaaactactatatctttttgatggtaattgtaaggtttattattttgacagattatattaatagtgagttcagtcttatttgtggttttaatttgttataactgcataccagttttttgttaaagtcctcgtgtgtttgttatgttttaactgttggtataaattgttcttaggtcggttgaactattgtctataaatagctagtttcattttttaaacgagttagctagctaattcataatcttggttagttcagatatatcgtgtggtattgtgtgtggtatcttgtattgttcgttgctgtttttcaggtctgattgcatagcttggtgatggatatccatagcagaaagattagagcctggtgttgctgagttcaacaaaagggagtttagtgtcatcttcgtcatcagatctaaagagatttcagattgaagaaaagtgttaaagaagaacttagttgctgcataggaaatcttgtgcatacaaccaagaatcttggttgttgttggtaacacattactaattgttgtaaagattgtattaaattcctaattgtgaactggagattgtaatacgaatattttggatttagtgaatgttattaccctagttcgggga

SEQ ID NO: 232341 - DNA, 1288 bp, Cannabis indica
aaaactgtttaaattaattaaataaataataatttaagaaataaattttctccaaaaaaataaggtgacaccacacccgctggctcggctgggcacggtcggtcggacggcggcggcgcgcgtgtgtggtggtcctgtgtgtgagtcctcacccatgcgcgcaaaactaggtagcccttggggccaaacccatatctcaaacttgcactaattatacacttcaaatgaagtatttttatcccatgtgggactcctactcacacacatcattttctaacatttcacaaagttccaacaagttctattatttcaagtaaacatattaaaatgtacagaatttgtttgcatatgcagatgcaccatcaaacgaatagcctcagacatcagagaaaaagtaatcaatgaatcataaaagagacagtatgtgatgaatagcaggccagacaactacatacatcattttatttgtttcaatggcaacatattagcttttattgtcatatacttcgattattattgtaaggctaccttttgaaaggaagcagtgatggagctggacttaaattcacaatgtatcattatatattaaaagtgcttggtttattttatatattaaaagtgcttggtttaacatattttttttaaccattctttttttattattattttgaaaagttaagtgaagttaacagaactgttaactttttttgaaaataacagaactgttaattttgagaaagattaattagtcttttggcaagtcttgtgggaaaagccagaggcttacagttaagtaacttttttagtcggtaatggtgactaggtgaattggccaaattaggcttgaggaaagtaaaaagtgcttaccctcttgtggtggcaatactgcctgatgtgcctgaagaacaccgtcacatatcttttgaagtctcaggattgcatagtccgtgagattgaacccatctgtccacctgaaaatcagattcagtttgccatagctaattatgtcatcaactactccaagctccgtacttggaatgtaagtatataacataaacatatattatatatcatgtatatacttatggttaattaatactcctttttcatgttctgatgtattgtgttattgtatagtttgaggagtacaggaagatgattgtgttattgtatagaaaagtcacttaaattctctctacatactactgtttgctgttttcttaattcatttaattttttattctgtttataaatatttatttattcttatatttattttctaattttt

SEQ ID NO: 232342 - DNA, 884 bp, Cannabis indica
ccatccaaattcatgtctacacagaccctgaagggttcaatgacgtgaaatcttatgaagataagtcataattacagtcgtcgtttcaaaaactctcgacattaggagaacaaaagtcataattgcaatcgtcattttgaaaaaccctcgataagacattcaaacgccactgtgatgtgacaacacaacttgcttgtcactcgaaatatttttaccatttaacaaacaactgtcatccctaaactaggggcacatgttatggtgcaagttttttgcctaaaaatacaagtgtagtctcataaattgctgacacgtggactcgattctcgatggaaaaggatgacatgtcaatagatagctcctgtagagctaacctcgcatgatatgaacttgcaagaaggtgtgaccgagacatggtttagtcgcacactatgcataacatagtgtcaagatataagaaggaccaagagaagctagtacgaatcgcgcatatatcgattatatgcaatgagcaagtacatctcgcatgcgacacgtaaagaccacttcttcacacatgttttgtctgaaagactaatgtgttcgacgactcgttaggaactcgcaagttctacgttgtcaacgcaataatgtcataatatgcaattaagaatgaacgcagacattcacctaataaacccaaaggcccatggtgtgagtaaaatcccacagagcttgcgagctcgcgtattttgaatatggatagtcaaatatgcgactcgacaagtcacacatgttcaagcaattaaacaaagaccaaacaaaacttatatttactttttactatctttattttttctattttgtaatctaatctatatcgtgatctaaatcaaataaactaa

SEQ ID NO: 232343 - DNA, 1304 bp, Cannabis indica
cacctatttcttttctatttcccacaccctaaaataaaaatcttaactctccaaaatcccacccacggctctgcaccatcgccctcctctctcgccgtcttcctccctctatgaatctccctttcttgtcgtctcactcgttcatcgatctccacccacccctcaaactgtcggtctccctctcctctccatcgcatacgtcggaccaccaccacctctcatcgttgtccctctcatctccgtctcatacgtcagaccaccaccacctcctgtccgtcttcctctctctctttctctttctccgagctcggtataaatacaattatttatgtatatattttttttatttattatatatatttattttgttattgtataaatttgatgtgtttttaagttagttgttattgtaataaaattaattagttgttttattttaatttaagtaaaattataaaactaatgcaggaaaaaaaatgggagaatgacagaaaaatctctattttttttacattcccgacagtttaaaatcgtcgcctataccctgttataggcaacgattttaaaccgtcgggaagtccacattagcgatggtttttaactgtcgcatattttacccattttgcaacagtcgtataggtgacgattatagaaattgacaagaatactttaaacgactgtttaaaaacgtcgggaaaaactatttttgtagtagtggaaaataacttaattaattacagacttaaaatatcttattatcaatacaaaaaattactacttttagtgataaatttttggtaacaacataatttttttgtggctaaatgtgacttttagctacaataaaatattacctgtgactaaaatatattatttagttacaagatgtcactaatttagttttagttataataagtattgtgactaactaaaagtaaaaaaatttgtaattaaaatataagaattttttttgtaagcatctgtaggtggctttttaagtccgccgtcaaattccagggctcaaccttagacagacggtcaaaactaccaagctggagtacggtaggggcagagggaattttcggtggagcggtgaaatgcgtagagatcggaaagaacaccgacagcgaaagcactctgttgggccgatactgacactggaaagctaggggagcgaatgagattagatacccatgtagtttggactaaatataaatgattattgctagagtaatgtctttttgggttgatgatttaattaaataggtcatttcgaacttaaataactttgtaaacaaaaatat

SEQ ID NO: 232344 - DNA, 772 bp, Cannabis indica
agctccggccgccgattttggtggagaaatcgttgaatcttaacgtccattacgatataattttaatctctaaaaaatttattaatgtaaattactttatttttaattttgtaatattttttagggttttacctatattcttaataatgtttgtgggtgtgcatggtgaccggattttttattggtagttggatttcaacaataaggtaaaaaaaaaaaaattaataatatgtatgtatgtattttgtgtgttattaaatgatgtatatatgtattcgtatttcgtaattgtatatatatgtatatatattatattgtattgtatatgtatgtagacaaatattgtaattatattttatattttttatgtattgtatatgtatatattgaatattctaactaaatagttttgttaaatattgtgaatgagaatgagatagaagaatattaaaataaaaatttagaaattaatttctttaaattagtttagaaattaattttattttttatcatttttttttcaattttattcatgtatttttatttttttagtagctagtaaatagttagttacaactacttaacaagttactaagttttattcctattgatgtatttttattaattactaactagttactcattagtaattagttagtaataaattaactagttactcataaattatataaccaataactagtttaacaaagaattttttatttttatttttttttactattgtaagttgtgaggtcaatttgtaaggatc

SEQ ID NO: 232345 - DNA, 1096 bp, Cannabis indica
acatgggttatgaagatatcatggaccgaaaagggaagaagagggtatccaaccctggagtccctactactgctgaagtggttcctccaaagagccaaagaaaaaccactgcccacaagaaaaatttactggccgagcctatcgatctcgaggtttctgataacaagatccaagaacaaattcctcctcaactcgtttctgatgccaatactcctcatcctgaggcaacccacgctactgcttcttcgagcaaggccatggagaccttgtcggccgcacctggagaggttgggtctgaatttgtccaggcgtatggagttgctgttgcgcaactcaaactctccttcccccaaatcgggattttctcaatctttggagtccaaaagagattcattcaaggagcttggactataacttcatggtaagctggccttattattataattatattatttttatacctctttcatattcatctgtttgtaattctccaggctttttttgcttctttttcttcaaatttgacgactctttgagtggctcgaatacttagagggcgaggtccacaaattactatcccaatgcaaggttgtaaataagcaacaggacgacgcccaacaagaaaacaacccgccttaagcaagaatctgagaaagcgaaagaggaagccgagaaggcaaaagaggaaggcgagaaggcaaaagaggaagccaagaagaccattaaagcccaatccgatgaatttgagaaagaagcttgctgaaaaagaagtcaagaccgtagaacgatgtgacaaggttggctttcacaccatatatcgggcctggatggcgaaccctaatatggacaccagcttcttagatgagaaggaagaagaaactttgggtctttgtgagaagaccagggaggaagaagatggtgaggtcaaggaagaagaagaagaagatctgtccaagtctcctagcatgtagacagggtttttatttatctccctttttcttttctttttttataaaatggccttttgcccaagacaatggtttgcccctggtagcagttttttttttaaagacagatttgcaaagttggatggcca

SEQ ID NO: 232346 - DNA, 626 bp, Cannabis indica
tatctacattcaagggcactttaattttttgtaattatctaacaaactatgtaaatatctaggatttaaacttgtaatctagggtttaggcctcctatataaaggccttaatcgtagcctagaaacctaagtcacttagcctctaaaaagctctaagtttgaaagcaatattctctcttctctttgtctcaagctcatgtccaatagggctctctctctcttatcactttatctctcacacgcctctaaggctgttcatctctctcattagagatctgcctacttgaatcatactttgtatccttatagagagttattttagatcccacctatagcgatctgaatagtgttatctctaggtatcaatacaataaataggggagaacgtcattacctaccatcacaaggggggcgaacctctataacaaatctttatgtttatcacttttcattcttgtttatgtaacacgtggcaagtatcagatccatactaccccgctgtcaattgatcactttttgaggccaacaacatcaatcccggtaaattgagtagtctggatttaatggcatacgtttcaagcatatcgtatgaacggacgaaattttccttctgattcatctcccag

SEQ ID NO: 232347 - DNA, 1193 bp, Cannabis indica
caaggctacaaggcagcctattctcaatcggagatgctttcctaggggcaccatggttcatggagccaccgccaccacctccacctccttccccaaacgatccaaatatgtcatccctgaaaatcccacttgaaaaccttgaacccctcatacctcctcctcctcctccacccatccctcccaagcccccaaagggtcccgaggacccgaaaaactccgcaaaaatatcgtctgcatttcgaggattgaattgaaacgtcgtgggtccatctccggtcgagaagtatgaagctccacccggtcctccggcgtctggtggtggcatttgacccttaagcccttcctcaccgtactgatcatacactgcttttttctggggatcactcagaacctgtaaaaatgaaattaaccataaattgacagctaatttaaaaaaaaccagaaaaagttagcttcataaggtgggttttggttaaagagacatacctcataagcttcagagatttgcttgaatttggcttctgcttcctttttattatttgggtttttatcagggtgccatttcatggcaagtttcctataagctttctttaagtcatcatcactagcattcctgtctactttgagctccttatagtaatccactcccatttgtttctctttgacccttacgttctttaacttctgctactgagcttgagaagaaaggtcaaatattcgaagattttggatcgtaggctcaacgcttgaagttgaggacgaaaatggtaacgatgatgatcgattagaatcggaacgagtggtttggtatgtaatacgtgtatggatggtgtaaagcggtggattggatttatacttgggttggttttgattatttgagaattctgaagaaggttccagaagtagcctaatatttcagactcatctttttccttttctttttggtttcctttcctatcttatttaccaacaataaaataaataaattttaaaaaaaatggaaaatagcaccaattggaaaaagtcatttaatcccaaactgatttattaaaaaaaaaggaataaaaaactttttttatatacccattttcaaacaagttaccttttaatacacttagccaaaaaaaaatcttttaatatataaatattagaatattttttttatcacattatatataattaattaattataa

SEQ ID NO: 232348 - DNA, 1031 bp, Cannabis indica
aactctctctagaaaattggtacaactactctaagcaataatatcaactcactaacacacaaagaaataaaataattatccttgcacaattaatatcccaaaaaattactattttaatctggttagtacaagaggttgcacgaaaaaataagcacttattagaaattgctcatgatattttatatgaatataccaaaatatttgtgggggatgccattcttactgcaacttatttaatcagtagagtgcccactaaggttttaaataatactactcctttgtcatacttgaaaaagttttatccttcatctagaattaattctgtcttgcctctaaagtttttcggttgtactgcttatgtttatcttcctaagagatctagatcaaagttagatccaagagctgaaaagtgtttttttaggctattctcctaacaaaaaggtcataaatgttttaatcctgttacttaacggggtcacactactatgaatgtttatttcttagaaaataccccctatttttccaaaaatttgattcagggggagaatgtaggggaaccaaatttgtggaaagttattgagccattaccaaaaataattaacactgtttcagtaagggaaaggcacccaacatataaacgtcgaatctgagcttggtttgtcagaaaaagaaatactacgattgattaaaaattgtgataatcttgagcctgtggtttattcaaggaaaatacctttgagaaaaataagatcaccaagtcatacctacacaagatcaatcgttggccctgagtgatggttcaacaagtactcaaggtaattctattcccactgctcatttatctcctattaatactattcttctagatgtttctaaaccaggtccaatcacatctgacttagatgatcttcccattacatttagaagaggaactcataattgtatagatattatattgccaaacacatatcatatgatcatttatctaaaacctgcagggcattgaccactattcagagcttgttgggcct

SEQ ID NO: 232349 - DNA, 950 bp, Cannabis indica
agttttaactcataaagtatttcccgaagccataatgcttctttaagcgcttttgtagtcgccataaattttgctttcgtggtggaaagaccgaccacggactatagtcgccataaatattctggtatctctatttgaggcgtagtctgcatccacgaatactttcaactccaattttccttttcctttctcataggtcaaactataatctcatgtgcccttcaaatatctcagtaaccatttaagggttttccaatgttccatgttcggattggacatggacctgcttaggatgcttaaagtgtgagatatattcggtctcgtgctcaccatcacgtacattaagcatccaagaacaacaacatatattgcatcattcatctcttctttcactttcgtattgttaggacattgttccttcaacaaaataaactgacctcgtaaaggaacaaatgtactatttgcatcttccatgttgaacttctgaataatcttcttgatgtacctgaaatgcttcaaactaatagtctcttcctttcggttttgtgagactttgatactaagtatcttttgaattggcccaagctctttcatctcaaattctctcttgagcttggctttaatacttttgatcattgatttatctttgcccatgatgatcatatcatctacatagagcaatacgaacacgactgtagattgctctagattctaaaataaaggcagtgatcgtatgcggattatttgaatctgatttgatgcatataagtatcaaatattttattccattttcttagggactgtttcaaaccatacaaagatttattaagtttacaaactaactcaactccttttctttccacctgaaacccaggtagttgcttcatataaatctcttcatccaagaatctattcaaaaaagacgtcttgacatcaagttgtttaacttc

SEQ ID NO: 232350 - DNA, 516 bp, Cannabis indica
caaaacttttaaaaaccaataaaatatgataagctaaggaaatctaataaatgaagaatcaaaatagagttttatgtggttagggtgttaaagatcccacgagtcaatattattgtgtttagaccggaaaagccttaagatttacataagtgtttgaaccctagattttatctgagcactcaagccatgagattccaaccctttgcatgaatgagttttcatatatttataatgctagggttcttgcccactgatggggcgaatacaaatagtataatgaaaattgggttgatttggtaaagcccagctcgtgaggctttgatcttctgatgatgtggaggccacatcacgttgagttatcacattttgtcctacttttattgataataaagacacattaatgcttgattgacaattactttatttccttattcgaaagatgcgaatcctggatacaatcctgaaaataaagccctgatattgcgagatttgggaataaattactttgatacggag

SEQ ID NO: 232351 - DNA, 643 bp, Cannabis indica
ctgaatcccacacaggattcccatgagcttggaagaaagtttctggttcttgcaaagtggaactagctagaataaaggctcaaaatttgggagacagcttagaataatcaaggacagcagacaatggatgctctgtgaccaaatcctgatcctgagaaaaagcaccagcagagaatttagtaagaaaacaaagataataagtgagatatgagggcttatgatgggttcgggtaggtctggttgtggaagcaggttgtgatgtagcagggtcatgaataacagtggttctggaagcagaattagatgtaacattactgttggtgtttgtaatatcaggagacatgacattggtcctcctatgtgtaatatcagaaggcatatcagcatgtgaaaaatcagaaagaaaattatggtgagaatcaggaataccagcagattggacaaaagggaatcaatgttcatgaaagatcgcagccctgctacaaaaaacacgattagtgttgagatccaaaaacttgtatgccctcataccatgaggatacccaaggaaaacacaaggaacggcccttggagaaaatttagttctagaggagttaagagtggacacatatgctaaacaaccaaaagctttcaagtgttcata

SEQ ID NO: 232352 - DNA, 5370 bp, Cannabis indica
aaaaataaaaatattaccaaaagttcccatagtttatcattttatttgatttttagtttggtttgatattctttacaaatattatttagtttaggcattatatttatatatgtatttatatttatattatattagtatcaatagaatgaaaaaaggtgagcattatatataaattataatagttttatattatattgtttattattttttttgaacaatagaaaactttttatttaaacaaaaacaaaccatacaaaataagagctttgtggaaaaattatgactaatagtcagtgacggacccagaatttttgatctgtagaggcttataaaaatatttattatttactttacattaaaattataactatttaccttgataaatgctctatttaccttgaaaaattggataatggcatagaacctgatttggaatatcggtctacaatgaaaggatctgctctaccgatttccaattatgacaaataccgtactgattttccaaagggtgatgcatggccactgctaactcgcctcgccaaaaactctctcatttctgcaattccaagcctgaagacaagagattctccacatccacgatcactgcttataggcgaatcctctcaaactactgccattacatccaatgcacatgctacttattcacatgcctcacacacaccatctgtcccacttcataatgttcataatctcccaatggctggtacaaacatcaccactgcaacaaatgcttataatacagcaggtgtcactttacaaaatgaagtagcatctaagttcatttcatcaccaaatcgtactataccaatgttggtttcacatgttgcaaccacaagtatgtattcacttcctgctgctactactggcgcttccacaaagtcccaaaccagtgatgttttctcagatctgtcaggagttttcactccattcgctgtcatgaacaatgatccaagtgtgtttgctacttatcctccagcaattaatactctccatagcaatcaaactggacagctccacttcccaatacctgccaagacttatcatttatctcaatctattgttgcttctggtgccgaatagcaagggggtaaggaaaatttgtctccaaatcgattttccaaaaggcattccgagggtattaacttgaggcaaactttgaaaagatgccgtggtaaccaaactcagttgttcatttctccgttgtcagttgaaattgaacccgaccttgaagtttctatgaatgatatggattcttttggtgcatgcgacaatgatgcggtggctgactctcaaccccgcactcagccatgaaaatcataagttggaactctcgtggtttggggaacccgagggctgtccgtcatctcaaattgcttgtcaaagagcaatccccaagtgtgttgtttattatggaaactaagttaggtcctaattctatttctcgctttcgtaatgttttatgttttaataatggacttgaagtccctcgtgttggtcttagtggagatttaatgttactattgaaagatgatgtagatgtaacccttttaaactataatataaatatgtttgattgttacatgtcttgtggaaatggcccaacttggcacttcacggccttttatggtgccccggctgttcataatcgtctccatacatggactttgtcagagagattaaaagatgttgccccattgttaccttggatagtgattggtgacttcaatgaaatcctatcaaatcgcaataaatcgggaggagctttacgtaatgaggctcaaatggatatgtttagaaaagttcttgacctctgtcaactacatgaacaagcttttgatggtgatcagtttacatggattaaaggaaggcacacaattgacactattaaggaacgcttagattggtgttttgcaaatactatgtgggagggtatttttcaaccaattattactcaccaccttgactattaccgttcggatcatcgtgctatagcagttcatattcttcctttaaattcaacacaccagcagcagcaacagcgatcaagacgctctcggtttcgtttcgaaaagctttggttacaagaggaggaggccacaaacttgattcaacaaaattggcaccaagttacaactgaaaatgtggctgatgtttttgtcaataatcttcaaaggtgtgctgaatctcttcaacaatggcaccaacagaaattcagcagcttcaaaaagaatatttcgcgagcccaaaagaaggtgaaagacctcaacaatgatactgatcgctcccccactgttatccaagaaatgaagcatcatgaaaacgtgttagatgaattgttggctcaggaagaaacctactggcagcagcgatctcgtgtagattggttgcaaaatggtgatcaaaatacgaattttttccatgcttatgcttcatcaagaaggaaacacaacaccatcaaatttttaagtgatgaccgtggcattgctgtccactccaagcagggaatgactgatattatcacagcttattttggtgatttattcaaggctacagacgtggatttagatgctttaacccacacaattgcagcaataccaacaacagtgaccgctgccatgaacgattcattaattcaacctttcacttgtgaagaaatatacaatgctctcaagactattagcccagacaaaagcccgggtagtgatggtatgtcggctatgttctatcacaagtattggtttattgttggtgatgtggtaacaaaagttgtcttgggtgttttgaatgatgggtgtgatatggaatcaataaatcattcactaatcactctcattcctaagacaaagaatcctagtggtatgggagacttcagacccattagcctgtgtaatgtcatatacaagatcatctccaaaactctagctataagattcaaggacatccttccagcggtaatttccgaaactcaaagtgcttttctctcaaaccgtcttatcactgataatatccttgtggcatttgagttgatccatcatttgaaacataaaacaagggggggacgaagctattcagcactcaagttagatatgagcaaagcttttgacagagttgaatggctctacatacaagaggttatgcgcaaaatgggtttccacaacaaatggatctcattgatcatagcctgccttaattcaacaaggttctctttcatgcttaatggagaagaagtggagtatgtacaacctacaaggggtcttcggcaaggtgatcctttatcatcttttttatttctgatttgctcagaagggctttcaaggctattacaaagtgaagagcaactacagaaccttaaaggcttacgtttaacacgtcacgcaccatcagtttcacatcttctctttgcggatgatagtctccttttttgtgaggcaactaataattcagcaagagcaatacagagggttttagacatttaccataaggcttcgggtcaactcctaaatacatcaaagtctgttatgtctttttcacccaatacctcacaagcagcgaaagatttttttcaccaaattttgggcatgcctatcagtgaatgtcatgaatggtacctgggtcttccagctttttctgagcgtgataagaaggaaatgtttagtgatgtcaaagaacgaatatggcaaaagctccatacttggaatgaaaaattattttctgtaggaggaaaggaggttcttttgaaagcggtagttcaatcaattccaacatatgctatgagttgtttccgtttgccatcaactttttgcaaccaacttgaatcaatgatggcaaacttttggtggggatctaacaaagatggttcaaagatacattggagaagttggaaattttttttgtaagtcaaagtttgaaggtggaatgggtttccgttcttttgtgcactttaataaagctctcattgcgaaacaagcttggcgaatctttgaaatgccttattctctgcttagccgtttgctcaaacatagatacttttccaataataattttttggacgctcgacttgggcattctccatctcttacttggcaaggtatacattggggacgtgaattattggttaaaggtttacgacacaagattggtaatggctataatgttttagctggttttgataaatggattcctggtcataatgatttcaaggcgatcagctacacaggccctccaactctacccgtggcacattttatcactgaacagagagagtggaacattccactcttaaatgcctatttccagcccattgatgttgatagaattgtgacgattccacttagtttctttccttcaaatgatcgcctcatttggcatcacaaaacaacgggctgctacacggttaattctggctttcatttggccgaaaacttggctgaagcaagggagacgagtggctctaataatcatacgcattggtggaaaatgttttggagtttaagcttaccttctaaggtaaattttttttcttggagggtaatgcaagatgcactaccagtggctactggtttatgcagaaggaaagttatagactccgcaacttgttctttatgtcataatgcatgggaatcggttggtcatgccatgtttaattgcatcaaagctaagcaagtttggagagaaactaaattcacaattgatcattcacatgctgcaactatgtataagggtgattatttaattcacttgtccacacttcactctaaaccggacttagaattaattgtatgcactatgtgggctatatggcatgagaggaataaggtggttcatggaagtgcttcgaaatcaagccgtgacattgctgattttgctagcttatatctggacaaataccaccggtctggtaggaaaaaccagcagcagtacactgtctgcaccactactgccagctctgtccaaaatcaacctgctgcccaacacagttgcactcaggtttcatggtctccacctgctggtttgggtcttaaaatgaatgttgacgcggctgtaaaccaggaacacaaaattttgggggttggtgctattattagggatggcaatggtaatgttgtagctgctttttcaaaacctgttcagggatgttttcggtctgatgaattggaggccaaagctttattccatagtctgaattgggctaaacaattgcagcttcaaatcacacatgtggaaacagatgccttacgtgtttcttcagccattaattctacattacggaacctctctagttttgatgacttaattatggatgtttgctatcttttatcctttttctcgggagtaactgtttctcatgtt

SEQ ID NO: 232353 - DNA, 1582 bp, Cannabis indica
gtgatagcatccagttgcgggatcaaattgaaaaaggcgaaaataaagaatcttgccaaggacagtgatcatattttcactgcacacacttatgtctgacaagtgtgtacaagtttgtaagtctcctctactaaaataaattaaaaaaaaaatctcggttcacattttttagtaacatgcatatctttttcctcaacatctactaagtatgatttattcttgagatactaattagttattctcttttgaaagcataacatgtataattgtcatttgagatgaattttgattaaattgcttggtttagattaccttatatctattgtacatattttattttactttatattattttcagttgttcaaaaataaaaaaaattataaaaaaataaaaaagagagggaggcgttggtgacttgaatcatgggctaagaaaatttgtgctttgattggtaagtttcaacatttattctacactgatttattttgatatgtttccctttaaaagattgatatcttattcattgtaatttgtcattgatcttgaaagattttcttaaattggctatttttggacaatattttggtaattctagcttccttttattttttgttaaaaaattaattttggaaaaagtttggggcggtttctcttttttgttcgtgggctggaggttatttcttttgaaattaatttcctcttttattccactcccccatgtttatttaaaccaatttttacttagcatttattctcaccacctacccgattcctattgctttgtgttcttgcttctttgtttctcattcttctttcagatcaccatggctaaaacaaagaacttagggcaaccaaaacgggtggaagaatccgattctatcccctcgaatgctcctccaactgctccaatcttgttgcctgctgctgtaactgcttcgaacccaggagattcatcgcttcctcagcgtgaatctcagcctgtgaagcccaagccgaaaagaattcctgaacaagtggttcaaaaatatgtgtgaccctacaaatgttggacttcatcgtcatcatcttcgaagggatctcctcgacctgctactgtattgccttctgctgcaatagagaaggcagttgctgcatcaactctaacagggccttccactcgcactcgtgcccagcaagcttctatcaagaaggaactttgctcgaaacaaagtcatgacaaaccagctcctccaaccaagaagctgaaattgaatccaccctcggtttcttcaagttctaaagaagaagaacccatggaggatccctctgttgattccgagaacaaatctgagtctctccattctgaaaaagagattcctaaagacatcgaagtttcttctgacagtgaagacactgaacttgaacccgagtccacctttgcccaaatctgctccagcacctcctcgagcatcttgagcaaccaaggcttctgctgctgccaaaggcaagtagcctatgaatagttcttcacctggtaatatctctccatctcaagttgttagttctcgattttactttcgtgataatgagcgtgattggaat

SEQ ID NO: 232354 - DNA, 1302 bp, Cannabis indica
gctcaagcttctgcaatttgaactgagagcttaagagctaatctttcgtatgtttaagcttacgatacgtatttaccattggatcagcgtgacattgttcccgccaggccttcttgacaacccacaaaactcggggatcacgctcccacataatctcgtacttgaattgtggctttgtgcaatagcgtcccccgttgctatcaagcagaatagggctatggtcagaaactgcagtaggcagatgttgaacaatcgcattaggccaggcaagctgccaatcaacaaacccaagggctctatccagcctagccctctttaaggaagggcctgtggcaaagtccaagctctttttgaaccatgcgaatttggctccaagatatcccaagtcaattaggcctttacgaagcaccattctcctaaggttaaaacagtatcgagcaatgttgcttgatctggaatagttaaggcattcgctgtcccttaaggtgtcgttaaggtctccaatcaaaatcatggcaacttacactgacaaataaagtcaccaattccatcccaaaatgcttctttctcccgtgatgtaggcggaccataggtaccgatgaggatccaaggtgtgtttggaggatcggaagtgatttgagcaataattttatttttgtctgcaacttcaacattacaatccacaccgcgtttccaacacaatacgagacctcccgctgaacccaacagagacatataatacaaattcatgaaatgcaacttagacattaaacaagtaaacttagcttgagagagtctgactttagagagaactaagattttgggatccgactttcgaataagatccttcagttgtcaaattgttgctgtattcctgagtacgcgatagttccaagccatggccctcattttagttgtggagaatttttgaggcaagtccctacagccccaaactgaaaaacctagttgcaaaggttattcttctcttcgttctcttcaataacctcatgtagagagcaagacgattttggcttgggagtacgttcaacaattacaaagtgattctcgagatcaactattagatcaaaaatgttgttttcccaattggtgtggatagtagtctatcgttgttttgtagagctcttagtcttcttctttagagattgagcgttcacaccacagttcatagaggccttagacagtcttccccttcgcctgggctttggtgaccgattctccgggtctaaattttgcacagccttgcctgtaccaacagcatgtggtctgcctctcttgcatttc

SEQ ID NO: 232355 - DNA, 2239 bp, Cannabis indica
attttgtattgtcgtttgatccaaaaatccagttagtcaagagatatgacttggaagagtgatttcagagagcttcggcctctgattcatctgttgttgccactttgtgttcattggattgctgaggaaatgactgtgtcagtacttgtggatgttactactggggctctttgtcctgaccattctacttgttctcaagccatttacatcaacggtattcaacaaacggtatgaaattgatcacttcatttgttcgttctttttttctttctctatgttggtccttctctctctctctctgtattcttttctgtttggatggtgggaaaatttgggaaagaaagtcatgaaagtttcaataccaaattaatatgtttgaaaattttcacatgggcttttgtttttttcttgaattttctcacgaaacacgctgtatgttgcgtgtgaatcactgacaatcatgcatttctttaattgtttatctatggaaacattattggtgtttctttactccgttgaatttgaatatatgtattgataactttcaatccaactagaagataaagagatatatatttttcttctttttaataattaactatcacagtcattagttgttgataaaataaaaacaacttttgttttggagtgatattatttcatttgtcctttttgcaaaatctgaatttaatttcatcattcaaaggttgaatttttaaagctttaattgtgtaattgttgatgtatttgtattttaggagatgcccgttgtttgttgataatatttgtattttaggagccttctggaaatatcaaaattaacaaataattgagtttgttagtttctgaataattaatattttgttcaacatttgttcctgttataataattatgaaaggattgaattgacccagtgagatttagtttgggctgatgtaaatataataatttattaattatggtactgcaataatctagtaaaggaagaccagtaaattagccaggtaaatactaaatactaagaactctgggtttaaacaattttgaactatggttgctctagatagtcatatggggatcagtacgtaacttctaccagaaataaaaggaaatttaattgtaatgataagctgaggttttgcatatctcatttttagataaaaaaatgtttgaattcatatttattacctcagagagcaaaattgatgctcatggaaaaattatgttgtttgtagattgttggaattttcaagatggtggtgcttccacttcttggtcagcttgctgatgagcatggacgtaaaccattgctcattctaacagtgtcaacaaccataattccatttggtatgtttattctggattataacataacactatgaagatattaagaaatttctatgagtgtaatttgtgattgtttgttcacgagccataggcatcatcttatttcaaaaggctgtttattcgaattacattatgcttttttcttctttctatgattaattatattttaaatatggttttgttaaatatctcttgcagcattgcttgcttggaatcaatctaaggaatttgtgtatgcttactatgtgcttcgaacgatttcatacatcatcagtcaagggagtattttctgcattgctgttgcttatacagtaagtaacttccttatcgattggcaaaaactttaataacagcaaatgttgaaatttgacattgccttttttcgcccattaggcagacgttgttagtgatggtaagagagctgcagtctttagttggatcacaggtctcttttctgcagcgcatgttttgggaaattttctggcacgtttccttccagagggatacatttttttggtaagaacctattacttgctttggtttcagccaattctatcttatttctctcctctttaatcttagacctcttaacttaagctttcttgattcaggtttcaataactctgttgatcttttgtccggtttatatgcaactgtttttgactgagacggtgaaaccagctcctaagagtgacaaggattcagcttgtctgaccaagacacttatggttgtcaagaaacgattcgtaacaatgagagattctgcaaccttagtagtgagcaggtaaattttgtggaccttaccagaagttttctcagttatgtacattcactcccttgctaacaacttcactttttctttttcttacattgcagtccaacacttaggag

SEQ ID NO: 232356 - DNA, 1395 bp, Cannabis indica
tggaggccgattacatgctctcattgctctgggattgggcattctgctggggaatgttaaaaagttgctgctccttcaaagcaacagtgggtgatgaagaatgataatcgaaaacacaaccttcctgaggtagatgctgatggtttcactaaaattgttaaaggtccgagattggacagaaatgaaaacaaagaatgcctactgcagtaagaacggggaacacttttcaggcacttatgtcagaggaacaagatggaaataatgggggaagtcatggtgaagttggctttgacatggtcagtacgggtgaagagaacattgacaatacaaggagggggggggaccgtctctttctaatggatagattgttatgttggaatttccgaggagccaatcatcaatctaaacaacaactaatcaagaattttattttttctcaaaatattgattttgtgggtctcctcgagactagggtaaaggctccaaagcttggaaccttgtactctaatgttttcaatggatggttcttttcttcaaacattgcttggcacccgggaggtaaaattgtgattgcttggaatccttacagatttactgttgatatcatcaaatgtactcgtcaactaatgcatttgaggatttcaactattgaaggatttaatagtctgctcacggttgtctatgcttcaaatagcagggaagagaggaaaggtctttggaaggacttgtgtgatctgtcttctaatgagaatcggtgtgtgatgggggatttcaacgacattctagctaaggaagaaagagtgggctacagggtaaggtcttatcccgattctgatttccttacttgtgtgaacttttgcaagctagaagatgttaaagctagtggaaattttttcacttggaataataagcaaccagggactgataggatatattccaagatagacaggattatggccaatcaagcttggattgggaaatatgagtttgctgaagctgtatttcttaatgagggattattcgatcattctccagctatcctttctttgcatcctcaaatggtgggggggaaaaagccgttcaagtattttaggatgtggaaatcccatcctaagtatgactctatactaaaagacagttggtgcttggaaatttcaagtaaccaaatgtatcaagccgtttgtaagctgaaactcttcaaagagaggttgagaaaattaaacagggaagcttattgtgacttgcataaacaggttcttgaggccaaggcttctctctatagtatccaaagccagctgcaactgtagcctcttgagggaagtttacaccagcaggaaagagcagcctgtgagtttttaagtcaaaagcagcgggattactcattgttcttaaaac

SEQ ID NO: 232357 - DNA, 1798 bp, Cannabis indica
agttacaacttctactataagtccaataagacacaaattatcaagtgtttattcacaaatgcaacaaaaagtaggctcaacccatggataattatcggttaatcatcttccaataaaatttagaaataacaaactcattattctcaatagaaacaagaaacacaaattaattagatccctaacaataaattgtaaagaaaatcacaaaacaagggatcaataaacaaatgataatagcaatttgaatattgtccaaaccaaccatacctgaaaacacagctgctaatcctaacgataacaacagaaaactgtaggtgataagcaccattattttgtaactaataaaaatcagaaattaacataaaacaatagtaaaattaaaaattagacaaccacctcccaagccctcaaacaccaaaagcccattctatttcaaaagcccatgaagacaaaaaaaaaatagcaaacataacaaaactctagattgtactttacaatgtaattctacaattgtttatctcgaaatttcacaggtataatattgaatttatgatgagtgaagtagttattaacttgacaaagatttttattagagactaggcacatgatttaagtcatttggagtgtctttgacacatattggtggaaacatgcaatgaagggtagctcaagctatgaggcttgacatagtgacagctttaggtatctttaacttagagccaaacataaaaatttgtagatttcgttctttactttccaaaacatcttgaattgttcaattttgaattatattgtgcaagttatgaccaaaatattaatagagtacacgacaggaaatcacccactcgcccaagtgcttaagctcgccccaaggatttccccactcgcccaagagatgtagggcacattgggactcacccaagggctccatgccttgctaaggggctctatgtcataccaaggggcttcaagcatcacctaactaggggttccatgtctcgccaacaggcgagaccttccatggctcgcccctcaccactcatcatagggtgtccctcaccaacggagcttcacatccctgccctatgtattaaaaaatgagtaaattatgctgtactttttatgtactttataatacattatgaattgtattaaaattactatttataagttaaagaagagattggataggatttgatgatgatgacaaataagcactttaattccccaattaagttccactcacaaatcacaatcactaacaatatgtatatacataaaatctctcaataatattaattatataagaaatgatataattaagtgggtagattagatgttatggcaacatcattaaaactttccatggggacagtttttcttaataaatagtactacataaccaccttttctctaaagcatataacatacaacatatataacataaatatcaactttatatcaatctgtatatatctttgtgtgacaagtttggcaaaagtatcatcatattgtctttcaatatcactccacatatattattaatccattatatatctactatataactaacacatatataataaaaattataatatatactattactcatgtgatttgaaggaatcaatctatatattatttcatgtttagtattctattcagttaatagattgactcgtaattttgttaaaactttcttgttcaaatggggtattaaaaaaaagaagatatttttactaaatttatgtctatatattagatgatttttcttcttaataaagtttctaataaatat

SEQ ID NO: 232358 - DNA, 1217 bp, Cannabis indica
gttaatcgatgtactcccatttatttcagcatccagagaattttttagtctaatttctttttataatcatgtaagttgtaattatttaaggcatttcaaaattttaaaaaattcaacacgccaaaaatagggctcaaataatacatgcgtgactcttttattttatacacgtgtgaaataaattatttgaacactatttttaacattgtaattattctaaatttctcaaaattttacaagacatcttaaataactataacatatacaactaggaaaaaaaattagactaaaaattatcttgaatacgaaaacaaatagggtgcatcggcagggccggccctgaaattagtgggccatagaaaaaaaattattttgggccttgatttagaaaaaaaataatggtatatttcaaaatcaataaaaaaaattgtataaaaagaaaaattttttttgggcccctggggtaagtgggccctaggcacgggcctgtgcatcggtacatcccttttatgggagtgcattgtagaatcacatatatgtatacatatttttaaaaagaaactttgaaaaataaaaaataattgttttaagataaatagtggtaaaaatctaaatatggtatttttttaaaaaaagaaaaatcaaaataggctttttatttaagaaacttttgaaccaaggtgatgggccttgggccgggcttgctcgtgggagcatagtactgcaagtttttaggggtgaggatctagggctcatcgatcttgcgtgatcagtgaacttatagtgtttttaaataaaactgattgttttcttagcaaaaaattaaagggatttttttaggaatatactatattaggaaactttataaaaaaataacgttaaatatatatcaaacacataacgtgacacgtcatcatctttttcacgggaaccttcaaactaaaatcaactgctaatcctaaaaagcaggaatcaataaaaagcccattagcccaatataaaaaatgttaaaaagaggaaagtaccaataaaaacgacaactacatatacagaaaattaacacaacaaaaataacgtcatttttgtaaataatttctaaatttaagtggcccatcaaaatttcccaaaattaaaatgtatgtgatgccataagatcttaattaaggaatatcaaacaatataatatacctaatgtctatgatattattattagatat

SEQ ID NO: 232359 - DNA, 1180 bp, Cannabis indica
aattatttaaaattttttgaaaacgtacagggtgcctattataactatagtttatactgacgtcatataaaaaaaaattagaatataattactctaggtgccaaaaatataaaatgctcctaccataaaagcgaaggtggtacccctaattaagaagctccctatatagaaaaattctaattgtataatatatagacaaaaattctaataatattattataaaatattgtatttgtacctgaatacgaaggtaatttttcttgtgatgtcgagattggaagatagttgatacaaggaaatcaacaatatcagaactagcattagcaaaaatgtcaatgatgggtgtggttccacagtcaaaaatccatttaatgagaccccatcgggaggccattgaagcgttgtacttcccttcatgcttaggttcacctgttcccaatgacaacagtagcattttagttccttccatgccaacttctttttcttcttcttcttcttcttcttcttcttcttcttcttcttcttcttcttcttcttcttcttcttctaatttgttattattcttctttgaatgtttctatgatgatatggctaatcgccaacatagacttcaacaaacaaaattacatatatataaatatatattggtccaaattaaaattgaaaaaatagtgtagagagtaggtagctagcttactgggttatttgcagcaacagcaccatcaatgagatcaaaactacgagaatttccattgtcatcagttgtggtaaaactatgtgccgggagataagtaggtgctgctgaggtactgatgcaaatatctgctagtctaggatttctcaacgagctttcttttccctgcaaatttgtagttaatttaaggagagattattcacacaagttaaatatatctggacacaaaatatatactaagggtataacacttttaatatgaaaatattttgacgggataagttgagaaatactttttttgtatctaaaatattatgattaataaaacacgcaagaaatatatattacatattacagatttaaacatactcttaaaaatactttaatatggaaaactctatgtaacgtccccgcttcaagcctctattgggtccttacacccacagaatgaatgactcttatacacgagtacgtcactctggctgc

SEQ ID NO: 232360 - DNA, 1480 bp, Cannabis indica
ggccaacacggccacaaagttgacacattggtcgatttccacgacctcctctgttagagttgttggtcgaccccaacgatacgcaccacgagagcctcttggagggtatgaacctcgtgttccactgagatgaacattgattaaatttgcttgaatgttgtgaagaaaatctgtggtatgctgctgtatgcgcatttcttgactttgcaacatgaattggaccttaggaagagagagagagattcagatcgagaggtaagattaacaatgacagcttcatactcagaaccaagaccaccaagaatataaagaaccagatcatcatctttaattgattgaccagcagcagcaaggttatcagcatattgtttcatctttaggatgtaatcttcgatggacagggaccctttctttgtggtttgaagaagatttcgaagttgcagtagtctggctcgagatctcgtggcaaaaagttgaccaaaggtatgccaaatctcagcagaggtggcacaatgaatgacatggccgagcatgtgttcagtgacagatttcattagccaatgcattaggaattggtcaagacgaagccattgatgaaaagcagggttgggagaattacctgcaagaaatgctggtggttgaggaattgtgccaagaatgtagccatcaagttcataggcacgaacaacagcaagaaccagagatcgccagagagtgtaattggtgcgatctaatcgaagatttaggggaaggaggtgattgttggggaggggaatttgagcttgtggttgttcgattcttgcatcagctggtggatcgatttgaactccaggaccattgccattatcgccattgtcttcttggtttgacatggctctgataccatgtaagaactctcaaatatggagttcagactttgagcaaaaacagaaataaacagaagagaaaagatggaagtggattgaatggaaaatgaaagctcaatttggaaaacagattgagtgtgcctttatttatattggtttcagtacaatacattgaatcaagattacaactaacttaatcctaactacctctaactgacttaaccgaaactaactgctaacagagtaactaactgattgttatattccaacaccttgctataaaccaagcaatacaagaaaccctgcctttgaggattaggaacaataagacaatctcttggtttcttggttattgtctttaatgtccgagaaaaccacaaatcacatgattggatgcgataatatttcttaaatttggaactctctcaaaatgagtaatacacaacccttaacactatcaatatttgtctttactagactcaacttataaacatgaagatgagtggttctcttaatgactacctgctgaagattaagggaattaattgttgattttcttgctaccatcggtcacaataagacacctcaagatcatattgaggcaatctttagtg

SEQ ID NO: 232361 - DNA, 1287 bp, Cannabis indica
aatagcctaacaaattaaaatcacactaatcaatgatttaagaatcaaattaagaatattagtacataaattgattatatttataagataaatatggactcattatcttgataggcaaaatttgcttctattttctcctttcctttcacaaatgcttgataaagatcaacaaggtatttttccgtacgataggtacgtgcctagtgtccttttactccacatctgaaacataagttttcagaaattttatgattattattttgagtaccttttcctttgttctcagtagttgtgcttttcattggagtatacaaatttttattctgggcattacgatgcgaaacattgcttcgactacgactgcaattttgattatgaccataactagtctattactttgattgtgatcacgaccacgactatgattatgattatcaaaaattgtagcattcacttcatggaatgggacagactcagttgggcgagattcatgattttttatcaaaagttcattatcgctggagtgatctagtctctatcgctgaccttctggatcaaagaagcagcagatgaagtagtaacaatctcttagtttagggctggatcatgatcaaggacagggctcattccattcttcttcttaacaattgttgtttctagtatacttgctgccccaaaatcactgtcaacatgtttttagactggtttctccactttagcagcattagttttcttcttccaagtcaatcctttttgcccattatagttagctacaatatgaccaacctgagaacaagctaaacactttgaggggagccattcatactcaattgattgttcaactagttgcttcctttcattaatgaacgtaatagattttggaggatgatttgagatctccatatccaccaaaattctagcatatgtcaccattcgtgaccttgtctaccatgatcgtccttctaattatgctcttcataacactaagatttttcttcccccaatattgcaacgccaatccattcaatcttatccacaccaggacagatttcaccattctcatcaagtccatatccgttgtccatggacgaagaaccactggttatctatcaagagcttgtccctttattaacactcgtggttggtactgaatgtccaattggctaagctccatagcccactttaataatctactaaatgactctggctttcgaagcacctggtgtaggggatgattcgtgagtactcttatggcatgagcttggaagtatgtgttgggttttatgc

SEQ ID NO: 232362 - DNA, 1849 bp, Cannabis indica
tttgaccaactctcgagtctatttccccaaaataggggtcaatgttgtcctcatcttgggtgcgtaggtgtcgtctccatcttttttgtagcttgggctccaaaggtctttgtcgtttctctagctttcgcgggagaggccttgctcgtccccctagtgccataacagaagaagagttcttgttcgtcccctttgatgctatagtaatagaggaagtcttcttggcaagtgaaaacagagcgttataacacttgtgggcagtcccttaatttttaaggagataatcaataccagtcatcattgggaacttgacggacaaatggtacactgataaaatgggtcgaaggtcgtagagggctagccttccaagcatcacattgtatggagacttcacatcaccactatgaacggtggtcttcttcggggtagtgccggtagtgagtggcagtttgatcttaccgcacggagcaatggtagttctgctgaaaccatacataagctatttgcatggctccaggtcttctaaggtcaaacccattctaattagggcttacttgaacatgatgtttgaaaatgctcctttgttaatcatcaccctgtactttggttacatgataggagtttgattctctgaaggtaataggttcacatctgtagcgttgagactttggaggatgttctgcaatctctaagactttggctcttagctcatgtcaaattaatcttgcataccttttaaggccttccttgagtttctggctaggcgagagcctctaatcacgatctctagcctgcctgcaactggcttaggctggagaggtgcattgtcctcagttggagcttcaggtcatacataccactgaagagcagcatgtttttgtctgataagaaattctatctcgtccccaactgattacactcattagtgtcatgaccataattattgtggtagtgacaaaatttgttcatgtccctcttccttgactctttgaaaggaaaaggtttgcaatatgacaccattgactatgtagccgtatggatctcctctcttggtgtcaaaataatggagtaggtggtaaagcaaggctcatactctcataagggcttgcccctagtcttgggctttattccaccaggggagttgcctggcttaccaccattgttttctctcttccctccattcgatatgtactgcaccttagtagcaggggtttcagagtttagtgacttcttcttgccaccttttaagcctttggctcgggtgacgacttcttttagcttgataaagccatctgctctataaaagaagtcattcatggtgtatactgccttgatacgaaggtcaaaccacagaggactcatctccttgagtccagctacaagtgccattacccttgcatcctcgctaagacttttggccttaatggctgcctctaagaaccgttgaatgtagtctttaaggggatcgtcttcttgtcgcttgacatccaccaaatcattgggttcaatttcgcgttgttggaaaggatcaaattggttgccaaaagcatccactttccaagagacgattgatctaggagagagcttaagataccattgttgagctaggcctatcagtgtggcagggaagattttgcacctgacgtcgtctctcacaccttgtagatcagtctgcacttcaaagtagtgaatgtgagataacagatgttctttctcggtgtattgatgtcaggaagggttcttgaacttcaaagggataggaagagctttgattcattcaaatagcagtgagcgccactctctatcaagtttgaattcaaataacttaggagtcgtgatccccttcact

SEQ ID NO: 232363 - DNA, 1449 bp, Cannabis indica
attgagatttatatatctgagaagactataaattaccttagtaaacctgctattcaatagaaattaacactaggaaaataatcatattaggccataatcaatagaaacaattgaaattgatgccctagtttttattaactgtcaattttcttaaataattgcttcttactagttttcttatttagttctttcttaatttttatttaaccaattagaagtaaaagtgtaatttcaacgtacttaactacaatccctgtgggatcggcctcactcgcggtgagtttactacttgtaacgatacgtacacttgcgtgtggaaaatatcataacacctgaattgcatgatttttttaaaaaataggaaataggttaacacaatcactaacttatctgtccctcatcccattttagttcgtgaattctatgcaaatctagataggattgttatagctaagggtcatccaagttgtgtgagtgcatttgttagaggtcatcgtgttctgtttggtccatctactattgcatgcatgttgaaagttgagtctatcagaaatccaacatatgggaaacaattcaatccagatcaaactatgctgggtagtgtgctaactggcagggataactatctttgggacaaacaggaaattttagctactcatctaactcctttctatagggttcttcatcaggtagctttgtacaattggtttcctaattcccatttgtcctccgatacacttgagattggcaagttcttgtatgttgtgggaactcatgtgtctattgatctgccatctctcatctttgaaaggatccttgaagcctcagaaacaattgcactcgtaacaaactacctttcccaagcctagttcaacgagtactcatggcagctcatccgcctcttacaacacatgactatcaagttcaaaatctggttcttattaagagttttctcttagtggttaataggcaatcatcgacatctccttctgcttccagggtgagtaaaggcaagtctcctatgttcaaagggttatcagattctagctggcaggtacaaatgttttttgagtttaaatcttttgtcaaacgatataagaaagatcaaaagcgacagcttgcctttgaggcctccatgtataaaatggttcgcactatcaagtctactgcactgcaccattattctggagattctatacctccatcaattgatacttctctgtccgagtttcatagagagtcatttggtgcatcctctgatgcgtctgggagtaacgcacatgtgcagggggagccgtctgtatttgccccagtctccagtgtagtacaacgaatctacctcatacagctgacccctctccagtaaccactgcaacacacttggtgtcgtctgggccactttcccagggggagcccgacaaagaactggagcaatcagctcatgttcaa

SEQ ID NO: 232364 - DNA, 836 bp, Cannabis indica
aatgaaaagaaataattggtggaacaagtgatagagtatgaatggctgcctactaaatgttcagcttgtgctaacttggagcatatagttgctaactgtaataaggtgaagaaatttgtgttgaaaaagaaacctgttgctgataaagtggcaaagcaggaataggataaagaacatcgagacacatgggaccttactggtttgacagataaaaaaatcctgacgctgagaatgtaacaactaatcaggagatgactgacgctgagaaggtttcaagggtgaggggaatggacaatgctgataatggaattatttgaatcatgcccaagagaaaagctatgagacagactaagttcaagttgcaaaagaagatccaaatgaggttaaattaagtaatgggtatgttgtgttacaagcagcagcaactgatgaggtaatggttcccaactcaaatttaattcttgatggaagtaaataatatgatagggtggaatgtgagaggcatgaataaaaaggaaaagcaaaaagcgattcttgatgtttgtagattgaataaaattggatttggagctttgattgagactaaggttaaacatgagaaaattcaagacatgatgatgaataactttcctgattggaatttttattctagtgatgttatttctgggagaatcttgctaattttgcaagataaatatgtgcatgtaaatatcataagtgaatctactcagctggtgcattgtaaaatgaagatttgtgggcagaaaaagaatatcaagggataactccaaacaacccataaaaataggaaggtttccttgagatattagtcctat

SEQ ID NO: 232365 - DNA, 1145 bp, Cannabis indica
acctcatatttccttccatttcaaagtcactatcacacacaccacaacctcaacatatgcagagaaattctagtttagactataagagaaactgaaaaagtgaaaacaatatataatatatctgtttgtatgtatatactatatactctactttgtatgcaaatatactattaatatataatatttagaaaaatctttttaaattaataatatatattttatgaaatttaatatcaattactattagcctctgaaatctgaatagttggtgggtgggggtgaggtcactgaggtgactttttagtttctataatccattgcaatttacaataccaatcactaatcaatcagcaagattttttaaatcaaattgatatgattacaaaaaaatgggtaaaccgtaaaccataaatgtcatacataattgtatatgtaattaatcaatgaatatgaaatgacatatcttgagaagaggaaaactccaaggtatatatttattataagtaattaactattataatttttatatatttatatataatcggggataaatcggggcggatagtactttccccgaccccgaccccgcctccgactcgggtacgtaacatcaatcctgtcccggcatccgatccccgctaagtcggggaatcctcgccccattaggggcggatccccacgagtctccatccccgtgatgtttatgtgcaacactaatccaattgatgtattagatttgattggttccaaccattatatgcattgactaattttctattggattcgattgaatccgtctaatccattttagctacactttaagttgatttcattaaaaagaaaaatatgtataaaaaacataatttaaaacctagtacttcaacatatatataataaacattattttagtccaacctaattgtcatgattccttaataaaactgccaaaaaataaaacttaattcgatacgcactgataattttataagcatttaggaagatgaaaattaatattttagtatctaatatttaatttactttaatcttacttgttaaatatatattaaatcaattaatttattttttaataaaatattttaaatatataaaattataaatagtgttatccgcattttttacaagac

SEQ ID NO: 232366 - DNA, 920 bp, Cannabis indica
atccaaaatatgaaatccgcacttagtgcaaattggatgttgtttgaccaaaaaagtgcgggattggatcggatgaacacccctacttatgtgtgtaacatggttttgttttgtttagtttcgttgtcgattcttcgatgactcgttgttagtggttatcaataataagttttctacgactgaaggggttgttagtagtgcaactacttaccttgcataatgttaagtgctcaagcttcgaggttgaatgaacctactgcaacaatttctactgttgtattttttaagcaatagatgaaactaaatacatatgtttttaaagttaactgtgatgttgcagtctttttcatcttattttatttatagttttttgtaaaacgatttgaaaattagattgttgattatttagcttattttttctaattctaatcttgaccatgtctttaaaaggtctttaacatgtgagatatctccattagattgtatgctattattaaaatgttatgattttttttaaaaaagaattatttttcattatttatttgttgtgtatgcatatttgtccgaaataataatatatattttgcacattaaaacgacgtagttttggggatgaatttattgttagatcttaaaccctaacctaagcccctttctcctcataatcatatctctctcctctttgttgtctcacagtttctccgccgtgagtcgtcgccttccgccgcgttttgtcttttcacattgatttgggtacgtctgttttatttatttatttggttagttgtgctctactgtgctaaaagtttgattcttttttctttcctttgttatgatttgtcttgaactttttatcagagtttctgtggtgtcatttgggtatcaggttgtgaagtagaggtttagtttaatcttgggtt

SEQ ID NO: 232367 - DNA, 1144 bp, Cannabis indica
cgtaaaaatacaaaaaaaaaaattattttgaagtgttaaaattaaaaaattcctttaatttattatttcaaattcaaatatttatttaaataaaatatttttaaatcgtatattttttttttttaaaaaaagacgtataatttttaggaaacctaaaaataattaatctaatcaaacctttttccatcagcacatctaaaagttcttgcacatgtgttgagaataaacaagaacacaatatgtaatacatattctaatagcccacactattccttgtgtgtagtaaaagattcagaacactatggtgtgagttcttaatcatcatccaaggatacaacttacaaaattcaataaggatgcactgatatgttttaagaggtaaattttcttttgtcaatttatttcagatttaatatatatacatatggtaattctaagaatatcgtacgatgatattaaaaaattattattccactacgtacttaattaagtaccacaaaaccaacagatagtaccagagtgattccattatgtatatataaatatattaaatattgtattgatttttatgcatttatatatatgtgatatgtatgtgaatagatagttattgttatacccgaaattcggctggaggacacgtgtcaagttaaagggaatatgattcggtgcaatatcttttatggaataactcattaattacgtaagtatcagagtatatttgtaacccgctggctgtaaggtcttaggcgaggaatcaatgtacaaactggaaattagtgtattaacgagaaaccatatgtcgctaaaggtgaatagtgaggcactggagaaaagtgacacataccttagcttgcaatgagcaaactaagtgtaaaagtcagatcgactcgaagaataagtatgcgagatgattatctcgctatgaggaaacttcctatagtttcatccaactaacaagagtgaggctcataaccctggcaagtcaaaagatttctgtatacccgtgatcgacgtaagaccaatacattgtcgacctcggaaaaaagaatggtcccaactcgctattgggatcactacaatcaagcatttgtcgagacatctccagattcagcaattaaagacgtgtttaatacacaatatt

SEQ ID NO: 232368 - DNA, 1254 bp, Cannabis indica
ctgaacacgggaggagatggccgagcaggtgaaatgggctcccttatgcgaattgcatgttcaacaggcctgggcgaggctgggagtttcttcttcctcttcaatggagtcacctgctcttcctcgacctcatcttcagcattcgaaggctcctgggcatattgtttggccctggcacaacccttcaacttagcctcgcgcttaagttgaatgagctcatcctcctcatgagctcgttcagtccggccagcaccagatttcctcttcttcctcatcacggacttaggagtaaagtcctcgggataaagcccgtacctcacaagattatcattggaggttaactagataatattcctatcttccccaagtaaccgggcaagtttttgagcgctatccctaagagcaagagtgaggggaggacggtgatatgtcgaaatctgctaaaaccgagtccgggtaatgctcgaatccttcaccatgaagtattcatcagaaaaactccctattttgctgatggcattgtcatccatgcaggtcaaccacttgaagcctggctgagagaaatagaagtaccccgacctaccttgtttgagggtggacttcaaatcgaagaaccaggcaacctcgtgaggagaaggagtaccccatccttgggaagcgtagaggacgaagagggcagacaaatacttaataccccttaggagtgatttgggtcgggcagagaccgaagaagtcagccacatccttgaagtacttatacaagggcatcaacgctccttactgaccatgggcccccgacaaagcgcacatccccttgtcaggatttgtggcacgattattgtaggtgggaatatagcagtccagctcgcctaggtgtccgccctggttgagagtacgaaggcgcgcctccgtaatcttggacggagaacttacccatctgacgcccaaggcaccctaccttttatgagtaaccgtcgtggcaagctcctcactgacgtagtccatgccctcgactaggacgtctccatcagcatcgactggctgcccagcctaattgtaccccccgtaatttgggggttcaacctcttcctctccgtccacctcagagggactgccgggacgcacatcgtccagctcgtcaacctcctggacttcagcgcccccgtcacaatcctcctccatatggatggtcgaatcctactcggcgctgggcagagtggcaagccgagccacttgaggatcggtagcgtcagc

SEQ ID NO: 232369 - DNA, 1063 bp, Cannabis indica
tcttgctcagctccctcagcccagccagaattggactttttctttctctctttcataggctagggtataaagtttgtcggataaagcttgtacttcacaaagttgtcctctgaggtcaacaaagtgatattctgagcagcagctggcagctggagaattttctaggccctttccctaagtgccaatgtgaagggtggatagaaatacacagggatctgctgtaatcgagtataggtggtaaccataccttccacaaagtaatactcgtcaataaagcccccaatcttgctaatctccgtgtccacggtgcccgttagccacttgtagtcttgctgagagaagtagaagtaccatgacctgctctgcttaggggtagactacaaatcaaaaagccagttgatgtcgtgaagggacgacacaccccatccttgagtggcgtagagaacaaatagggccaataaatacttaatgcctttgggagtgaattgggtcagacagaggcggaaataatccgcaaccctcttgaagtacgagtgtaaaggcaacatcaccccttgcttagtatgagcacccgaccaggcacaaaaccctttctttaggttagttgcccggtgatttagggaagggagataacacttaagtttgcccaggtatctagccttgtccaactctctcattcggccctcaattatgttggatggaggacacacccatctagcccctaaggcactttgcctcctatgggggaccgcctcggtaaactcctcagtgacatagtttgccccctcaaccaagatgtcaccctgctcggatactagcttcccaacctcattataccctccaaagtgtggaggggcgacaactccttcctcctcagcttcagaaggactatcaagacggatatcgtcctgctcctctatctcctggacctcaatgctaccctcgtaatcctcctcctcctccacagtgggcatgtcctgctcggcacttggctgcatggcatgctgggccacgtgagggtcaggtgcactaacttttcacatcgtctgctttgtgcgggcca

SEQ ID NO: 232370 - DNA, 596 bp, Cannabis indica
ctaattttgtagtagtggtaagtaatgattaattatgtcagtccatataaaatattctaacagattttccttcaaaagagaaacttgctaactttttttatattttttaaaagcaattttatctcatacaactttcttttcttatacaagattaagtctatttttaatgctctctttaatgttactatttatacaacttagattcatacattttttctcatttatacataaattttgatttagctaaatactataaattgcatccgctaacacattcttataaatataatattatttttatgacacattctaacatatatttttctaaaaaaaaaaaattatatgtgtgttttttaaaaaatatatatttatttatttttccaataacaaaaaaagtgaactaacaaaacccattaatttaagcccccccaaaaaaaaagtttacacatttatacttatataaataaataaatatagttttgttaaaaataaaataatatacccaagttaattgtaataatatcaaacatagcttttattctatgtttaaaacatacatattctctaattaattatcctctagttaattgaatatc

SEQ ID NO: 232371 - DNA, 1200 bp, Cannabis indica
ttcctccgggatagctctcttctgcgcccctgactcccgaagactcttcatggcctcctccatgcgcctgaactcggacatggtatacccatggtcaattagtgtgttcgagagatgatcggtctctgtagcaatctggcaaccaacaaaaaatacaaatacgtgatctcaggcatcaaaaagaaaagaagcttgaatatatctctaacagataggagcttaccacggtaagggccgcgctcacgtccttgatttggtagacgagattagtagaagcacaagtcgcgtatctcttcatcaggagttgatttaggccggcagccaagtggctcatcaattgtgaagcaaagggagccagggtcggtccaatgaaatggttgaaccagtcagtcacgggatccagatttaaatccctgacattcccggcgtactcactgagagtaaaactatcctgggcctcccgcagaatctttttcaaggcctctacttcagtgttccccttcgtatactccaccgtggcataattgtgcttggcaattcagagctaagtcttttcctcatcaacaggattgggggttaaggcaatgtcgggtggcactgtatactcgtccacctcggacggaatccctgagctgaagctgggggcaggagtgtttacgccttgtggcttcttgatcgcctctgtctccaccatcttgcctttgtgctttcgatccaggggaggaaggatttcaccttcttcttcttctacttcctcttcctcgtcgattaaaacgactcggtccaggggtatgctggaagaagacctcccgggagtcaccacaaggtcttgtgcctaaggcaggtctggctctagattgtaggtctgggcaagagcgtccaagaggtcatccatcgacttcgctgcttgaagaaatagacaaataaaggcattagagcattataaaaaaatcatgcatgcaagaacaaagtaatgaaactaatcctaccctgacgatctaattctgccctagcaaaagtatgcattaaaaggctggtgtcatcgtcccctagaaagctgtccgagggaaggaaccaatgggaagataaataggcagaatgatccaagagaatgggtacgggtggactggaccccattcgggaccggcctaagaagtgaccaagattggaaaaataaaaacccttggcatgatcacccca

SEQ ID NO: 232372 - DNA, 1947 bp, Cannabis indica
gattactagaaaataagagcaaggaaaaatttaaactttgattacaatggaataaaaatataacttgtaataatttaaactttacaatcaatccaaaaaagacaacatgtttcgggatctcataaaactttttgcaaaatattacaagttattttacatgtcgacctatgcggcaaaatccgagaatacaaaatatgtccgctggtagaccaaacctgcttggtctagtatggcccaaacatgtacaatccatcgccaagctctcgaactcatggatgattatagacagatttaccatttcctgcacagtagagcacccgtgagccaagcctaacaagacaatataaatatcaatatacaaaacaaatatatatcacataattaatgatgccatttcacttattgtctatttgacatagacatgtgcgttacgctcacacgcctatttatgtctatatgacatagacccacgtgttacgctcacacatctatttacaataaggccttagaacggtttatctcggttctaattttcgagtctaatcaaattattcctttaacgcataattctttacttcaacatatatagcatggcatagtatttaaaattatttaatcactagggtaataaccctaggccatataaccgcccattttagggtaataaccctaatctcggttctcatttaatcctaattataatatcaaacatgagtgccaccgcgtttaactctacgtgctaagtattgtcttacccaatgtcccaagtatatggagattccaaatcccaagtgctcctgaacaagtgccgataattctagtcacaattcatagggttaatccctaaatctactttcctataatcatataattggcatccaaatacaaataaatatatagagctcagaacgagctttccaacgatatgtggaacaccccaaacagagtctggatcaaaaagttatgaacaatacaagttcaacatgctatctacccacacgagcgggccgtagcgcctcttgagcgcgccgcggtgcctaggttgaaaactcggaaatgcaaattcagcaactcaaaaatgcaccaaaacatcccaaaatttaacctaaagcatgctcaactaaaaacaaacatctcaataattttaaaccagcataacagagagctaaaaacattaaaacaagctctatcaacatcaattcatgcatttgaaccaagctcctcaagaatcaatacaaatttacaatctttacactaatccaaagcttgaaaactcaatcatcaaaacccaattgtgaacccaatatttcagaataaaaaatcacacaaattaagcttcaataccagaatttcaaactacaactctaatcttaaaaacaaacaaaatgatctagaagcataactcacaaaattttgcataaaacaacacaaatcatcctattttcaaacacatgcattcaacaacttaaacaacaacaaaacttgattttcaaactttaattgtcagaataaaactcagcaaaaagagatcttagaagcttaccaccaattccaagcttctaactccaagaactacacaaaattcacttccaatcaagccttagattctaaaaaattatcaacttgaagaagataagaaaggagagaggaagaggtcggttaaggggctgaataaatctagaaaattgattccatttctctcaaaattgtattttattgaaagtataattagttggttaaataaccaaaatgccctccaaggccaaaataagcatacacgctcatcaagggtaaaattgccatttcaccacacacacaaataacatacaaatttcaaattttttaattagtcataaaatgccaaaataaagtcccaaaaatatagtttgggcgccgaactcggtgcagcccaaaatacccaattgtgactataccgtgccaacttgt

SEQ ID NO: 232373 - DNA, 1499 bp, Cannabis indica
gggacaaatcataaccaattgctcagctgtcaaaggacagttaaaatagttagccattcaaagtggttaaaacaccaacaatatagatttagttcacgccagttttagtaccaagaagcggcatccattctttctatttcgtgcctttcttcagatgtcccagacaaattattttgcaactttaagaagtcgggttgatattttattaagagcggctattggcttgctctctacaacttgggtctgggtcgtgcttctccttctaagaatttttttaattctttctatttttctgagtattgttcttaaaattaagagcgatgtgtctataattctttgggacttgtgttggatgacaatgttggtctttgtaatatgttccaagtagttagttttgtccattattatagatcttgtactgttgttgctcattctttggccaaactagcattatcagctagtagtagtgtgatttggtagacaagttattcgagttttatctatgaactattgatagaatatgatattcttgaataaatcctcacccttaaattttttagagtgtttgctgctcttagtattttgtggttgagacttttcttctaaaaattatattatattatattttttcacatacatcattgtttgtaatttgagaagaaaatgaatataaatcattaaaattctactaacgtaggagcaatggatcatattaagaaatagtaaaacatcatttaaaaaaatcatttattttgtatcattcttccattgatggattaattttttcctatttgctatgttagaaactcacataagaggttttgctctcaaaagacgggtcatgccactctgagaagaatggccgccagttcgctttcagaactgataattttctctccacaacacagcaatgtttttttgctgtctttcaaaaatataaataaagaaatgtatttattttttatgaagaaagcacacatttattattgccaaccaaaacaacgtgaacatgtttccttgcagaccatgatgttattgtcctcccatgaaagtcgaaaaactaggttttgggttaatgaaatgataggtctattaaacaaaaagggtaatgagagaaaatttatacatagatcataaaaatctcaaacaccaaataagagacaagaaaacattcttttaaagaaaaaattgacactataaaggatgcctcagagcttgttacatcaataatatagttcactctatttataccaaaatccaaaaattataagcagcataaataacaatcccaataattatttttttctcagacttgatcataattttttttttgaagagaatgaaacaacaattgcaagtgcagttacagccttctaagaaatcatctccaaataacaaaagtttcacaaacatgttctggtatttgacatttgaaacgaagaacactacataaactattgccttgacaaaattttggtcccacacatgagacatttccc

SEQ ID NO: 232374 - DNA, 1286 bp, Cannabis indica
tattccatgcttgtcactaatctcgacgtgctttcggttttgttgatgctgtggtagttagattttttgtgacttttgttgtttcgtttcaatattataatttagcatgttgcctgaaaagtgttgaagcgtgaatttaaatcctttctcctcgttataactctagattatttagtaagcgtggcgtgctagtaactgattcttccttaggaacagaagcaccaaatgaacatatctacttcattttctctgttgattgattacttgcgaacgcacataagaaagcattgttcagatatgtttcgtacatcacttagttttaatcccagaatgggaaatttgatttaaaattagttttcgaatgttgctgctgacaggggcgtttcacatatgtacctgggcaagttagagcatttgggatgcttgctggaggctctggcatcaccccaatgtttcaggtatgttacctcagaaatttagtttatcgtatgggaatatgcttgtgtgtgtactctaggattttttctacttcgtcaattctcggtccattcattgtttttttctcttacttgttcaggttgctagagcaatcctagaaaatcctaaggacaaaaccgaggtgcatcttatctatgccaatgtaacgtacgaggatattcttttaaaggtgattcttcttagttccaacacttgactcaacaaccccgaaacatacatttattacttgtatcttggatcattttatgacttcttagaaactcggtttagctgatcctgctctcggtgcttgaaattctgttgcatggcttcggaatctctagtttaatcacaagaattaacaggaaatcgatgtaatgcaacagcattctatttgatataaaaatctactctataaattcatctcttttcggaactgtgcaggaggagttggatggtctggctaccaactaccccgaacagtttaaagtctactatgtattgaatcaggtaaatgacctagattaacatgtttttgttcactttctatttactacgtgttaaatatcagtgttaatgttatgatcattgttgagtagctttaaagaaaatgttttgtctttccttgttttactcacctattaccagtaggcagtactcatcccgatgtgacgggttgagaaatttagagacagaacaccttaaataaattaaaattccatgaaatttaatttatgttcttttatagagatcttaataagttgagaatgatcaaatcatgctacctaaaactaaagacaaccaaggtc

SEQ ID NO: 232375 - DNA, 1312 bp, Cannabis indica
attaaccaattgggcttatggggtcttttatggtgtactataatttaatgggcaaactatagtattaagggtgctctcatgtgcctctaacacataattaagttgttaaccatcccattatggttattagcaacattaggcacataggtaatgattatgtattatgaaattaaacttatgatcgttttagtccattataataattctaacaaatcattcattaaaaatataacacaataaattaactccacaaataatatgcttgtttaaacatgaataatataatcttatgtgttcaaaacatgtagcctattattaaactaaaaatacttaatgcatgctatttagatcataaaatgtataatgtggagtgcaatatcaatatttacattaatttacaaataattatatagatatatatatttgtatgtacgtaaatgacagtaataataattgcgaaaaataatgatatatgattagggatctggccggaggctgaaagttttaacgacaaaggaatagggccaataccttcaaaatggaagggagcttgtgagagggcatcagacttcaatgcctcctccaactgtaataggtgtgtcatataataaaattatatttaaataaagcaacctttaatttatttaaattataaacatgtatatattctaacatactttatatataaattagatatttttgtagacataatttgattatatatataggaaggtgataggcgcaagattctacgttcctgatcctaaacaagcggcgagtaaagaactgacaccaagggattcaactgggcatggaacacacgtggcctccactgcagcaggtgcagtagttcccggagcttcagacatgggtttaggcagtgggacagcgagaggtggtgcaccatcagcaaggattgccagctataaagtgtgttatagtggtggttgttcatcagcaggaatattaaaagccattgatgatgcaattaatgatggggttgacataatctctatgtcactcggatactcaacaccctcctccaacagcttcttggaagatccactttccatcggtgctattcatgctgaccaaaattctatcttgccagttcttgcagccggtaatgccggccctactccttccacagttagccacaccgcaccctggacatttactgtcgcagcttccaccattgatagagatctcaggtccataattcaccttgaaaatggcaaaattatcaatgtaagtttttatatatatctattctatataaagtgtgcctatataatagaattcttggtttatg

SEQ ID NO: 232376 - DNA, 542 bp, Cannabis indica
agaattgctactaaaaagagtggatttagcatcatagtttttcaagttgattaataaaattttccttttcaaaaaaaaaaaaagtttattggagacatatatttattaattacataaggcaacttggtgcttttaagcttttaacatttctctaaggaaatggagagctcatgtgttcttattttataccaagtcaaatgcttttatttttcatatgggccattcgtcataattatgggaccccttttgatatttcttttatgaggtatacatccttaaccttatcatgatttgattttctaccggttctcgaggttctttgaatatgtacttatttatgatatgagtacttcaattaacggcatagcttagttggtttaccggcatagttatttatgtatttttctctgggataattatattagacaccttaaattagatcttaatatcaaaaaataacttggtcatttaactattctattttaatgttaaatataacgttgccacataattaatgctcttttttcttgttaggcttaatt

SEQ ID NO: 232377 - DNA, 1349 bp, Cannabis indica
gacctaatgccctttatatagtgcagggcttacaacaaatctagtttaagcaggttgatatcccttaaagcgaggagatatcacctcttatttacatattaaatatatagaaaataacctattaattattcctacaaaataagtaaattattgaagttgaatccctattatcgcaggttgttgaagtccattcgtagctgagagtgtgtgtccagaatgaaagctataaagatactaaaagtttttgcaaaaagaggagttggtcggcctacccttattttgcaggacctggccaacctatgtactcctatggtcggccaggtattgctcctgcagcatcaagatgtgtctgccagctttcccatgtgcttaccaacttttccatgtgcctgccagctttggtaagtgcaggccaaccttagtatgtgttagccagccttactagcttctttgtacaactttccttgaaaaggccaggcttccttgcttgaaaaggcccttcttggtctaacagtcaccttattggctggctaccttatgctcaaactttggccagccttaccagtttcctctggcaaacctatgtactccctttggctgactagacatggttgtgcaacttcttaactactttcttaaatccttttgcttgttgctcgacggtattaccatgacttataaggagactttgtcctgctattgacaaggttgtattccacacgtcctccgacttgacttacgttgacatgccacattaggtggacaaattttgagataacatttgcccccaagtccctgttggtatgttgtaaggatagggacttttcagcccttgtgtaacgccctaatgctaaggcacgttacagtgctttttcaattacagtgctatctttgctaatcaaagatttttctcgaaaaatgtgtcaaattaaaacttttataataaatattaaactttataatttataaaattatttacaagttctgggatcccgctttcaaacttttaaacataatattccaatatacatgatatccaggtcgcacaacgactacaaaatataatccctagatgtcccaagaccgaacactccaggtcgcgctgcctcgacatgtacaacttcatccctgctcaagttcactcctattcagctttcgcctttcctttacctatatatggaagcagaactgtgagttaacaaactcagtaagaaaagcatataacatatcacataatttttgacttgtatttaggcgcccatacacttatttacaaggcttaacaaattagtaagaacgttccatactagggtatagccactataccacatacactacgtacctcactt

SEQ ID NO: 232378 - DNA, 1033 bp, Cannabis indica
atactactataatacatatttatattttttgtagcagtagtcagttttgggtgtttaatttcgacggtactctatcgtgcaatagagttccgatacagtgttcgactgggctgttttatcctgggaacgaccggcaaatttcgactgcttgcacactcctgggcagtgctgcgaacgtcttaaagagagcgacgtagttcgcaactcaactcagaatttttcattcggtaatatcgttcttctttttatttttgtagcagtttattcaatagaacaagccaccatctcccctactgctcttgctactagtctccttgctgcaagcaacttccctcttgcaccttgggaaaagttcactaacaccccaacaccacctccttctctccaaaatattattaatcgtctatccacacccacaattgaaacacctataacaacacatataacccctaacacattacctataaccactacttcatcacctataaatactacttcgccacctgctacttcaccatttatagccacccctaacactaccactaaccagactttcaaaaggcaactgttcaagttggcagctctttttgtaacatgcttaaacgttgttgtcttcagtcatctactgggcagcccaattatgattctactaccattactgcaactgattttgaagcagaccttgttgatgatgagcaatctatacatacagctgaagatgatgatgctgacttggcagttgttgcttagcaaccccaccaatcaccatgaatgttttaggttggaatgctcgtagtttgaggaatgatcaagcattccgtcaactgcgcttgcttaattctcagcaagctcctcatctttctttcctcatggagactaaattaaaatctgggtctgttaatagaattcgtgaagctttaaatttttctaatgagattgaggttcctagacaaggtcttgggggtggtcttatgttaatatggaaaggaaatcttaatataaccttgttttttcttttcaatgaatcatattt

SEQ ID NO: 232379 - DNA, 1605 bp, Cannabis indica
atgttttgtctcacgatcttgattaaccggttctatatcctttctccaaggtgattgattactctaggttgtctcccaagtttcgagcattaattttgtcaatttctagccttactgaacctgaatcttttgctcaactcatgagataccaaggtgggataatgccatggatcataagattgttgccgttgaagctaatgacacttggacaatgatttctttacctccttatcatcatgctataggctgcaagtgggtctataaaatcaagtttaatgtagatggtagtgtggaacggcttaaagctcgattggtggctaaaggatataatcaacaagaaggtattgattattctaaaacctttgctccagtcattaaacttgttacagtcaaattggttcttgccttagctgctattaatggttggatattacaccaacttgatgtgaacaatgcgtttttgcatggtgactggcatgaggatgtttttatgactctacctcctgggtatagtcctaaggggggcttccacctaatgatgtttgcaacttgaacaagtctttatatggtttaaagcaagcatctaggcaatggtttgaaaaattttctaatgctctaattgaggaaggatttcatcactcttccactgatcattctcacttcatgaaattctttggtactagtttcatcatcttacttgtctatgtagatgatgttattctagcatccaatgatttacaacaattagaaaacttaaagaagagattgaatgacagattcaagttaaaaccttggtgacttgaagtatttccttgaattggaaatagctaggtctgctaagggaatttttgtgtgtcacaaaggcattatgctcttcaattgcttaaagacattggataccttggaacaaaacctgtcactacacctatggaggctaatctaaagctgagccaagataataaggaagattctttaccaaatccaacactatataggagaatcattggtaaactttagtacttaactatcactagacctgatttgtcctatgcagtaaataaacttagccagtttcttgttactcctaaaactagtcacatgacagcagcataaagggtactgcagtatgtgacaggcacacctggacagtgagttttcttctcatccaaattagaaattaaacttgaggcatacactgatttggattgggctgcatgtccggatactaggaggtcaactactggcttttgcatctttcttggaagctcaatcatctcatggaaaagcaaaaagcagcacactgtttcgagatcttcaaccgaagctgaatatcgtgctatggcaaacacaacttgtgaaattatttggttaagttctgttttgaaggagttgaagattaattactaaggacaagcaattttacattgtgataacatagtaacacaacatattgcagccaatcttatctaccatgagagaacaaagcatattgagataaattgccacattgtgagagaaaaaatccaggcaggaatcataaagacagtccatgtttcaaccaaggatcagattgcagacttgttaacaaaaccattgtttccaaca

SEQ ID NO: 232380 - DNA, 1001 bp, Cannabis indica
tagcatgtggtcttgataattagagcaagtattgtactactactattcatgttatacgtaagtagagtgggataccaagaccataagagtgtagcgggtaagcgttaaactgccaaactaagttaccacccctgggtagatgacttaccattgggggcaagtgactatctaagccactttgggggtagttacatatctcacccctaggggtacttacctaccctataggggtggttgctcaaacataccctggggtagttactcaatctcatctccatacatagaacataccccatggaaggtgaaaaatttacatattcctcattaattaattagtctcaggtaatctcgtgacaagtgtcatcatactcgccacatcactcttgtcaagatttaaaacttttggtgtgtttacttatgacattagagaataaaaataaataataaatttactaccttgttttcttatctaattttgttaaagaatgaggatgaaatatgtggatctcacactaatttaagaatgagaattaagattagcagtccccaaggttggtaggattaccactccctttcttttttaaaattatgaaatattatttttactctcttttaattaatttttttttaaaaaaaaatatccccaaaaaaaaaacataaacaaagagtattttgtaagttaaaatagtttactccgattctaaaataatgtaaacatatcaatgggaatacttcttattctaattcttattcgtagtagtcaattttcttaaaaaatttgtcttgctagatgatcttcgtttattgtttgatatgactcactacgatactgttagatattttagctaaaggttgaaaatgttagcttgcagatactcgataggtgtagagtatgaatattatacatatacatttatcatgcatataacttttaaactttatttgttatatagtataattcatattgtgcatgaaaacaaatgctataatcttttctttat

SEQ ID NO: 232381 - DNA, 896 bp, Cannabis indica
atttgcaaatagaatacaatagcaaaatgcaaaaatgagcacacacgaggctcgccaatttcacaattaaataagcacaataataggcttgtcaaataatttatggagaaaacaagtgtcaagtttgactctccaatttgcaaataaggtgaccgcatgtcaaatcaattattcattcaccataacttcattatatatcagtatatttagaacttaataaataataatctgaaaaggacaaaaacaattatttaactaaaatattgaatttggttaaactaaagaaacgttgcacctgatcacgtgtcagactatggcattttgtttgaagatacatacaaaatatccaaaatggagatatgagttcatttagttgtgtggatcatcatgtgggccttcgggccttttaaaataagcaaactccttttactttatggcccaatagggttactcagcttttatccctttatcaatcaaacgtatatattgaataatagcagaggcgccggtgtaattaatcaataaattttcttgtgctttctctttaaatgacatgaaaggagggagagacatttcaggctcttatccgctatacgacattgctgcaccccctttaatgcgaaaatttaatttgttttcttactgtgttggcacctccagtgcttccgtttctgatttgaggcatagagatgtcgtttggagttctttgatcagttgtgcctccggcgacgagaaagacaacaagacggatgattgtgttttgtctattctctctcttgtatagcttttttgctgagagaacgcaggcatacgtgacttcttcattttgatttttgagattctccaaagttgcgattttctattgagaatagtctcttcgttattagctatggtcg

SEQ ID NO: 232382 - DNA, 1196 bp, Cannabis indica
ataaatttcatattatccaacaaattaacaccacttacaactcaaatggcttaggtagagttagaaataatggtacaatgatttatatgaaagcgaaatggctataattttaaagatatgtgtagatataattaaaatatcatagacttgatttaaagaaaatcatacatatacataatgaagactaccagcaccatgagaatctggtctaaacttggtcatattatgggctacctaacttgaaaaattctttgaaaatctttcatagtttcttcaagcataaaatctttgaaaggataatgatccatgtatattgtcagagttcgcaataccgttccgttggagtactcccttcctgtcacaaaatatagaacacacaataaaagaaaaaaaaaccaattgctaaggataaagattataaagctatatataaattcattacaacaaaacatacacacaaaaagactggttgcctcttgcccgcaaatatgtaatatagagaatatatgtatatatatatataattatatatatatatataagcaaaaaaaagtaaaactgttagttgtggacttgagagagaatggtatgtgacaaatacttgtttcaatattatatatttatatagacatgacatgagtacattgtataaaaatgttagaaaaaatgctattattatataagacaataagtgtagaaataaatacacaatactacaaatagttattactatttaccgtatgttaaggttagaatttcataggtctatctaattaaacaaaaggtaaagttatctagttttttattttttactgaatttattttttaataatgagtggtcttttcaaactaccaatgtaatattatgatgcttcttcttcttttatcttttaattaattattcatacataaatgttattaattaattagaaagtagggatgaaaaaatgaaaagctttattaaataaaaatactaattaaaaatcaaataaaatctaaaaatttgagaaaacaaataccaataagcaaaactcatatagaagatgctacatcatctccttcgtattctcatctcatttatataagtatatagatagataaatatagatatattgatatattgatttgtaaaatgatttatattaatgcatatattggtataggtataaaataaaacatgaaacactaaaaaaaaa

SEQ ID NO: 232383 - DNA, 1009 bp, Cannabis indica
ccagtgcgacttactcgcaaaacctctgagggaaccagtagtgagaccagtacaagtggctcgactggtataggcgcttagagccttgagcacattagggctggagctataatccccctacgagattactttaaggacttcataaaccacctcggacttgccccgtttcaactaaatcccctgtcctacaaaatccttacaagtttgaaggttctgtacaaaatcctgaattgggagtgccccaccccctagaaatagagtatctctactctgataaggctgttctagcgaggaagaatgcggcagggggtttctactatctttggactcacacatgcaatcacaagatcatcatggattttaccaacaaaacttttttcaaggacgaattcttctagacgactgacctttctcccattggcacaatcaccttctgtgtaattcgtaagtaattatttgcattagacttggtcaaattaatccatgccttttattctagtttatctgactgcaattttactttgtttttgatagctgtctcgaaaagacctgcccctactcttgagatggccaagcgatgcaggctcttgctgactctcccgtatggccttaggtcatgcgacttccttctgaatgaggtcaacctgaggtctgtggatctcttaactgacaaggagtttacatgtgattataaatatcccaagtattattctttgcaaaaggttcccgtcctagacaaggagaaggctcatgattgcgtggctcgagcacaatatctccagaatactgccccttgggaagctgaagaaggagcatcccgaggtaatcaatgttgttggtcacccacactacttagggctgagcgtaacactctagttacatttcgagatagccactttaacttttatatttggcatcccctcctcgtagatcgtgttacacataggtttgatagttagtatcccagattccatgtccaaatttgctgtacttgttatagtgagatttc

SEQ ID NO: 232384 - DNA, 1945 bp, Cannabis indica
aggagagagagagagagagatcgggtaagaggcaatgatagtaaccctaataaaaatgaaaccctaaaagttaattgttcattttgtatgtgtagtcgacccaacaattaaaaggctcagatatatggagactttttatcccagttcttatgtaaaatttgggataaaaagtcccaattaaaatattaagttgtgtttagcaaatgcataaaaatagcctttccaacattgttttttgtctgttttccaaacaaggcccttattccaaatatttatttaaggttccaaatgtataagtgggatcaaattttttaatcccactttttatttttcaagtgtaaaacgtgggataaaaagtcccttttgttgtagtgcctaggagtcgccttaggtgacaactgccataagagaatggcacaggtcactcatcgcaaactatggaaggaaaattgttcgagttggttcccacaaccataagcagggagaacacctttaatcgagcttgtcctctaaagcattcccaattacttcatgtcaactgctcaagtccctagtactctttgtgaacaacttgatcgtattctcgctcgtttctagtgggtgggaaatgctgacaaaagacactactgcgctttaaaatgatggcatcagatttgccaaccaaagagatgtggaggccttggttttcggaggtttaaagatatgaacatggctcttctttctaagctgggttggatggttattcacgaacaacacatggtgtgggtgcaaatgcttctagataagtactgctttaagataggattttggcaaatagaaaagcatggcgctgattctagttgctggaaaagcttgcttgaagctagaagaatttgcgcggaaggtgctggtatcttgattgctggtggttcgtgtgacatttgggatagaccgtggatcccttggcgcaaccctgaagagataaaggatagattttagtttagacataatcaagctctttggaaggttaaagacctatttcttgatagaacccgagtatggaatgctgccttgatcaaggagtgttttgatgaagagattgcaagtgatatactgaagataaggcctttgcaagaaggtcatgatattcttttttggaatggagcaaattcgggaaaaaaaactcagtaaagagtgcgtattggattagccagagacaaagattcaaagatcctaagccaatttgggaaaaactgtgcaagattaaactccaccctagactaaaattgttcatctagaaattgttctctgatattctcccctctagttccagaacaggatttctccagggtgttattcgcacttgtggcttctacaatatggaagtagagtcctctttccatctgttctgtcaatgctctttcactagagaattatggttcaaaaaagggattcgtttagacagcttccattggaataaccttttggattttggtttgtggtggagtaccatacaggaccctgagattcaattgttcattgggtgcatctgtgaaatgatttggaaatggcgcaatactgctctttttacggataaacaatgctctgtggatggagtgttcttcgattgtcttcatgagaatggatgaattctcaaagaacaaggcctgatttgatctggaggagccccctgctgcttgtcctctgctgcattcttcagtggagagtgatgattactggtgtatcaaagttgatgcctcggtggtgggcattgaagtgggatttgctgcaatccatcagcaggagctcatccccgattcatggttctcaattgggttttctcatgttaaggacatccttgaaggagaactatgcggaaaagcctgtgctctgacctagccttgtcaaagagatcacaaaggtgcgtattgagacggattcgaagtcagctgcaatgcttttgagt

SEQ ID NO: 232385 - DNA, 1118 bp, Cannabis indica
ggatattagtaaagcgtatgactatagtcaatttgggagttcttggaagcgcttttgaatgcctttaaactgccagccaaatttatctagtggataatgacatgtttgagagctacttcttactcagttttgatgagtggaagagagcaacggaacttcaaaggcgagaatagtttgtgacaaggtgatcccttatcccctctcttatttgtcatgataatggagtacttgaccaggaggttacttttagcaaccaatcagtctaagcttagatatcatcctttatgcaagaacctcaagatagtaaatatttgcttcgcggatggcttgatgttcttctgcaaaggaaacttaagctccattcgagtgttaaaggaggttttggatgaatttagtgcaacttctgggcttgcaattaacactaacaaatctcacctttactttggggtgaaagaggaagacgaacaggcaatgctgacagaaatggcttttcatgaaggagcatatcctctcaagtactaggggttcccctaagaccaacaaaatggaaagctgaagattgtggtatgatgatcaagaaaatcaagcaaaaactccatacttgggcaactaggcatctctcgtttgctggtagggctcaactcattcactctgttttacttgggctttaaaactattggatgagcatctttagtttacctcatagtgttacaaaagaggttgaaaaactttgtagaggattcttatggggctggaatggaatataagtaaacttcacgtggcgtcttgggaaaaagtgtgccttccaaaggcttatggtgatttaggtttcaaagatggggttaaatggaaccaagccattcttgctaaatatgtttggaccatttcatctaaaaagttatctcaagaacaagtctttctggaactatgaacttaagagtgatactagttggtattggaggaaattatgtcatctaagggacaagttcactcgagaagacattgtgaaggctggggctggtgtgaactgattcaagactaatctgttatacaatagttgcattccccaaactcagttcgagttcagcaagtacttttggagctccctaaacatgccg

SEQ ID NO: 232386 - DNA, 1442 bp, Cannabis indica
actcaaccagtcaactttactacgctggactaggaaactatgaagcatacttgctttggcattaaaatcctgaacagcttcagcttcagcttgttggaactcttcatccctcggatgttgttgggcagcagttcttgcttcaatatacttgtctttggctctatgaaaattaacctccacatctcctatagagttcttattgaactttctaagagaatgtttcagtctcataagttttagatacagagctttaagaccaatccctctcacaggctgctcccagtttgtcatcactgtccttttaaactcaggatgatgcacccaaagattaaagaatctaaaaggtttcactccaatattcaaaggttgggccaatgtcacaacacaagagcaatggtctgaggtcgtttcccattgataactagctccggagttaggaaatatatcaatccaatcctcatttttgaacacatgatcaatcatggaataaattctatcttgcccatcttggttatttgtccaagtataatgagaacccgagctagccaaattatccacaagccccaaagctagccagttattggagtcttcaagctcttttctagtcacctgttttcccccactcctatcagagtaatgaaagatagcattaaagtccccaagtaaaagccaaggcttgacatgaaacttcaataaagtgagatcattccaaagacatttcctttcctccaaggaatttgaaccatagacaaaagttacacaaaaatcatttggaattcctgccatttgaacataacaatgaatatattgatccgtttcagcaacaacaataacctgaacaaacactttcctccacaagagcaaaagcctcccctctgtaacattactagagtaatgattccaaacatgaaacctatcttgaaccataccctcaactttattattcttcattttagtctccagtaaacaagctacacctatattttttattctgcaagtatccacaacaatatcctgcttattactactattcaaccccctcacattccaacacattattttacaattatccataaaacaaccagctaaaccaagttccccttagtctcttcaacaatttgaacttgaagagcctcataagcatttttcgaactattttctttggtgttttcagccccctgcacttggccttctaacattattttcattttgcttctatttgaaacaagttttcttggtgtgatccaatctgtgcccttgcctttttctcctccttcctcatttccttctctcctaaattggccttgattcttgaccatagcagcagcctcattttgagtgttactttcgcccccttctttctgtgtaagttgagcagtagctatcttctccattgaaacgtttccttgttcagcttcttttgtgccccctgtttcagcttt

SEQ ID NO: 232387 - DNA, 941 bp, Cannabis indica
aaataattttttttttaattttagtactttgataaaataatatattaatatatttatttatttattttaatttttaagttcatataatatttaatttttttacgaaaatagttaaaatatgatttattcatatatattattaataaaaaaaatataaacactggcagacccatataatgcttaaaagaaattctagtcccctcccgttaatatattttaacatttatattatattttattactgatttatgaatatccagtatcataattttaataattttttaattgtatatatatttattaattatttaaattttatatcaaaactggtaaaatttcatcaatttaccgctaaatataaattaaaaataaattttataatataatttacttaagtagtttataaaagcaaatatattattttgactacaaaataatattttactatgtatataaatagatttcatattaaatcctttcgtatatttaacgtacgatcctcctttaatggtagagaaaataattagagaatcgaaaaatatttatagatttatatatagttcttttttaaattttggtgcatgcacatcaattatttgagaaagaatatttacttgaagcgcagaggaattattcgatagcgaaaatattttgtgttagtattattcataaaaagataaattgttggatcacattatatagttttgtaatgttcaaaatatatcttgatttgattaaaatatatatgggtgattctacaatgcacccctttaaaagtgatgtactgatgcaccctctacttatttcggcattcagaaaaaaaatttagtctattttttttcatattcatatacgttatagctatttaagatatcctacaaaattttgagagattcagaataatttacaatataaaaaacaatgttcaaacagtctatttt

SEQ ID NO: 232388 - DNA, 678 bp, Cannabis indica
gccaactgatcgtcagagaacactatagcggtaatagaagcattaacaataccggtagatatgttaacccaattaccttcagtagtaatgttcataggataatcatacgtattagcagcttgtgtacggacagggttgcttagggtttggaaattcgaaagagaaatgaaagttggtaaaacatggtattgtatcatttggattttttgttctttggttaaggtgttgagtgttccgggtttgagtgaagaggcaaaggcatcgtttgttggggctaagatggttaagctgtttgaggcactcagttggttttcgatctgagtgagtacttcggtgcttttaaggaggcggttgaagacactgaagcctcctactttttcgaggattcctgccacgtcggtggggatcctgcttcggcctttgtggggtggagcttggactattggctcttgtgacaagggtggagcagaagaggccactgaatctagggcaggcacccccgaagaagactttgacttctttgggggttgagctaataagggtttggttggtgcttgtgctggtgattgggatggggcatgagaagttggggttgtggctaaagttgttgcatggaagaagattagggttaggaatgagaagatcgtgacaaagtgtttggtattcatgatgattatt

SEQ ID NO: 232389 - DNA, 1025 bp, Cannabis indica
aaataaaaaaaaatactttttaaaaaatatatattttttaataatttttaataatatcatttataatctttatagtaagggcccaatttttttttcctatgacctattttaactcaggaccgaccttagatgctaggcatcttagcattgctattaggtgccagtggtgtccagcaccttttataggcagcgctgcacgattagttagtgatattttttaaatgctattttgttaagttatataagatttgatacttaattacaacaataacggtatgatatcgaagatggtgctaggcaccagtaatattttttagcaattcttgatatctttgtggcccagaacaattaacgcccataggttaacttaaagatatccaacacaataaatatagagattatatatgttattgtaatttaatattgagtcttactatttcttacaggttcctgaatataatagtatggaaagaaaaatcatccagcttgactgtccacctccaaacgtagacttgtttagggttcaaggagtatttccttcattttcgagagatggctcgaggcttgcttttgttgacaatgagttcatgagagtgtgggtagctgacaaagatggattgtatatggtttaccaggtacatatcataaacataatcatacatacatatatataatataataaataagatttatcctcctgaactataacccttgtagaccgaaggcccagacaatgtgtttggaccagtttggaaccaaatcgaaggaagagatgagttgtttgtatgcaagggaccagcattcaatgtaaagcatgaactggacatttgtctcttgccaaatattaggcatcatcatcattttcaatctaaagacattatccaactcacaaatggatacaacaatgcatttccatcacctagtccagatggtataaatttgactaacatttatataaatcgttattgatgcattttgctattaggtctcacgtatttaaatttaatcaattatataaaaaaaaa

SEQ ID NO: 232390 - DNA, 1054 bp, Cannabis indica
cataaaatgttatttatgatctttattaataagtaaatctgattataatgaaatggattttatttagggcacaaaacccaacataacccccatatcgatttacacgtacacttcacttcgtcttcaaccaccgaagcctctcctccgctctggcgattaccaattatcctcacttcgtctttgatctatccaaccccaacgagattcgaagaaaaccctatcagtaagtttttccccctttctcttctcttctttcatggctttcgatgaaaaaccccatttcatgggtttcttgtttctctcttagatttctcttcttttggtcctacaccgatatgtcaacggtgcctctggtgcgtctggtggtacaactgatagagtgagtttctatagctttgattgttgttcttaattaagaataaaaaagtgaagataaaactcagtgtattatttgaatgtgagaataaaaaatggaagatatatttgcacttccaatttttactcatactttgaatgtgagagtctaatttcagctattcaatgagattattaagaatttttactcatactttgaatgtgagagtctaatttcagctattcaatgagattattaagatttttggctttgataacttcattgcagattggaactcatttgggttattggtatccggcgaaaattatggaatgggtgatgtagttagtggaatgagcttgccttacactctaattgtttattgacattgtgaggagagtttattgcaagaaaagagtaacacattatttgtgcttaaaataatttggtttcaatggaagatcggttagaaaagtgttgaaaaggtgctttaaagtgccacatttagctctgaggttctttaactggatgaaaatcaaatggatgagtgaaagcataatgttccttttatagtatagtattttaactagggtttatgactgaattatatggattaaaaaaaaataaaatattgagcaaaaatcacttttaaggtcaaccatgcaaatgaccattctctagttataattttgtcacttt

SEQ ID NO: 232391 - DNA, 1294 bp, Cannabis indica
actgtagttaagtaccaatcaattgaattattgtttctattaagcaatcgaataaataaattttgaaagtaaataagctaagcaaaattaaataaaacgtcaaacaaataaaaaatttaacaatggatgtgaaatcagggatatgatttcaattgctttgattatccaattgttaatactaattaaccatttttgttcctcctatgtgatgacagattatgaattaacctaaattcttttcagatcataaagtcctaaattgcatgtcaactactgcatctctgagatagaacaacatatgattcgcattaagcaataatctaaaagtcatataatctatgtgaatattctcatttcacatcaaaatttatgtctattcgtttgcaagtaaccttttgcaacaagacgatatttgagtctatccaaatttccattagcattgagtttcaccttatgtacccatttgttgccaattactgctattctagggatgtaaggcacaagtgtccatgtgactgctttcttcaaggccacaaactcatgttgcataaacttgaaccatttaggattttgaatgactgctgaagtggaccttgattcaaatggtgtaagagcttcaggaagagaaaattttgtagcaagataagcttttggtttgacaataccattttaacttcttgtcccattccatgagttctattaggaactgtggtaactatatctcgtccaggttcagtgggtgttggatgctgaccaagtgatagtaataaggaagattgaactactgtatcaggtgaagaatggtcatttgtgggaaatgtaggtgagctatgtgcatgtaagtatgttcctcatctgtttagaggaagagggttgatcatttgtgtgaattttagatagagatggtgaatggatgttaatttgtagagtgataacatgttggtcatttgtgggtaatatggctactatgtttggtggagggttcctggtttgagtggtaacagttggtgctattagttgtatatgatgtggtagggaattctcagtagccatagcattgtgtggagtagacacaagtagagtagcagtattagtatttattccacaattagaaatgtgaaaagtagaagaagggaaacgatgagatacatgtacctgagatgattctgcagtgaaagtagatgctaaaaaatgtgtttcattgaatgtaacatgccttgagattatgagtcgaccatctggatgctcaaacagataccctttgttctgagatgagtaccctaagattaggcat

SEQ ID NO: 232392 - DNA, 829 bp, Cannabis indica
aaaaatcaaaattagaaagaaaagggttttctctctctctccatgctctctctctttcgaaactccctagaccagctagggtttgcttgtttttactgctcaattaagggaaacttaacaaggttgtagtggtttcaagtcaaggtattgattctaagcttgttcatgttgtgtttttagagttcaagtttgttattcacgacttttctttgttttagttgttgttcttgttgatagtgcttaattctattttctgaagttagttgatgattatttatggtgaattgagctaattttggtggctgttagtaggtctgagcaagctttgagttttaaaactcaagcttggctctttaatggtgaatcttgattctgagcttgtttagtttttttgttgcttggaatatgtttattggggtataatatgcaggtcttgaaggtttggagtcgaatctgttaggttttcaaaattttcaggttacttgccggttttacaggccctgtaaaaccgattaaccggatcataaactggttttctacactttttgagttttcgattggtgttagtttcagagctttagttggttaattccctgttagtttagggtattgccatgttaactttaagtaggaaaacttttggcttaaaacctaagtccccggttgtgatttagcatgtcacttatttatgttatgaacgatgtgaattaggggcctgtaatttgccgagcagttgttccacttaggttggtcgacatacttgaattcagaaaccatgtaagattagtataatgatatgcatattgttaggttataattaacctatatt

SEQ ID NO: 232393 - DNA, 1406 bp, Cannabis indica
ctacaaatttatgataaaataatgtgcactgtttctatgaactctcaagtctcactaaagaaaaacacatcatactaaacacagtgaagaaagaaatgaatctcaaaaggcacaaactgaaacaaacactacagaggaatttcgacatattttcaactgagattccaaatgttgaatatgccaaaaaattcataaatgttcctaaagacaatttgaaacaacatagcagaatcctactggggtttgaggagcagagtaagtataggaatcacatttggtttgaggagcagatttctacatctgggcataaaccaaaagcccttcatttggaaaattattgcaaataaacccattaatgatggtgttctaaagaacagtagctgggcgaggcaaagtatcaaagtatctactcttctctcaaagccaacaccacctaccgcaacctccaaaatcgatatttaatcccaaattcaaatgtaaaattagattatattattcaagcatcatgaagattctagactcaaacacatattaacattgttctaattagataaaattaaagaaatagaaaataaaaattacatcgcatgtaaattagatatgaacagtaagtaacccaccttgaacttctcccctgcctagacgttgtattgtcatcaatacagactttacctgaaatttgagtaatcaatttgaaagcaatttcttgcttctccaaactctccacagtttctttctcattgaacacgaaattcccactcatttgatctgaaatttgacttgaacttataggtgaactttgtgatgaaatcaattttcatcaatttctcagcattggaagccgaaatcgaaggatagttctgagacagggcaatcaaaaagccctataaaactacaacaatcgcctgtcaactcagctatctcagttgcaaaattcagcgacgattctgccgctttgcatacatatcccaaaaactcagcaaagaacgaagcaattgcatcagtaccaaatgcttgcggccaaaacgatttaccgaataagtccgaatagaacaaaagaactccaaaaacactgctataggatggagagaccattggattattggggcttcagggattgaaatttgggtttaggagaagaaagaagaatcacaataaatatggggatgaagaatcgcgatggagaattgttgggattgaaaattgcaggttttgttagagaagaaataggaatcgcagtaagtattttggattgaatgagattaattaaaagaagatggtctccgttaaagttaacggaataaaaaacaacaaatcgttaaaccaagaatataccttaaaaatagaatattctgttaaatttaacgatggtttgatcacccgttaacaaataaacccaataatta

SEQ ID NO: 232394 - DNA, 1214 bp, Cannabis indica
ggggcttcatcacaggctttcatgtaatccatacatcctttgttgtagctgtgccccattctaccacagaagaaacagatatccgggaggttttcatatttcagctcgagccaaacaactttgttaatgccagagaagtggataggtaatccccgtggcaagggacgagccacatcgaacatgaccctaagccgaaagtagggaccccaagtttcgcggagtgaaggccgatagatttccaataagtggccaagggaggatgagacaagccccgccaactcttcggagcgtttgagaaaaggagtattgaacacttgaacccatagagggattttgagaaggctatccccattgagaacttccaaggaattggggatgtccataaggattgcttggttgaggtaagtccaaggttgctgcaacaaaacccgacgtcggtccccgtcacagccaaactcaacaaggaaaagaccattggagcggtcagatatggtcacgggattgcgggaaatattattccaatctttggtcattttttctatgaagttcttacggttaaaagacttaaccgtgtgaaccttgatcacaagaaacagtgggataggttgaatctcattatcaggggtgtttgtagggctaggttcatgaagagtttgaatggtgctttcggtatctgtgagattaagagcaacggataaggaattggttagctcatccatgatgcaaatggacagaaaaaatcgtaaaactaaaaggtcaatataactatgggaggacagtgcaaactgtaggaatgtgtgatatatgtttctgaaaggaggaaaaagagaccaaaacagagatgataaatgatatatttgaccaagagtacacgtgagactaaagacctgggatctttgagcaactgaccaaagaagatatgggctgtaatgacttgaaaattttaacaaacagaaaaacttaactataatgtaataccagaacagcgagctagatggatcggtgggggagacacttggggctaaatgcagaacatgattcaagagaatatgagggataagaggccttgagctgctacagtggaaaatatgtatatataaggaaatacgactactataaagattcttatgcagaggatacttctttgtaggaataaaactgtatgtgcaagaccaaatgaatggtctgcccttatatagaaaaatcctagtgaa

SEQ ID NO: 232395 - DNA, 535 bp, Cannabis indica
tttttttaaatctcatgctcacgaagtgatgtgtaggcaaagactttgagatttattttatggagtggtggagtatagttatggcctataccctatatgccccctttctataaaagtattgggttatttttgtaacttgtttgggtgaggacgtaacatttcaaaagaaacatttatgaaagaaggtgcaaacatttattaaaaaataaacaaccaattatctaaaaaggaaatttaaatgtcgtgttttttaaatgacccttaaaaactaaaaaaccataaaatttttcaatcttgagaaaataaataaattctagcaagagtggatccatgttgcttctcctagcaacttttattgtcttggcaagcatgttcaaaggttataacttggaaaagttgagtcataggttggggttgtcctttcattgccacgctattgcattctcgtgtcgccaattgatccctacgtactatgccattcccataggttgttggaaacttcacaccaaatttctcactgatgttgctgccccca

SEQ ID NO: 232396 - DNA, 743 bp, Cannabis indica
tgtacggtgtattaaataaactcaataaaagttttatttaattaattatttaaattcaaatttatttattaaattatattttttttatttgaatactttgaagcaatgagtgagcgactcaagaataatgctcacttgaatcatcttatctacgatagacccatgtgtctctatcttatgtattagctcaatcatgtgtaatgcatgaatttatacaaagacactcctcaataaggacaaatgtgtagttctcacaaactagcatcaaattcatattagatttccactgaaggaaatttttaccattcagttttttaattgctagtaaagcattaagggaatttttcttagtaaacatgattaaaaataaatagagataacataatgaatatacttgaattataaatatcattttggaatgattgtaaacgtgatgcatgagcgcatacaggtaaaacacatagaatgttatttaagttattctacaataaaactctttgacaattgttcgtcgtcgtagggttggtatcgaatcaatttcattgagcctatgagactgatcccatctttataattttgaaacttatatatcacatatttcttctttaaaatataatgtaccactatttggtcaagctaacaactaaccacatggaagctcagttacactttgtgagtgtaacccattattttatattccagtcgtagggtcggtatcgtactaaaatacatcacttcctcct

SEQ ID NO: 232397 - DNA, 1759 bp, Cannabis indica
aattataacattaataatgatgtattgttaattattatagagtagttgagagagacatctcctcatcatgattcgtgatgcatttcatatagtccttatttcgtttaattattgtctttataatattaaaaatttcaaagccgccgtaccatcatcatcatcatcatttttctcataattaataaaatcattattatataaaaaaacacacacctataaaatgctacatatatatatatacataatattatcagtcttgacataacacaaaacaagagtatagagaattaataaaatagaaaatggaagtctcaactttgaagccaataatcaaagtagcagcattgtgtggttctcttcgtaaaagctcctataactatggacttattcgttctggtaactactaataatttttattttcttctctatatatttagtaagaataaattttaataatgtagaaaatatattattaattcatttgttaaattttttttttttgtagcgattgaaatgagcaaggagtcaatattcaaagggttattagagatagaatacatcgacatctcaccattgccaatgctcaatactgatctcgaggtcaatgggacttttccgccggccgtcgaagctttccgccggaaaattcttgaagctgatagttacatcttcgcctcgccggagtacaatttctccgtcaccggtgtgtatactcaatctcttaattaactttgttttattattgaaagaaaagtatgaaaattatgtttttcttttttgagcattactacaggcaccaatgtgtctatcactgttattagttagcaccttaaaattagttatataatctttattaaaataaaatatgtaagacgttatattgaattggagcaataatataatactatacatgaaagtggcatgaataactcccctttaaaaaaatgcattattatattattaatctataatttaatttgattataattattgctttatttcgtatttttattggtttataccatgcagctttggattcctatcttaatcttttctcacattttagaaatagtaaactaatgatttttcttctaacatatttaatgtttgtcttccaacaatactaagaacactcacattagctctttgaaaatgtgtttttctttaaaatatagaagatatattagttaaaaataacacatatcaactgcatgaattattttacatttttctaagcatgtaaaaaagtactattcattgctcttataaataaaagggaataaatttatataataataataataatgaataaaataaccaatagcataagtaaatctaaacttaaaatataaaatttagtgctaaaatttgacaaattttccaacgacaaaaaatgaagtctttcactaaataattctttttaatttggcttgtgatgttgaatttcatgtacaaattttgttctttggtttcaatctttctagctagccatgttatttataacacttattgtgttccatatccatataatatactatatagcacctctgaagaatgcaatggattgggcatctaggccaccaaatgtatggggtgacaaagctgcagccattgtgagcgccggaggccaatggggtggcggccgatcgcattatcatcttcgccaaattggagttttccttgatattcacttcatcaacaagcctgagttttacttgaatgcattcacatctcctcagccatttgatagtgatggaaa

SEQ ID NO: 232398 - DNA, 1207 bp, Cannabis indica
tgaattctcacattcatcataagagaatatgaagtacccttgaggcaaaccgtgacccaattgatgaaccgagagggaaagaaaatgcaaactaacagtctttccaagaattccctattaactgtgtcatatactttactaagattaatctttaaagcacatcttggagtgatgttcttcctattgtaattctagtcaagtattgaaagattaagatatcatgagcaagagacctattcttcacaaaggctccctaatttttgtttattaagctggggaggactttagatagcctacaacaaatcatcttgaaagtacacttgtatgaagtgttacaacaagttatgcgcctataatccactctttactacaaaagacacttttagtgtcggttcgaatttcatttaatttaaaaaacttacactgtagagtacccttaattttaagtgtaggtttaaaactgacatttaaaaaatataatacccgagacttaaaataattagaaaaaaataaaatacctttcattttggtttaaatccgatactaaagacgatttaaaattctttagtctcggttcaaaactgagaccaaagagcatataaaaattaaaatactcatctcattctcagaccctcatatttctctctcactctcatctcattatcgaagacctcttaccctctctcatcctcgaagagtttgtccttctctctatcgtaccctgaaccccaatgactttgctagaaccagtggcagcagcagtgaggctttagtgttggtggcatctttcgaactgggggtaagtctctcctctacttaccacctcgaccaacgggaactcgagcattgcctgtatcgggttagttttgactcttaacatgctaatagagcctgtttgggatacgatgaagagggatctgtcaaggatcgtgagcaatttgaagtttgtggtgtttccgaactcgtatcgtgaggaccccaaaaaggcattgagggattgggatcttcagagtcctttcttcttcattgtgtttctaggtattatacatgatcctcatattaattttttctttcaatttcaaaaaatacaatttgcaaattaaataggtgacaagaagcttaagaacagggacggacaaatttagtgtaattttcctgaagccttcactatgtatttatagcattccactagggttaggtttgaatt

SEQ ID NO: 232399 - DNA, 958 bp, Cannabis indica
agatacaatggtctttgggactctatgtaaccttacaatttctcttacatacagttcagcgtattcttctgtgttgtagttagtgcacactggcagaaaatgtgctgatttagtgagtctgtcaataattacccagacagaatcttgttgtttactattcttcggtaaccccatcacaaaatccatagtaatgtcttccaatttccacttaggaacatcaagagattgcaacagccctgtaggtctttagtgttcgaccttaacttgttggcagataaggcattttgctacaaattctgctatatcatttttcatacccagccaccaatacctacttttcagatcattgtacattttggttgaccctgggcgtaaagaatagggtgtagtgtgcgtctcttgtaagatttttgattgcaactcagctttattaggtacacacacccttgccttgtattatagaatgccctcttcatcaactgagaagtccccgactttctcattttgtagttcgacccgcttcttgattaaaaactcatcttgggcttgttcttctttgatcttctctaatgaatttgattcgattgtgagattagctagcttttctgttactaactctatctcgaatctcttgatttcatgttgcaacgacacttctaatgcccttaacatcgaccagcttgcatagttgcgtctgctaagtgcatctgccactacattacccttttcaagatggtacagtatctcacaatcgtaatattttaccagttccaaccactgcatttgcctcatgttgagccctttctgcgtaaagaagtattttaggcttttgtgatctatgtatatttcacacttctctccatagaggtaatgcaaagaccactgctgccaactttaagtcatgagtcggataccttgtctcatactcctttagctgtctagaggcataggctaccac

SEQ ID NO: 232400 - DNA, 989 bp, Cannabis indica
attttggttttgatttatgtgggttttggttaaaatttgattacttaaaagacctaaaaatgtgtttttattttccccttttttgtttaataatgaggaacactgatagatacccacaacgattttagtatgtaatttgaatttgggatgatgaatttgtaatgggtatttatggatttggatgattctctgttctactactctgtacagttgttcttaatgattctcattctgatgcttctatagcttcgaaaagataaagaagaagtgttaaagttaaggacaggaaaatgtgataaaacattgaaaaggaatgatcttcaagagaagatcaagaagaagaagagaaaaactaatgatgggcatgtttctaaggtagatgactcaagtgatgttactcaagaagatgggcaacccattagtagcaattacaagaagaggagattacatgaagtggagccattgtctaataatgttggggacaaggaaagtgagttcctttactttttctaaatcttgaattgaagtcatgtttgtgaacaccatggttttttgtttatttgagagactgataacaatctatatctgttcattaaacttattgtagatagaaagattcttatccggatacccaatactggatttgggaaacatagctttaaaccctgccgggaattgccattggctgtatcggagagcagaattgaaactaagggtgctcttaagcaatgccaagagttgccattagctgcacaagtgagcagtaaggagagtaaacaagagttacaaaatcaggagttgcccttgcctttgcctttgcaagggagcaataaattggagagtaatgaagcgaagaaactctgtgttagactatctccgcagttacttagacaacgccagggatcgtcattagctccacaaacgagcagcagggaaattaagaaggaagaagctcagaaactgcctcttaaaacatctcgagagttgcc

SEQ ID NO: 232401 - DNA, 4137 bp, Cannabis indica
ttacctgctggcccgaccaagaagagaaattttctaggcaactccagaatccatttgcctcaattaaattagctctacccaccaagattaaatcatccgcaaagaaaatgtgggagagcaccgggcctcccctgctaagatttatccccttgatgttaccccggtcaagggtattggagatcaatcttgaaagaacttcagcagcccagatgaaaagatatggggagagagggtctccttgacgaaacccacgagagggtttgatgttccctacctgacccccatttagacagatgttgagggtcgtagttgaaatacactgcaaaatccaatgacggaaccccataggaatgccagagcattctagaacatgatcaataaacctccagctcagcctgtcgtaagctttaacaagatcgatttttatagcaaagaacccttccttacctttcttcctattaaaggagtggataatttcttggataatcacattattatcatggatatttcgccccgggacaaaagcagcttgcgtagggcatatgatagaaggaagaatgggttttatcctgtttgctaaaatcttagctataaccttgtacactacattgcataaagaaataggcctgaagtgatttgtacgtttaggattttggaccttcgggatgagcacaatgttcgtggcattaatccctctatgcatgtggccatttacaaagaagtcttgaatcgcatcacagaaatcagcaccaacagactcccaataatgtttataaaacaaaacttacatcccatcaggacccggtgctttatggttattcatggcaaatagagtttttttgatctcatcagaactaggagagcaaacaagagcctccaactcttcttgggggattcgctcctgaaacaactgggagcaattgtaatccagacaattcgcagcctccgtaaatatacccttaaagtagtccatgaactcactccctatggcttcccggccggagatccagacattatctttgtctataatactctcaatggcatttcgacgccccttaatggtcgccgaaaggaagaaaaacttagagcatttatccccatctttgagccaagagattctggccctttgattccaatagatcgcctttctttctaaagactcattcaactctcggcgaatatcacgttcgtgaatccagtctcgagacccagccggcagactctgcagagagttgagtttattctcaagctcttttataaccacatccagctttccaaattgggttctactccagttcaggagggccaccctagtggccccaacactttttgaagattcttgcaggggcccaattgtgcttaactgacttccaggcattgtccactaccagattgcttctagcatcacgggtccaccttcctcaaatttgaagcatctcttatacttggcgaccagaccatccgacattaagcacaaaggcctatggtcggagttgcaagtctgggacgagcagaggatggccctaggaaataaatttagccaggcgccattcactaaacctttatccaacgcagatttcacatgatgcctcccagacctatggttatcccaagtcaagttgtccccttggataggcatattgattagacctcttgcgtccaaaaggttagagatgattaggatgaaaggatcccgacccgaggaaccttctctttcagaggcactgagaacaaagttagtatcacccaagatcagccagggccccccaaatctatctcccagagtcagaaactcagaccagaactttttcttcgcatgtaggtagggaggaccataaacacacgataggagccacgtatgagaggggggatctgaatacactatccccgatatatgattgcacgagctagagatacactcaaaactaaacccaaccttccaagccaaaataattcctctcgcatttccaatagacggaacacaaatattaaagtaaaagtgaagggacttaagaatacgtaccaaaggtttggcgttcactttaagctcggtcagaaaaacaaaatcaggtgagcgcgaccagatcagagacttcagttcccgaactgtagaggtctgccctaaccctctacagttccacgctaagcctctcatggctcctgtggaggagattcagcattctcctccacaggggtatgagagtaagcagacccactcgacacaacatcattgatcataaacgaaccaaccagggggtacttcaagataccagatcggctcagggaaatggaactatcctcagaaggatcatcaaacaccatttcagcatcattctctttacgcctcgagtcccaggggaagtcacgcacaaccccgggatacttgcggagaattttatgaggcctagagcaaagagaagctgaggattcaaacttcctttttttgaaagaagtcgtcctctcattaacttcagaataggccgggactccaaaatcacctcctatctttcgaatcacatataagtctagcttcccaaaatatttaagatcattcattaagtcctcaatagctttgaaaaaaagagccaaagctcttcttcattaggaagcgacatagactcacgatcaacattgggctgtggagaagagagcccaacctgaccgccactcacttgatcttcaagaaacggcccaagagtagaagagatatttttagacactatcgtcccatttacttccaaataagaaatttcatttatattagtattagcatcccccctaccggcccacggttgcacataggtctcacgatcatcaaaggacatataagaattgaccccaacctgcccgtcaatatcttaagccagaagaaccggcccatttaaggaagcgataaagcctgggagaactggccccaagaaggccctatctttaaattggccctgatgggccacctgcccacaaatagaaaattctttaggctccaactcctttaaaggcctcgacccaccaggcccaaatagcaaaggtccaacactacttctcggcccagaccccaacccattttcaacactaataaatctattcaaggccggcccactatccaagtcaaattccttaccacaagacttctttgaaaccaacgggtaaaacgcccttttgaccttatttgtaggctccaaaagaggaaaacaagcagaaatctttcctccaaaattcaaaacgaaggtgtccccattaccattactggtaatcctctcaccacacgtatcaggtacattcttgggcctccaaacctgtagcttaccatgaccctgccccaaaagaccctgagaagtcactatcttgaaacgcctcgagccacgagtagctgtgaacggactcctacgcacagcaccacccacctctgtcccggccacggtcacagggtgaacagagaacctcaccccatccaccaaaacccagtctaacaatctaccagacggtgaggttgacggaaaaataaagaacgaacgaaaagaagcatcagggtcctgaatttcatccacagaaagaaaaaagttttcctgaaaatgatccctttccgtggccaccgatgaagctagactactgactccactttcttgggttccttcttcttcgtcgtccaaatcccaaccggacgacaaccaaccaccttgcttgacaaaagccttcaccaaaacaatccttccagcatcaaccaactccttcttgctaggaaacgcctcaggcttattagaattcttcatgaactccaaactcagcttccaaatcaatatccccttcgctatcccaatccctgcaacgcgtgactaaccaaggcccaccaacaagcaaacccctacaatactccgtcgaacgaaaaaaccctacaatactcgcctggacttttcatctctctgtctctctaaacattattttattttttactctcttcaattttcttgaggtgaaagacccagtgatgcccacctttccctctaacaatctcctcctcagttctctcagccaagtcctatgccactgagtcactgactatttctcccggtgccgaccatttctccaatcgaccctcgcgctcaaagaatttgcttcactgactatctctctctctct

SEQ ID NO: 232402 - DNA, 1674 bp, Cannabis indica
aatttgaaaaaaaaaaaaagttaaaaaaataatatatggaataattccccaataatttataacacataaaaataaaacaatgtttaaacaattatactcttacaaaataaaagagatatgagtgcaacaaattattaaatattatttttagcatgttaaattattttaaattttctaaaatttataaaatatttaattataacacacactctgtttttagcttcttaagaaactctttcttataacaggagtcttgtctatattgacatggtttgagtattattttgagtcttattgtattttgtttgtatttgttggtacaaatgagttatatggatactggtgttaatagtggaacgaggcaagaaagaatgaataatcagatcaatacaacagttgacgaggaggatgacagactgatccttgatgatgaagatggtgacttatcggagattgatgatcgctggtgcttagtgggtcgcttcctcactaaacgtagtatagattgtcaagctatgcaacataagatggcttctctgtggcagcctaatagaggtttgtatgtcaaagaactcaacccaaatcattttctttttcagttctatcatgaaatagatattactagagttgtggatggcagtccgtggacgtttgatcgtactcccttgatttttgagagagttaaaccaggggaaaatcctcgacaaatcaatctgaataggctggacgtatggattcagtgtcatgatatgaagacgggttttatgtccaaaagtaccctacgacatatggctaactacattggcgtttttgtcaaatcggatcccaacaacttcacaggtgtgtggagagattatttgagagtccgtactactattgatgtggaaaaaccactcaaaaagaagatgacgctggaaaagaagaatggacagacgtgtacagtccaattcaaatatgaagatttaccaacattctgttttatctgtggaaaattggggcactccgaacgattttgtgacagattgtttgatactccggctgacttaattcacaaaatgttcgacctttctctcaaagcggcaccacgtcggagacaacatacgatcggttcgccttggctctgatcaagcgccatgtttagaggctccatgaatggcggaggagagagttcacaggctggcggttcaaggtacaataattctgaagagaaaaatcaggagctaattgatcctgtacatgctggcgacagaacacagccatgcatatctgctaacccctctcatttattagtagataattctattgttaatggaaagtcaacacaggaagcaaatgaggtgacaaatgaggatatttccaaaaataaggctctactgattttggaaaataaaagaagaaggacaggtggcaatgagaatttagaagttagtattatggaccataatagtgggccgaatcctgctgttagtgagattgtggaaaatgtgacaaataatggcatttttgaaaagggtgatcaagacgtttgcatgtccacagtgggaagtgatagcccaaaaaacatgagtggggcgggttctggtttccaggcccgccaagcattatgaatgtgttgagctggaattgccgggggcttgggaaccaacggacttttcaattcctaaaggagattat

SEQ ID NO: 232403 - DNA, 962 bp, Cannabis indica
aaatatttttaaaaaaattaaaaatcagacaaaaaaattaatataattattttttccttttttctttctttttcttcttcttcctcttcttcttcgtttttatttccagaaatcaaaccccccaaaaattgaaccccaaccgtccagcccaagccgtccatccccgactgtccaaccccaaccgtccgaactcttctccgtctctcctccgcaaacgtcgaaaggaagtgtacaaaaaaaaaaaaaaaaagaaaaacatttttcaaattttcagatagaaaatgaatccaagcaccttaataaaccataaaaaactacataaatacaagattgaaggaaaacccagtacaattccaagtgcaaagagagacccaaaatgcaaacggtgaagattcatcaagggaaaacgcccattgcagaccttaaaagatgaaaatagaaaagagaagagaaaacccaaaagaagtttacctgttaatttgaaagaagagaagcttgagcgttgagggagaaaggcaccattataatcattaatcaatggctttagaagaaagagaggactttagtttgataaattggtgtatacatatttctttctttttagggttttggattttccctttttttttatttgttgaaaatgaatatttttttaggttgaagtattagaggagttcttgagtcaacttagatgtgatgatacccaagttgatgaagatttggttcttttgtcaccaaatcccaaaacttcttgcagaacctctacaagaacccgaaaaccagtattgccagaactcggaaccttgcagccagggactcaaactcgacggggaactgttgctactcctgcagctaggagtattgtggttcgagtttcagattggggttcgattttgctcgtgaaagtgagaatggtggtggtttgatttttgtaaaaaaaaaaaggaagaagaaagagaaga

SEQ ID NO: 232404 - DNA, 1680 bp, Cannabis indica
tatgtctaatgcttattaattttatagggacatcgcaatatcattgcacaacgaaaattctcgtcaaagagcaatgacctcagattggattcatagccatacatttccttcctggtttgcacaaaaagtaagcttattttcaattcataattttattaacttaataagttcacaaatacatagagtgtagtaattcatttattataattttttttgtcaaattaggcaaaagaattagatgataattaggataatccactttcagaatatctttattgttggttaaaggaccaaacaatattttattcgattcaaaaggtatttaataaatggttttcggtttcatacaaaaaatcgaagagaaattaagaactcaaaatagtggagttattatgactgccaagactcaaagtttttcaagtagtagagatccaaatcctattttttgagatgttgtagtttttgggatattaacaggcattatagaactagattattattcagaaaatcgtattgtgttatttaagtgtgattagattttgagtagtggtattaaaaaagagaaagattgcacaagagtcaacctttcaaaattgatgtgtgaagatgagccatttatactagcttctcaagcaaaacaagtaatgtatgtggaagatctttaacacgaaggatgacatgttggtttgaaaataaagggaaacttacaaaaatactgacttttgactcaatctttacaaaaatcttgccacacggcagaaataatttttatactgtcttggcctatttttttttttcttttatactgtaaacacaaaaaaaaatgaggcttctattttccatacccacggacagaaccaccacaggaacactagaacaatgagaagacaaccatttattctagtgagattaagaaaaaacagtaaaatcgacgtcaaatatataatcacaggaagataattgtaaaacaacattaaaacaaatcaaacaaaaagaaggaaaaaatgattaaaaaaaactaacaatgttctgcacatcctcaataccagatgcaaaatagctatatttgcgaacccaatctttaaaaatcagaataaaaaaactactaaaacaacataaaaataaatgtaaaataataagcaaatataaccacttagaaatatataaaagaaccacacacctcaaaaccttttttctagtgagctcgtcaaatgtatttataggagaaccataataaaaaaccctaaaataaccatagagaaggaagaagaaatgtagtttatagcctccatcttccacacacacggatagaaccaccacagaaccatgagaacacccaaaaaataatcattaattccagcaagatggagcaagaacaatgaaattgacgtcaagaaatatgaaagataaccgtaaaataacactaaactaaatcaaaaaaacaaaagaataaaaaattaattaaaaaaaactaaccatcttttgcacaacctcaacacatgatgcaatagaagctatatttgcaagctcagttctaaaaaattagataaaaaactacttatctttctaaaaaatgtgactgaaaacttcaaaaactaagaaaaaaaatgagaagaagatgaagaagaagaactgaataagaaattaaattagggccaaaaaaatgaagaagaagatgaa

SEQ ID NO: 232405 - DNA, 962 bp, Cannabis indica
taatttttataggttgaattaagtataattgcgtgttagagcgggtggagtctctcttcctctcctacgtttgtatactattttttcccttctttttattttttgtttttcatggatttgtccttttattttttactaggaaacaaaacggtgttaaaaaatcctaaactatatacattattaaaaataatttacgtttttaaaaaatattaaatcagttaaatactaattaattattagacaaataaaatttttattacagtttacatataaaaaattataatattttttaaatgtgaaatttttataaagttagatcattaaaaaaattaaagtttccaaaaaataataaaaatgtattgaaaatatatgatcaatcttatcattcttagtcttaaatataaaaatttactttttttttatttttaacaattaatttattaaaatatattttgagaaaaattgttgaggtatattttttttcttagaaattaataatcactatttttcaaaaaaaaataataataataataataatcactaataatacacatatttttttacgtcaattgataaaaatatatatatataaactgttatttgaactttcaaataagttgtaattgtgttaatatcaattattacttaatttttttaacaataaacatgcaactacttaattaattagtttttaaataaattaattaattagttaaaattaccacaaaaatggagagattagagaaaaagaatataccgccacttttttttttttttgtgagggaatgttatcatgttattgttgtatttgtttttaaataaatatgataagttgaataattatgtaacttcactttttattattattattattattagacaaatcaattatacatatgatttataatgtgaaattaaaaattgaaattatcataaattataaaaaaaataataataaataa

SEQ ID NO: 232406 - DNA, 668 bp, Cannabis indica
aaatgccaaaatattacatgttttatatcgtaaaaatacaaaataagattaattctttataatatttacaagaaattgttatgatatattttatgttgcaaatattttgttaggatttaatgttgtttgtgttcaaatgagaaaatagcatttgtgaaaagaaatataaaatgataaaaatgtggcccaaacaagagaaaagtggtatttttgaagaccaaattgagcccaaagaacatcaggcccaaccggcccattttcctctcccagcacattgcagccacgtggcgcccttggattcgcacgcagccactgcgtcatctcctttgtccccttcaccttcccacgcgcatgtgcactccacctccccacttggtccaagtgtgtgtgtcacacaatactcttgcaagtgattctcctctctcacgtgaacatttcaacatttcaactcccaaaaatccattttgtcttctctcttctgcatgcgccaagtggcgtccttttgtcaaaattgctcacaatggcagccaatgaaatgttgccacatgtcaaagttgcacacaaaaagtaccaatccgaacttgacacgtggcagctccgaattgagttaatttaattgcaaaaaataccccacatgcaattttataataagtttaattgcgcattag

SEQ ID NO: 232407 - DNA, 2262 bp, Cannabis indica
aattcaaaaaatacattattgtcacgagctagtttagacacactgataaggtttttagtgatttcaggttcatgtaataaattattaagaacaagggatgtagaagaatttttagagaaaatatgagattgaccaacatgtttaatatacaaacctgatccatctcccatgtatagctgatctgaaccaccatattcaacactattgccaagattttgagcttgattggagcaatgattcgtagcacctgaatctggataccaacttgtatcattgtaggtgctattggctgcaagatttgcttgagcttgaacttgagattgagactgagttggggcttgagaaatgctgctgccattggctaaaggtggttttgagaaagacttgtcaaaacgaaagggacagtcttgcacaacatgaccaaacctaaaacagagttggcactgaggccggttaggaaaattaaagccaaacctattacttctgataggattgaaattaaaattacctcttcctatgatattctgattgggattgggagaaaaattattgaacctgatattaggattgggaatcctattaaactgagcagaagcattgctgagttgggaattgccacggccaaattgcttgaatcttcgaaaattaagcaagattggcttcagcagtagaatccagatcattggtcaccagattggcacttagatcaatttctttattggatttttcgattcttgactcagatgcaagaagcaaagcttctatttctcccacagtataattttcaacccttgtgttagatgaaatcacaaatgtatcgtactcacttggcagccccttgaagatggcagcaacatggtctcgatcactaagaacttcaccaattgaggccaaaacatccacggtttgcttgaccttaagtagatactcattgaggctcattgatcctttcttcaagttctgaagctttgtcctaaattcgagtatcttggaagaaacttgtagtgtgaaatgtttttccagtgcattccagatctgaagagaagtattacacccaaccattcgtgtcaagagaccttcagtcatagacgacagtaaccaagatacaaggagctaatattgaacctcccattctgagtacactggattaaccctgtcaacttcacgatctacctctgtcaagaactcagctggtggaggttctttgatgtatttcagcaagcgatttcctctgatagccgcaggcacttgttgcttccatagcaggaagttgtggtcatttaatcgaatcgagatattgtggttgaagatcacaggttcttgatgtgttcaagttctcaaagtggctccatttgcaccagcaagattcggttgattagtgacaccagagttcgcaccagtattgcccacagtcgccatattcacgcccaaatgagggagctgctctgataccatattgaagtttctagccattgaagaacaacaagaacagaacaaaacagagaaagaaagataagaggaaggagaagaaagagaaggaaagacttaaccaagattctcattcaatatcatcaagtgttacaacttttatagtgtagcaatacaagaagtctataacaaactctaccaactaactcacaacataaggacacgtgttaaacaaacacaactaactcaaaacagctaacaaccatgtaacgattttaactgtcttcaatacaagggacatgatttagtacatgtcaaaaagacaaaaatactaattaccctatttaaattctttgagcctctaggagccctttctttgaaactgttaaaaccaaaaatttaacatatattattattactattttgattaaggataacaaaaaagtatttttttgtctgtcatcttttgtataaaatatttttaataattttttactctatttttcaaaataaatcaacaaaaatcttatttttttttattttatcttaaatttttacatttcaccccatatcacattctttaaatacattacctattaccctcaaaaccgtccaaatgacgtggcatgctagaactgatctgacaggtaaaacgagaaaggtcggacagttaaaaattatgggacatgattttgtcccgtgattgtactttcacggaatgtattccgtgatgtacgacaaccgttagatgagggagttatttgatctaagggctgagattgatctaggggtaattaggattaaaaaatagtaacgtaccctgacactcatcta

SEQ ID NO: 232408 - DNA, 697 bp, Cannabis indica
agtgttcatcaataaaaaagtaggatttttggggggtgggatgtgatgcactatagaaggatagctataatccctttattctaccatactagtttgacaaagttattgctcatttttttttatttgaatttgtcatattatgtttacttgaaatgatctaatagaatattcaaaagatatttttatgcatttgatctttatatttcacataatttctgtagctggaaggagaggcaaccgcttgagctattcgattgacagagtttgttaacacacctctctatgtagttcatgtgatgagcattgatgctatggaagaggttgctaaagctcgaaaatcaggtcctctaagaccataaaatgtatttattaagtacattaatttcacagcagcatgattttctttccactcattgttataaaaactacgtttggctggtttctttataccgttgcaattgcttagactgattgcaatttcaatactgcagtctgcagtattcactctgcttgctgaagtgataagttttctttttctttttctttttaaagttagaatctccatcatcattttagaatagaaataataagtgaaattctcttgagctttcttgttttttaattattacaaatggtaagctttcgagaggcttgcaatctcttattcccaatatcccgagagaaatggagctctcca

SEQ ID NO: 232409 - DNA, 1710 bp, Cannabis indica
gagttgaggtacctgatccacttccataatagtaatatattttttctaaatagtctatgggattagaggtacctttgtattttagggattcggataaccagaatcctttgggtagtttaagcttgtcgtacatctgcagtgaaaagagaggtcccaagcagcttgtatacgggctttctctactgctcgagcatttttaaaggctgcagaagcataccttgatcgatattcccagccaggggagtattgacttgtgttatcgcaggcgttgttactactgcggtgatgttttctgggatattaaccctagtagtcgcagctagtgcggtaggcggattgatgcgattatttacaccctgatcccccattcggagatcacggggctcttcaacatcacgtggggcctgggagcgtgccctgaaaacagcgttaaggtgatcgcgtagatcgcccctatgaacctgatatcgtccttcttgcagtgtttccaccgaacccgatctagtgtacctgctgggtgtgcgaccatgcgaggatgaggaggcagattcaatgtcgttgtctcgcgactgaggtatgctgcgaggattgcgtcggttagggtcttcctcagtctgtgcctcctgattgaggtgtcttgcggattggtccctcgacattggttggttcaaatcaagtccctccgggttggccctccgttccctgcgagtacggttattacggcgtctagagttagttacctaaggattttttgtgcgagtagcgggtgctcgaggaggacgtcgagcccttgttttgtccatccacctcggcctgcagagcgcgtagctggtcttggattgcagtgtactgatcggtggtcagttggataataccttcggacagcaccgctggaggtaaagggtggaaaatgtctcgttgtggctgctggtgtagacgtttccccagtatgggggccagtagtttcagagaataggttgagaggtcttacattaccccgacctactccgccattgatgacatctactggaggcactctgcctcccgaaagtgggacgttcatcattctaatattgatggattcgttgttaagaccaaccgtttacttggtttccagccaatatgattctctaaattagaaagaaagtacttctcgttcccacaaacagcgcgaaatgttgttgaagtaatttcacaacaccaaaaatgagtaataacaacaataatagtaataataatatgatgaacaagtgcgagtattcaacctagaacggcgagtactcgaactggaacataaatacttaacaaaaactggaaatacaaagaacacgagggggtatagtggttcagccagatcaaggtttgcttagtccactgttgcaaggattctgtaggtgtcccatttcacggtggatcactcctttatatacaaagcaagtgtccggtcatttacacaaggattgcattcattgtcaatccgtttgtacattgatttacaataattaagctaaaaaacgtaaatattaataaataaaaaacagtttctattcactaaatacaacaacgtatgcgacttctaatgtgtgagttggttgttcatattcttgcataagctcgtggacttacaataaacctaatacttagttgagcctaagatgtctgtgttcttgcaaagtcgcatttacggacatcgtataatgagctgataga

SEQ ID NO: 232410 - DNA, 771 bp, Cannabis indica
atgataatgatatttaacctaacagaaaaattaaatataagcttacataatactgataataacaatatttaatgttaaatataaattaaataaataaatatttaagaagaactatttaattaaaactaatattaaaagaatcattttctcaattttgaatcattactttataatgttcattaaataaaaaattaatggtgattctctaaaatattttttttataaaataaaattgtatcaaaagcaatttgagtaactaattattgtactttttttttaaaaaaaaaaattaagcaaactttattaaactgaacaatgacagatcacaatgagaatatccctccatgagaaagaacgatacttaatattttctatttataacactaataaaatgataacaataataactgtatagtaccttaatcatttaaatggaacatagacacccattaaacaaactaatatgactcgtaattattattatattattattagaaaaggggactcggggacttgagaaatataaaaccactagaatatacctataaccaacttaattaatttattttttaaaagtttaattggtcttaatgcaaaatatatatatatatatatatatttatatttgttaaatttggctcaaaaggtaaattgttttaaagttacaattatatatgattcaataatcaagatatttggaacttattacactaaaaaaaaaaaacaacctacttttaaatgacaactttttagtcacaacataaatatttt

SEQ ID NO: 232411 - DNA, 1038 bp, Cannabis indica
acatttagtcacaacaaattgtaatttttatgactaatatattttgccataaatcttttagtcacaacagaagaatgataatttataattaatcacaaatttttttacttttaattacaacttttgttaactaaaagtaaaaaatttgtagtgtcggttaaattattattgtttgtttctaacctttaggatttcttgaggttcatctcagaatatcaaagaaacgaactttagcatttgtgttggtactgttgttcacttggaccgaaagaatatcgtggaaagtttgtatccacacatgttactgtgttttgggttagaaagggttaaattttaccccgagtatatatgctaatgtgtgattaagtgtgtagggttaattgtggcctttaaaacccaacaatattatatgcaaatagaaataaaaattatagccaaccatatatatactgtattatatttatatacatagagaccaatattattataataacttattcccattcataaaacatcaatatttaattacaaattgttatatttaatatattgatcataaagtaaaccaaactccaaacaaaatctaagtacaacatatggactgataaagaagactatcttagtttcacaaaaataaaaataaaaattacacagaccacgtacgaaatcttatttattcttgacacttgatcaaaccatgcaaatataaagtacgcatacgtaaactaacacttgttccatttctccagctaatattaataattagctttcaaaacaagtaatatactaatattcactcactcactttccacccccatttctaccagatcccgacccggccctggacccggcataagacccagcagaagaacccgcttctgacccgccacgtccacccgagctagatgaagaagaagaggagctagaactcgaagaagagctcgagccaccggatccagagcccgaacctgaacccgctccagcaccactgcctccaccacctagcccaatccctatcccagctccaattccaatccc

SEQ ID NO: 232412 - DNA, 732 bp, Cannabis indica
ttaaaaaaaaaaaattgaatttaatacctggtataaattaattaatatttttatttaacaatataaatactcaatattaatattacataaatttgtatgtctaattttgtgaatacaaacttgacaatttttttcgttaattacaatatatctaaatcctcattaattttttaaaaataaataaataattcttggtcacggtatgtaatttgtatatttatatatggatcaacaatcataaaatataaatatatattcatctaaatgaaagaaaaaaaaattaaaataattaaagtttatgcattcacctatattttaaatattaattcgatgtatataactgcggatgtctcgcactagtaacatacaaaagtatgaactattctagtacctattattaaaaaatatatatatatatttatatatatatacatatatataaagttgtttggcacatttatttattcttttgaagaaattatttttaattatattattatcttataattaattaatggtgatcagtaggtaacatgagtgacacttaataaatttttttttttttgatttaaccgtttatatattacaacatgttttgggactcgaacccaggacctccaagacacacacccacctatggccacttgagcttaaaaataatatagtgtcacaccacaccaaccaacccgactcgaatcggacggcgcgcatgtgtggtgggtcaagtgtgtg

SEQ ID NO: 232413 - DNA, 818 bp, Cannabis indica
gatgctttattcttccatacaacgagattttgggctttccaaattgcccaacaaagcatagcagcctgtgatccaatctcctcatcaagagttgtaagagctttctcaaaccagccaccaaaggataaagggcatatcggatcataagtgataccaagagtacgccagcatgacatagcaaaagggcaagtgagaagggcatggacaatagactcgacttgatcagtacaaacggggcagattgcagagatgcttacatgttttgtcaccagttgaaggcaggtgggaagacagtcagtgatggcacgccataacaaattcttgaccttgggcgggatttttaattgccacagtttacgccaaaatccagaattatcagagccgacatgttgggttttgtttttctgaagcagtaaataggcatttttaatagaaaatagcccagtacggtctcccgaccaagaccaaaaattagaagcagcatttggtgataaagggagaccgagaatcagacgtgcatcccggctgttaaacaagtcattgacaacatcagaatcccaactacgagtttccatggaaaagagagaactcacattgttctgcaagagagctggatgtgttgaagtaacaagcctgttgttagtatcagggagccatggtgttgagagaattctggttgtttcaccattgccaataatacgaacaaccccttgacgaaccaccgtttgagcagcccaaacactacgccagacaaaactgggattattcccctattcagcagagagataatcgctagtaggaaaatatttagctctgaa

SEQ ID NO: 232414 - DNA, 737 bp, Cannabis indica
ataatataaaaaaaattaattatgtatcaggcatccatcgagccctatatcgggcccatcgggccaggtcaaacattccaaaaagtcggaccattggacccaatatcaggcccatcggaccactccaaaatccatcggacactacatcaggcccatcgggtcaatcctaaattataaacaggaaaaaattttgaaaaaatttaaagtggggcatcgagcccctatcggacccatcagactaggtttgacttttttaaaaagtcaaaccatcgggccatgcatcgggcccacatcaagccttcatcttcaagctcaaaacaacccagacatcccaatgcatcagacctgcatcgggatgcatcgggctagcctgaaaattgatttttcttgcccaaattcatcaccgtacctagatctactccatctaaccctagatctaatcatatcacaccctaaatctatcagcaaacaacattttaaccctaatcaataagaaaaaaaaaatcaacagatgaaagggggaaaaattaccttgctcgtgtgctcaatggatgggtttggtccgtggagtggtgggttcggtctgtgggatggttgggttccctccgtggggtggtgggttcggtccgtggggtggtgggttcatcgtttgagtggggaaatttggtttcgtgggtggtgtgattggttttggttcagccggttgagagaaacgggacgaagagagagagagagag

SEQ ID NO: 232415 - DNA, 1441 bp, Cannabis indica
taaaagagactaaaagcaaccaataaagaaaataaacgagaaatttaatcaaaagaacaaccagaaacagtacactagttcactagctaagaaaacattgaaaacgtaagcaaaaacaaaactctttaaaaaagggccattactaagaaccccttttaaagacaacactcaaatactaaaccaaacataatgatcatcataaagtcactaaacaaacaacccaaaacaaaaacctaactcctaatcacttctgttctgttcactccaatgcctataccaaaaaacctaaaaacctaagtcaaaatactcaaaacctagttcatggctacaacaaaacaagtcaaagaatcaaccaaaacccactaaaattctaactaacccaacaaaatctaaacccatgcacaagatcccaaattataaattaacaaaaaagaaatgcaagaggcttacattacttcctttccaggcttcgtaaacgcgcttcgtcatgaccaaaaagcaaaaattccaacactcctcctctctacaacactaggtcaatcaatattcaatagtacagagtcgaacattgttgaagctttgagctttcatttcaaatccccattcaacaaataccaataataatcacaacagtaaaacctcactcgattgctccttctccattgaaccacaagaacaataaataatcctatgaaaaacccaattttctgattaaggaaaaaaataaacccaaattaagaactgatcttagatatggcggttcgtggatttggaaaatatttttctagtattttttttttttttttttgtgagtgagaagtaagaatgtttttttagaaatttttaatttttatttttaatatttggttcgaatatatagggaattggaaaaaataaatataaataaataaataaaatctcaaaagaccaaattacgtcacactaatgtaatcatctgaattttttttattaattaagaataaggtgtgaattatttatttatttgtgctgattagaagttataaattgccacgtcagttaatcatgtgacgtggcattattaggggtttttattcttttttatttttttgaagaaaaggtctagagtagagtagttgatttttttaattaaaaattaaaaaataaaacaatgtgataatgtaaattatcataaacaatcacttataataataagatagtatatgaagaagtgcctttgtttacaatagaagaagtcacgtggattatttaagaattgaagtctgtaaataaaaaaaaaaaaaaaaaaaaaagatataaatgaatttttatgaaatttaactaattgtcttgattgtatgatattattgagaaataaaaatttattaattaaaaaatttcttgcgattatttttaatatagaatgaatcaatcatctattttagtatcttatcgaacacaa

SEQ ID NO: 232416 - DNA, 713 bp, Cannabis indica
taaatgtaaatttaatattttagatccaattcaatccgtatagtaactcaaatccaatccaattcaactcgcaaaagtgcgaattggagaccttaatattccactgagagttaaagtgtctagttggagggctgctcataattttcttctacctttgttaatttgagctggcaaggtgttccttccaatctgatctgtcctaagcttaagagtattcgtgctaatcagccctgtccaagagatatacaaactgggttgtaatgatttttatgaagctatgttgggtggtatatatatgaagcatttgactaagttggaaatagagaatctggtttagaaggaaataagatggttcatgataataagagtttcagtgatgacactactacaaaaagtataattcacgtcggtttttaagtgtcacttaaagaatttacgtcggtttctaaaaccgacgtatataccgtagacgcaaatagttttttattagcgtcattttcaaaacgacgcaaaaaacaattttcgacatttataaaccgacgctaaatacttacttttttattttattttatgcgtcggttaaaaaatgacgctaaatgtttcatggcattttaaaactgtcacaaaaaacttattacgtcggtttgaaaatgtcatatctattacaaaaatacttttttttttacctattgcgtcacttataaaatgaagca

SEQ ID NO: 232417 - DNA, 795 bp, Cannabis indica
atggaaccttatgattctcaacagtacatgtatctacatccaaagtatagaaaagacattattcttaattttttttttccgttctaattctatctacaacaatttggggaacagaaatagttaaaccgagtgaaatgcaccagagtgtgaaaaattgttagtaaatgccaagggtcaaaaaggtggtgctgagtggaatcaaatccctgtcctttctctaagtcccattagttaacttaaaaagtgacatcatatgaaaatgatgaactaatctactaagaattgggggaagtatcaatctcgaactagtcatctaacactaatagtattcaattctgtaacaatattatatttctaacatgtgaaaactcttctatctagtctcacaatttcttaatcgccaggatctatgatataagtaaaggattttgtagagaaaaaaccaaagatgtgttaaaatatagggtaagcactatgtattttcaagcttaattaattggaattaagtaaaagtactcaccgtttctcccttggtgaaaatgagggatttgacacggtcgcatatattctcaaggaccagatcatccatgtgttggaacagaggtacctaaaaataatgaaacaaagttagaatttatttgtatttaattagtaattatgtgtattcaaatcttggcctacatatattattaattaattacacataaaattaaggggtaaattgaaaaataacacttttattaatcaattaattaaatttacctctaattttatatttaattgaaacatacctct

SEQ ID NO: 232418 - DNA, 1051 bp, Cannabis indica
gatccttaccctaatatatgtcttgaatatttttcggggcattggcgacaggctcttgaggacactccttagttaggacttaggaaaaaattatggctctcacaaactagcatcaaattaagattaaatttttattttaggaaatttttactatttaatttttcaagtgctaataaaacagttagggaatttggcatagtagacatgattgtaataaataaagataacatatgaatacacttgaatatatatatatatatatatataaatatcattttagaattactataattgtgatgcatgagcgcttacaattaaaatacataaaataatgtttaaattatttcactacaaaaaatcttacttttagtcacaacaaaatttgtgactaaaagtcaaaaaattgtgactaattataaatcatgattcctatgttgtgactaaaaggtccgtggataaaagtattagtcacaaaaattataatttattgtaactaaatgtatttttagtcacaatacttgttgtgactaaaactaaattagtaacaacttgtaactaaatactatgtttagtcacaagtaacattttgttgtgactaaaagtcacatttagtcacaaaaaattatgttttgactaaaaagttgtcactaaaagtaacagttttttgtagtgttttatgataaaactctttgacaattgatcactaccttaattagggtcggtgaagtcaattttattgagcctcggagactattctcatctgtataatttgaaacctaattatctcatatttcctttcaaaatataaagtaccgctatttggtcaaattaacaattaactacatgtaactttaattgcactttgtgagtagtgttagactatatatatagtgtatgtaatatagcatatacaaataatatgaaatgcggaaaataaactgtaatcatatcaataatatatgcaatgaaaagatcgatgtacctccagccattgatctttgagcttcaatccctgcgatagcttcggtattggagttcgggcttcctcgct

SEQ ID NO: 232419 - DNA, 1158 bp, Cannabis indica
catatgcacaactcaagggcaaagttatcattaatcaaacacacacaattcaaatatatttcaaattattcaatcaattttaaaatgccaaaataaaatcccgaaagtgtatttcggtcccgaatctagttcggcccgaaatatccaattgttactaagatgcaccgatttgtcagaaaatattgtagaaggacaaaacaagtatactacataataatatagtccataagcttgctataacattaaaattacagttttacccttcttgggtcaaaattacaaaaatgcccctagctcacaaacggggtcttaacatgtcattaatcagtttaattcacatatatttaattatatcataatataattccacataaatacacatttaactagttagggttcactaatccatttttcttaatcttagggtattacactgaccttattacatacttaacgataaccaagtaaccgtccaacatttttttgcaagtaacaggtgagagcatgagtttattcgaggctctggggtttcttccccacctatgaattccttcgtcttcctaaacccagctcccaccaacaaagtcacttcacccttattttctgcatttcttttcttttctttttgacttcttgactctttgtaagtttgtgattgttttaactcaagggaaggaaattttcctttttgatgcagactagaccagtaactaagccatcgcctactgctgagaaatcaaatagagatttacaagatgacttttgagttcaattactgtacacaagacttgaaaataaatattagttgattttttgcacgattctacaaataaaagatctttagaagctacacgagctgtccatggttttgtgttaaaatctggctttccagaatcaagcttgctagtcctgttaaatcatgtaacgcacgcttattcgaaatgcatggacagtgccaccgctcatcaagtatttgataaaatgtctgaaagaaatatattctcttggactgctatgattgttgggtctaccgagaatgggttattcttgtcgggttttgtgtcctaaataaaactcatttcaatataatcagatttactaattaatagatatggaatctatcgcttctataagttcttagaagtgaaacgatgattt

SEQ ID NO: 232420 - DNA, 1300 bp, Cannabis indica
aaaatcaaggggatcattgatctccttgctacaattggccataaaaaatccccttaagatcacattgaagccatctttaacctgaatatgatgtctttactgaaatggaggctttactaatggcacatttagttcgaaatgaaaagaatgcaaaggccttggatatcaacaaaagtgaagccaacctagctcacacaaggccatcgtttgggaatgctcatggtagatttcactttccaaattctctgatgcctactggttataatcgtggtactctatttcgatcaactgagtcttaatctcagatgcaaagtgtggctcatggtgccttcaataccagccgtggtcaacatcctcataatgatggtcgaggaaattccactactggtcgaggagcatctcaatcctggactcaaaaaccttagtgtcaattgtgtcacaagcttggacatgcagtcaagcaatgcttctacatgtttgataaatctttctctggccctaaatgctatagtcaatttcttgcttctgctaatattgtagagattcaagtttgtcttgccacaccagaaattgtaccagatggcagttggtacctagattctggggtaactcatcatctcacaccagatggagccaacattgcttcctacaacaactactctggacaagaacatgtctatgtgggtaatggtattgatctaaccattgaaagaattggtaactcttttcctctctcaccttttacatctaaaacactatcattaaccaatcttcttcatgtgccctcattacaaaaaatcttcttagtgtctcaaaatttgctaatgatattctgtgttctttgaatttcatcctactatatgctatgtcaaagagcaggacaccaagaagaccttattggttgggaagcttgagaatggcctctacaagtttttatctgctcaacgatcgcatctaccatctacctgtcattcctaaacaaccatgtactccacattgttttaccaatcaagtgtctgtttcttattttaaatttactttgtggcatagtaggcgtggccaccctactgctcgaattgtaaaacaagctttaaagtcatgtaatataccagttgatgataaaattgatcttgatttttgttttgcatgctgtcttggtaaacatcataaaatgccatttcccttttccaccatagtttatcatgcacctctacagttgttacactcagacttaggtatacatgaatttattgttgggttttatgccctaaataaaactccatttcaatgcaatccattt

SEQ ID NO: 232421 - DNA, 1268 bp, Cannabis indica
ttcacttcagcaaatattttcccccatagaatctagttctgcattgtaattgaatgaactagattatggtgaaatttgtggtgtgttgtgtggtttgattgattcagttcaatcaattggaaatgtggtgagaagcttatacaagatttttttaatgattcatcatgatcatattggaccaacatgaagacatgcaactcataattgctaaagcattccatcaatttgaatcttataccagaaagaagtaagaaaaaaaaactaaatgtaagatctcatttcatcaatttcagtctcacagacattaaatagaactttttctaggctcaaaacaggaccagaccaacctcagtacatccaacccataattgacaaaaaaaaatgatgcatgcactatctttaagaaaacaaaaaatgagttataccaaatcaggtttttgttttggagtgattagttataccaaaaaatgcttatccatctatgattgagtaaattttatgagtacaaatcgtttcatatattctaattaaagctatatattcttgatttatttgtcaaaagagaaaaaagcagatcaacattgtaatatgtatagataaggattgatttgagttagggttcttctttctaatattaagtttttattgtatagtttcctagagactaaacaatacaataagggctcgtttgatagaccgtataagagtcatattatcaagtaatattatatttggataaaattttgtattgtgtattactaccagcgagcagtgagcaccaaacttcatcaaaagttgaaaattgtaaatttaactttctatttcaattattctttttcttttcgaaatatattgaatgtaaagttcaaacttcataagaatttttgaaaattgctcttagaacatcttttctcaaaacaagaaattctagttagttttttttttttcttaaaaaaaaaagaaaaacttttcattcaaaacaaccttgaacaatacactcggcaaagcaacaacccaccaatttaaaaattagaaatcaaagctagtactttcttctagttagctttgatgtattatcacatgaaactctagcttgaacaattgttttaatttgcctacttaaggcagtaacaaaccaacaaacgccttcaaaaacaaaatgatttttattaagccaaacacaatacacaacaacagccattaccattacataaatcgttagaacaattcccactacaagaatttctacttttgtcgacgtatttggc

SEQ ID NO: 232422 - DNA, 1646 bp, Cannabis indica
gatatttgttcatgctcactaatttttgaggtaagaaaataaaaaactaatacataatatatatactcccacattgaagtttattttttttcttctaataatactacagtgagcattctagtaacttttattttaatgttctaacaattgttttttactatgctttagttctagtttgactatagggaactaaacaaataaacatataactaattatataactaaaaattataaaaaataaaatgtccatgtatatgggctgggggtaaggccaccttagacttaaatgtgcctccgcccctggacacatgtcatgaatatagaaggccaaaaaccactaaaataaagagaatacattatgaaaataattattgtttaacatcccctctcaaactcaaggggcatgggagcaccgtgagtttgttgcgtaactcctgaaaacgagatgtgacgagtggcttagttaaacaatccgctacctggtcagccgaaggagtaaactcgagtgaaaaagaaccttgtttaaccttttcacgaacgaagtgatagtcaatctcaacatgtttggtgcgcgcatgaagaacgggatttgaagccaagtgaagggtactcatattgtcacagtgaagagtgggaggagtgggaggatagaaaccaagttctccattagcaagggcacgctattcgaattcggagcttgaatgagataccaccttttatttggaagaggaccaagaaattagattgagacccaagtaaacacaataggcactagtgctaagtcgatcatcgtggcatgatgcccaatcggtatctgtaaaacaataaagctcaagtgtggggtctggttgtagtaaaagaccaaggttggatgtccctttgagataccgaagaactcgtttgggtgcttgatggtgaacggtagtaggagaatgtagaaattgacatagcttgttgaccgtgaaagagatgtctggccaagtaatagtgcaatattggagaccacccaccaggctacgataggtagtggcatcttcaagaggatcaccatcatagatagacaaaggagtgagagcaatcagagtgttatctagtttggagtcaagtaattcagttttggtaagcaagttacgaatgtacttggtttgtgatagatgaagaccaaacggagaacaatgtacctgtatgcccaaaaagaaatgaagaggacccaaatccttgacagtatagtgagagtttagataaagtaaaagagcatcaatggttgaagaggaagaccctgtgacaatgatgtcattgacatagatgagaaataccacgacgacagtttgagatcggtagatgaagagtgaattgtcaaactatgaaggaggaaaaccccaagccagaagggttgtactcagcttaaggaaccatgcatgaggtgactactttaaaccataaagagatttcgtgagcttgcagacgtagtgtgggtgagactcatcgacaaagcctttaggttgagtcatatatactatctcagtgagatcaccatgaagaaaagcattttgaatgtcaatttacttaagaaaccaattggacgaaactgccaaggatagaacgaaccgaataaaggtgtgcttgatgaaaggactaaatgtttc

SEQ ID NO: 232423 - DNA, 1387 bp, Cannabis indica
ttggaaagtaatttcgtactgacccaactccactacccacttgagtaaccgtccggtagcgtccgttgcaatatttggcgtaatggttggtcattatacacctgaactgaatgagcttgaaaataaggccttaactttcttgttgctggaatcaggcagtaagtgagtttctcaatcaatgggtactagccttcggcctcaatgagtcttttactaatgtaatagattgggtgttgtatgttgttttcttctctgatcagcacgacactcacagcatgctcagtgacagctaagtatatcccgagttcttctccgtccagaggttttgagagtacgggaggctttgggagttgcattttaagctcttgaaaagctttttcacattcctccgtccactccaattgcttatttcctcgcaggatgttgaaaaatggaacacacttgtcagttgattttgaaacaaatctgctgagtgcgacgatctgaccaatcaaaatttgtacttccttggtttttatcagcgatttcatatccaggagggcttgaatcctctctggattggcttcaattcctcaaacattgacaatatagcccagaaactttcccgaggtgactccaaaggagaactttaagggatttagtttcatgttgtacatcttgaggactttgaagcattcgtccaggtcatctatatgccccatagccttcatggatttgacgagcatgtcatccacatatacttccatgtttcgtccaatctggtctttaaacatcttgtttaccaatctttggtatgtggctccagcattttcgagaccaaatggcatgactttgtagcaatatatgcccatatctgttcagaaacttaaatgttcttggtctggtggatgcattttgatttgattgtaccccaaataagcatccatgaagcttaatatttcgtgcccgtctgttgcgtccacaagccgattgattcttggaagtggaaaacagtctttggggcatgccctgttgaggtctgtaaagtcaatgcaaactcgccattttttgttcggcttgggtactagtacggggtttgcaacccaagctgggtagaaagctttaattatgaaattattgttgcgtagcttctttacctattcctttagggctagtgctcgctctttgtccaagagccttcgcttttgttaaactggtcagaagttgggatcaatatttaggacgtgcgaaattatagaaggatcaattctgaccatatcctcatgtgaccaggcaaaaatgtccaggtttgctttttagaaattttatcaatgccgattttacttcgatcaacaaaccttttcaaatttttagctttctagctagaatatcgggatcgatctcgatc

SEQ ID NO: 232424 - DNA, 1671 bp, Cannabis indica
aagtgttacttctatggaaggtctggacacttgcaaagattttgcaaggagtacagggaacaacaaggcttcaacaaatctcataatggagataggaaggataagcaacatcaccacaggacggattcagttgcagccgcaaaagatggtgacgactgctccacggatggagaattgtcctccatctcaaaatcttaaatgaatagagagtggattcttgattctagatgcacttatcacatgtgtccaagtcgagaatcatttttcgattatagatcaattgatggaggtaaagttctaataggaaatgattattcttgtagggtcattagaatcgggaaggttgccatcaaatagtatgatggcgaaatcaaggtgttgacaaatgtaaggcacatcttgaaacttagacgaggtgcgcttgaagatgaaggatacagatacaaatccattcacggaagcttaaggatcaccaaaggttctttggtagtgatgaaaggaaaaaaaatcaatggtttatatgttctccaatgagaaaatgttccagccggagaggcaagtatggtgaaaggactagaatcagatatgaagttgtggcatcacagacttggacatatcagtgaacaggacctcaaagagttgcacaaacaaggtatagttgaaaatttaaattcttgtgccttaccattttgtgaagcttgtgttctaggggaacaacataagctgaaattcactccggcaaggcataccactaaaaagatactcgaatatgtgcatgttgatttttgggggccatacaaagttcctactcactccagtaagcaatattttctttcaatagttgataattatagtaggtgtgtttggacctacttgctagcaactaaggatgagtgtctagaagagtttagaaattggaaaacttaggtggaaaaccaaacgaattttaaaattaagaatcttaggatggataatgggttggagtttattaattccaaatttgacaagatgtgtcaagaatttggaatcactagtgaagaccccaaagcaaaatggtattgttgaaaggatgaaccgaaccctgttgaacaaagttagatgtttattgttcagttctggattagaaaaattattttggggagaagctctagcaactgcaacctaccttataaatataagcttaaaccgagttataggcttgaaaaccccttatgaaatggtactcttaacacatttaggtgtacaacatatgtacaccaatctattgataagctgaaacctagatccatcaagggaactttccttttaggaaccaatgggtatagaatttgcattttcaagaagggtagactaaaggttgtgattgttagaaatgttttcaatgagttagaatatcctcacttgacatccggaaaaggtagtgtgtctccatgtgatgtaggaaaaataagaaacaaagacattgcaagtgtggaatggagtgttaatattaaatgtcatgtgttaatattaaattgcggcataagtctttaaaaaatttactttaatgcagataagtctccaaaaaatttactttgatgtaagctcgacattctcgttagtttgtaggtacctaatttaacaactttatttatagttcttaaaatttcatgtgtcaaaagtttattggtt

SEQ ID NO: 232425 - DNA, 1960 bp, Cannabis indica
tagggagtgaggagagggaaacaagagcagccaaatttttttaaaagattataatcgggttgttgatgaaaaagactttcgtgtggtgtttgataattgagggtgggagtgggtagtctatttattaagtatgctgcagaagcaaaagcttcccaccaaaaagagagaggcatattggcttgggaaagtaatgtgaggccagtatcaacaacatggcgatgttttctctcaactcgcccttgttgttgatgagtatgggggcaagaatttctttggacgatgcgaagattcttgaacaatttatacagtggttcaaactctttgccaagatcaaattggactgatttaatttgagtgttaaattgcctttcaactagagcattaaactgtataaaaatagtactagcttcggatttggttttcatgggaaataaccaagtaaatttggtgaaatcatcaagaaaactaatatagtatttgaagccatcagatgaagcataaaatgagggaccccacacatcaattagaatcaaatcaaatggtttagtggttttatttttagtacttttgaaactaaactggtgtagtttttcagtttgacacgcagtaaaaaaatctaaaggtttacatttaacatttggaacaacatgggaaagaactttattgagaattgacagagatgggtgaccaagtcggcaatgccaaatgttgacagctttggacttgtcatgaatcgggttactggtggtggtgtgattgagagccttaggtttggtgctaacagatgcagaagcattgctttgagagatgaatgctgggacatgtagcttatagagaccctcactgagatggccctgcagaagaacttgcttggttgtcttgtccttgatgagacaagaaaattcatcaaactcaagaatgacatggttatgtttggtaaattgagaaatgctaaagagatttttggtaacattagggacatgtagaatatcttgcaaaactaatgaatgattaggaaatttagtgccaacagaacttgaaccaatatgatttatggaaagagaggaaccattacctacaaccacctttgctttgcctttgtaatccgaaacagaggtgagttggtcaacatcattagtcatgtgatgtgtagcaccagagtcaagataccaaccagtggagggttctgatgtgggattagattcagatacaaaggcttgaggaggatcagtattgggagggttgggggttgagccatttgatgcacctgtgtaggtgatgtcaaatttgtgataacatttcacagcaatatgaatagcacgaccacaaagttgacagattggtctattcccacggccacctttgttggtggtgttgttgttataggatctgcctcctctttgagacccacgaaatccacgattggaggaaagtcctctggtgttagccaaattggcttgaacattgtgaagggaatcggttgtttgctgctgtatcctcatttcttgactctgtaacatgaactgaacttcttgaagagtgagaggttcagttcttgaagttaaattgatgacaactgcttcatattccgtgccaaggccaccaagaatgtaaagcactaaatcttcatcatggataggctgaccggcagcagcaagttgatcagcatgtttcttcattttgagaatgtattcttcaatggaaagagaacctttcttggtggttgggagtagattacgaagttgcaacaggcgagctcgagatctggtggcaaagagttgggcaaatgtagtccgaatctcatgagagtttcgacaattgattacatggcccagcatatgttcagacacagagttcatgatccagtgcattagaaattgatcaagtctaatccagttttgaaaggctgggtttggagtattacctgcaagaaactgtggtggttggggaatcgatccga

SEQ ID NO: 232426 - DNA, 834 bp, Cannabis indica
ttgttaaaaattaagttcagagtcttatttttactattttacaaaatataaggactatttcgtcatttaacaaaacagaaggtctaattagtaacttttataaaacagagtgtctaaaatagtgtttaccctaagataaatgctaacatcttggtggcatattactgtttaaataattaaatatcagattttatataattaatataatcatatgacgtcacccaggaccgaccctaggcataggcagggtaggcccacgcctagggcctacttattttagaggcccaaataaaaaaaatacatttttaaaaatatacatatattttttaaaaaaaatttaaaaataacatttatctttatagtaagagcctaatttttttttttgcctatagcccatttcaattcaaggccgaccctgacgtcacctttaagtagtattaggtatacaatctaatctttttcttcaaatagtaattagatttaaaaaattatcatttggtctgatctaattagacctcaaaatctaatccaattaattgagttggatccgttttttaaattgaatatccaattgcacatctaatttttaatattaactaaaaaatatggaaaaaaaatatgtaaaagctaaatatcatcctctatttaagtttaataatatcattgttacaaatataatacaactaaaagtttaaaataactaaaacaacaacattactaaataataaaatatgtagtaaaaatataattaaaatatgtattttttattacataaataaatataaataattttttaatatatataaatgtaattggattgaaatcatttttaat

SEQ ID NO: 232427 - DNA, 796 bp, Cannabis indica
aattgaatctaaaagcttacataataaagttttgcttctaaatatcaaatggctacccctgcctgacttgcatagcagaggccactgttgaagaacggtgggagtccacgccaaaaaggtcgtgggtactagctctcttacactctagtgtcgagtaggtagaactgctactttggagtagtgttatgtaagctggttactgacagtatttgtaccattaattgtccctctgttcagcttcgaaccccagttctgagtgcactagaccccaaaacaatcaagacccgaccccacatcccataactcaccaaaccccgacacaccaacacaactagcaccaaccaaaacaaccagaccccaacatcccaaccccactcaattcccaatcaaactaagacaaacaccaccaaagtcaagccaaatccaaaacagccagaatcaactcactactaccaccaaaactaaaccagaaacaagccaagactcacccacacaaacaaccaaaaccacaaaacgccactccaatagcaaatcaacacaaacaaagtcactccaaaacaaataaagccacccagaagcaagccaaacaaaccaaaatccaaccataatgtaatgaaattcaaccaaaccatgaccaaaaagaaattcaaattccaaccaaaccaaaaaaaccaacaaagccacttaccagaaccaaattgcactcccactcgcacaaacgactggtgtctagccttccgcacacctccatcgcactcccaatcacccaaaccagagtaggcttcgtaacctccat

SEQ ID NO: 232428 - DNA, 522 bp, Cannabis indica
agatcaaataatcaactgtctaattctcatatcgttttgacaaaaaattaaaataatatcggataaaaaaaattgaaacatcataattaaccattaagaatgcctatattatgtttcatttactatttcgaaaatacaacagtaacaacagttgcatcaagttcattcaatttcgtagcttgagcactcaattattgtgtaaggtatgtaactacaatattaatagctcgttcagtcgtagagaacttgttattactaacaactaataatgatttgatggtgaaccatcgaagaacaaagaagaaccaacaacaggaaaaaaaaattcacacaaataagactaaaacactcaaaatcatgtcacagagacaagactaaaacactcaaaaccatattataaagagaagactaatcgcagtagtaaaacacaaccccgaccaagtcgcacctaagtccaagaaaagccaacgggcttggtcagagaagaaagataaaacctccgatattttatggtactcgtta

SEQ ID NO: 232429 - DNA, 942 bp, Cannabis indica
ttggcaccacaggaaatacaacggcctgagcttgtggtggaggcactgcaggaggaccctgcttccatagtctcagaatttcttcatcttactggcggatacgatcttgcatttccgcaaacctttgctcccaattgggaggagcttgtggtggattcacaggatgaccaccctgtacaatgccacggcctcagtcgcgaccacgaggattctggggaatttgatttccctgacagcctcgagtctcatgacttcttgtatttcactgggcatccatataataggacttagcctgcgaaccaataagccagggaggttagacagcgatcataaaatcttaatactgctctaatggattttaaggcaacataattaaaataaataactataatctaatatgcttcctaacatgctttaataatcacatataatactaaacaagtacaagctcactgaaccgtgagccgagctttctctgatgaagattgtacttgtcctggcaagcttcggtagacaaacctagcagccctgataccaaatttgtaacgcactaatgctaaggcacgctatagtgatttttcaattacagtgttatctttgctaatcaaaaaactttctcaaaaattatgtcaaattataacttttatattaaatattaaattttataactttacataatcattataagtatcgggataccattttaaaacttttatacaaagtatacagaatacaataggaagcaaaaatgtgagtcgacagactcagtattaaaagcatataataaatcatataataccgacttttatctaggcgcccatacacctattttcaaggattaacagatgagtaagaacgtttcatactaggatacatcaactatatcacatacactacatacctcattatatgaatgttagtagggtttgttccataccctga

SEQ ID NO: 232430 - DNA, 1243 bp, Cannabis indica
agtgctctccagctttggagacctgtgccataggaaatggcagtgctctcaagccttggagacctgtgccctaggcaatggcagtgctctctagccttggagacctgtgccctaggcaatggcagtgctctccagctttggagacatgtgccataggaaatggcagtgctctccagttttggagaccttttccatggtagaatggcacaggtcacttctcgcaaactaagggatgaaaattgttcgagtgggtttccacgacattaaggagtaagaaaaaagtgaggaaagtcgtttccggcctaggagtcgccttgggtaaccagttccaagagaatggcagtgctctccaaattggagaccagtgccatcgtgaaatggcacaggtcggttaccacaccaggaagaggaatttattgaccaagttatattttcaacaaccatgtaccaaatacgagagatatcacccatgacttctcacatgccatgggtgacctgtgccattatccggccccaactggtagcagtggtcaccttttagggtctcaaacgtcaaaatgaggtttttgggtcacgagacctctgaagtatgactcaccttaaaaaaaaagtcaaaacacaccccgaggggtcagagaacatgcatttccaacatatgccatttggtcatggcagtgctcgcaactgtacaagacagcataaattgacttcagcaaaataggcataactctcttaatttttatccaaattgttcaacttggattggaaagataatttcgagacggatcaaagtgtgtctcacagccatgactcaattctgaagttatcaggtccaaaattagcttacaaggaaagttggtgccttttactcgaaaattgggaaatgcagctaagcgaggtttggtggagcacactgtcacagcctatgtggcgttgtgcgcaagcatcgacaatccaaaatgcatgtgttcagcactctatttcaaattggtgcatcctcaaccgaaaataaccaattgtccaatatttgtaggatatttatcaagatataacgagattgttattgatatttatttacttgtaatatttgattcataaaaaatagtggtatacaggatttgttagtaaaatatcccgatgtgtgaggaatcaataacaaaccctctagcctatatatacaccaagtaggaggatggaaaaggggtttcttcttctatctggcttctttttggattcttccttt

SEQ ID NO: 232431 - DNA, 2099 bp, Cannabis indica
aacgagataccttacccatttcaattttcaaaaaaagcatctattttccacaaactgtatcatggccattggctctatcaatatccctttttcctataaaagttgaaatcacgatctttctcccaatcctctctgtcattatctaccaggtctctatcttgaactcgatctcggtccaagaaactaccctttgctcgttcaaaatcatgatctctttctctttgcaaatcataatcttgagactgatcacgctctctcgaccttctatcatggtaccgccttttatcacgatcataatccctttcgttatctcttacccgacctctatcccattccctgccactctcaaaatcctgccggaaactgtctctaccaaaatttgttcttccacctctggttcttacaccatttactctgacaactcgtccatcaatagtctgtttcaaatgtttcataataagaaaactataaacacgttccactttgcactaaaagtataatgaaattcataaaagaaaaacggaccttgccatccatgcatttaatggcatcaatgactgacctaggatttgtgaaagtaacaaaagcatagcattttcctcttgtaccacgatcattaacaatctgtagggcgaagaaaaacgcatgatcgagtctcattacgatatatcatgatcaagtactcccatttacaaataaaatacatttcatgaacacatacatataataacatattaacatagataatgaaaaaaattgctacccactaacaaacgtagactgatcactggttatcaacttctattacaatttcacattatcccatttcctttggtcatagttccagtacttcgttcccggacaatttaaaaggaacaaaatagtgagagcaaagaaaaaccccaaatgcttaaaccctagactcaaataaaagtgttttctgcttaccttaacagcgtcgacagcgccatagacatcgactactcggcgaatagacttctcggaagcatcgtaggggatccctccaatgtaaatcgatctttcgtcgtctactgtcatcctattgaagaatctatgcaactccaattttcattaagaaaaaaaatagtcatttgtcaagtgttttttttttcttctatatttttcttttttctttttacatataattaataaaagtgatatatttttttttatgttttataatttattgaaagttaatttataaatgatttatatgttttaatattattgatctcttattatttttttattaatttataattgtatttctattattttagttattttattgttgttttatagttgttttaatgttatttttaatttttactaactcaaaaaagaaaacaaaaataaaaaattaaaagaataatactacaaaaagataaatcatgttgtcaaaattaagtaaaaaagattcttaatacaaacatattaaggagttgatattattttactttttgtcaattagatcaatattttattattttttagttattttgtaattatatttttgttgttttataactaattttagttgtttgttaagttgttctatgattgttttttagttattttttttatttttactgtaaacacaatatttttgtagattttaaaaatttacacacaatatttttgtaaagtttgtacagtaaaaatgtaaaacactctgcgtgtaggtatttttgtaaacttttcctaattttacagtatttttgtaagttctcatttgatttgtgtgggaatgttcaagtttgtgtagcaactaaatgttggagctacaaatttagttttgaaaaaaaaaattactagaaaaaaataatgggtattggctagaatgttgaagactttatttaattaactaaactagagacaatttacttcaatttacaccacactaccactacccacaaaatccaattgttcaacattaaagactttaatcacactgaatcttttagatttctttctctaattatttccttggtgttctattaacaacatttcatttaattaattatttttgcacattttttttttccttgaatttgttctattctttttcaatgctaaac

SEQ ID NO: 232432 - DNA, 636 bp, Cannabis indica
aacgaggacatttggccaatacaagaagaacaattgagaaaccaatccctaaacgaatagggcagataacgcaggagaggtgagtggctccaaagctcctcataacattttgaccattgttggtggaccttacatcaatggagattcaaagaaagcgcaagagcaatatgcgaatgaggcaagggagaaacagctaaccaacatgaacaatctaagcaaaggaccaacataatttttcaagaaagagtgtgacgatgttactttcatggaaagtgatgcgatatgggtacaccacctccacgctgacgtactagtcataattgctaatattggagatgacaatgtacattgcgcacttatgaataatggtagttttgttaaccttttaaacttgcagacttttaagcaaatgggactacacaaaaaggatcagaattgaagagatcgtgaggaaaagcccgacttcgactctagagtcctcgatttctcgaatacagcacaagttgctaaagaaacaatagagttaccaatcgattcctttgataattcaaaatttttaaaaattaattctaaactaactctgcagtagagagaaaggatggtcacctttctcaaacaaaacttaaatatcttcat

SEQ ID NO: 232433 - DNA, 688 bp, Cannabis indica
atttttgaaaaaatttccgtgtgacagtatttttgtaaaagttaaccaaaattccagtatttttgtaagtttccctaataaaatataaaaataaaataaaatgtagcttttgattagggtaatctttttcagtgatgatgatgttgcttttgattcttaaatagattttgtagataatttaaatgttattaaaaaataataatttaaaagtattttaaacaacaatgcaacataatgttacctaaattgaaaattttataataacattaatatagtttggtttttttattaattaagagatattcttataataacatgtaataattagtagatatattggattttttctaaatttaaagtttggctattttttattaacaaaataatggaaaaaaaactaagaaaatgctttctatattatgattcgattaatgttatttcatatgattagatttatatatattataatatataataaattttataaattatattattttcaaatttttatgtttctaacactatagttaataaatcttaaaaatgatagaattaaccatatggagactacaatcaacaatatcaatccaacaacaagtaactggaaagcaaagatgatcgttggttataagtcattgatgcaaacaagtccatacaagcataaaaaatatcaaaagttaactcttat

SEQ ID NO: 232434 - DNA, 4518 bp, Cannabis indica
tattagcggcggatttagtccgcccctaataattccgccggtaatgtaacattttcttgtagtgtttcatatatataactattatgacgaacctaacctacctctcatcacttcaaccaatcatccaatacaatataaacaataatcaaagcaaaggtttctcaatggtctctatctctacctacaaaaaccatgtgcaattgaattgagccacagtgctgctgcagcagggcactgattaagcttctatctgagttgtatttatatccctccattatattaaaaaaaatcaggcccgtactaatatcactgtaactttaaatatatatacagtatatttatatatttgcctttcctatttgcttttttgaaagttacacaagaaatggaagagatgaagaaaaaagaaagtgaggagagccagaagtgggtttatgattcttctgtggattataaaggaaaagttcctcttcgagcttccaccggcgtttggaaagcctctctttttatcatcagtaagtctctacataattttatactctttttcataaacaaacaacaactgtatatacatataaattaatctttagtaaactccctcatactctgtttccaactccttagtttctctctctgtcgtcaagtttctaatgatgtataactagtttcgaaaactgtacaggctaattatgtgtagcttcaattaaaaataaaagaaaactctttatgtagctaacgtttctgtattaaaaaaataatctttgaaatgttttttttttttccatgtgaaaatctgcaaacatgattgtttgggataaggttatcaagtaggagtttttgttaaaaacaattatccagttttggatcgctcaaggcctggctacatgcacagtaccaattaagaatattatatgtatattaatgttatataaggtttgtatttgctgttttgagtaatatttagttgtaaaacacttattgctttggtacattacgtgcagctattgagttcagtgagagactcaatttctttgggatagcaactaatctcataacttacctaactcaaataattcaccaagacctcaatacagctgcaaagaatgtcaattattggtcaggattcaccactattgtgcctttgattgggggcttcttagccgatgcctacactggtcgatacactatggtcctattttcctccttcgtttatctaatggtaccaaaaaaaaaatcaaatcaaacttaattaagtcaattcagattgtatttcatgtaccgtttcttgctatagtatttacaactaaacttgttgtattaaaaaatacagggcttgagtctcttgacaatgtcccagttcatcccaactataaagccatgcaaaaatactagtacagaaaattgccaaaatccaaggaagattcacgaactgattttcttccttgccttgtatatgatctcgattggaactggtgggtacaagccctgcctcgagagctttggggctgatcagttcgatgatgaccacagccaagaacgacgaaaaaagatgtcgtttttcaactggtggaattttgctctgtgttgtggaatctttcttggagtgactgtaatcgtctacattcaagactatgttagctggggtgtggcttttcttattcttacaattactctggccatttctatagtaacgttctatgttgggagggctttttttcgttatagggtgccccaaggaagccccttaacaccattgatacaggtcttggttgcagccataaggaaaagaaaattaactactcctttagacccttctctcctatatgaagttcctaagtcaaaaataatccacggaaggcttctttatcatacaaatcgacttgggtaagccaaaaaaagagtattttattttgtactctctacttttatcacatcattctcatcatgaattgaaaacacacactaaatgccatcattattattgattttgtcaacacagagcaatctgattcaataggcaactcaatttttggaacttaaatttctaaaagaaagagaaatgaattatactcttttgtttggattcagaaaaagtaatcttttcccaaaagaaaaaaaaaccaaattgaaagttcagtttttattttcttgtttgctgaaaaaatgtccaacttaatctatctcttaccctttaaatcccaacgtcatattttcttgtatttaaatctccaaactttaaaaattaacatcactagttattttcacttttctatctaaagttctgtcaaaatttaagactttgtaacaaaattctcaaacatatatatctgtttgcacttatattaaattttcagtaaaatatctataaatataaatatttttgaaactcataagtataacatagctgagtttttgttcataggtttctagacaaggctgccatacttgaagaaaaggatcacattgaacttgaccaacaaaaacaacaatacaatccgtggagattagcaacagtgacaagagtagaagaattaaagctcatattgaacaccatccccgtatggctaacttcactggcttttggagttactgtgtcacagtcctcaaccttcttcgtcaagcaggctgccactatgaacttaaagttaaacgaaagcttcagtattcctccagcctcggtatctagcttcggcgccattgccatgatcatctctgttactctatacgacagaatcattgtaccgtttttgaggagaaccacgggaaatgagaggggattaagcattctcaacaggattggaatcgggctgatcttttcgcttgtggcaatgcttgtttcggccttggttgagcaaaaaaggcgcggtgttgaggccgagaaagggaaattgagtgtgttttggttagttccgcagtatgtaatactttgtgctggggatggctttactctggtgggcttgcaagaatatttctatgaccaagtgcctgattccatgagaagcttagggatcgctttgtatctaagtatacttggagttgggagctacttgagtagctttttgattagtgttgtggatcatgtaacggagaaaactagtgggaaaggttggattgggaaggacatgagtaatagtcgtttggataagttttattggcttttggtagccattaatggtgtgaatttgtgtctgtatgtgatagttaccagggggtatacttacaaaaatgtggacagggacactgagaagaatggggttagtggtagtgttgaaaatgggattgaacagatatagttaataaaatatgtaataattttggtacaatgcaccaagaacaatgtaatgtagaatatatgactgaacaatcacttggctattgcattagatctttaatatatttatgcagagtttagttaaagaatctgtaactacgtggtataacagctaaacccattatatatagttatatcctctgcaatctgaatcatggaagggggcatgtttaataaaagttattattgttgttgttcagtgtgtgcaaccaagtctcctattaaataaaaatggaaaagatcatgagtatataagggtggacaatattttcattggtacgagttattttggaaaggtgcccaaaaataaatttgtgagggcttatgcccaaagcggacaatatcataccaatgtggaggtacatagtgtttcacggtcctaacaaatggtatcagagccaaatctcaaaattagctagctcatctacgataatgggatctgtggatgtgctctagtagacagatggtgtgctatgtagagtggatggatggaagattgtttgaagggagacaatgtggtccttagtttgaaggaagaattattggcataacagtgacttaatttttcttcattataagttcaggttaaggccccattacatgtcaaagatgtataattatttcttaaacctccaacaaccttttggttaagttagttcattaaactaatgtgaaatatgatagctagcatatttggtttcttaaactatataaaaagacctattctattcattccaaggagagagatcataagaccaagacaaagaagtgagggactaagggagtgagagagaaagttgggatggggaattgagtaacattgatgttgggatttgccagatcaatccctacaccaactcaagcacacattagatcatcaagatcaccgttgaccttcacattcaattaaaaaattcatgatcatgacaaataatttacacaaacatgaattcttaatctttaacagaaaatttaatatgattaatcttcaaaaatctaatttgcaaacaacacagttaagattaacaattcagaggtaaacaatcaagatcatagacacaaaaagttacaatgaaaataaaagagaacaaacagagaaattttctgaagttcaccctaaaacatagagttacatctccattaagctcgccataagaattggtttgctcttgcactataatcaatca

SEQ ID NO: 232435 - DNA, 1230 bp, Cannabis indica
taagttgctctccctcgccaaggtaggtctgtccttgattatctatttcttacactttcttttcttatagaatcaatatatagatacaaacataagtctaaaaatagatagatacaaatctggtattagccagagccaaatataaaataaattcaaccaacaaaccaaaccgataaaaaagctataaacaaaattcctaacaaaaaaaaaaaagaaaaaaaccaattctaaccacttaactaaaatttaacgacatcacatctatcaatcaatcattcaatcaattatgtgtacctatctttacgaggaagaacaaaaaatgaggatgagtcataaaagaaaacaactttgttttttcttggcttcactgttgatttggattaatatggcaatggctgatgagaattcatcatcatcatcatcgattcacattgtatacacagaaaagccccaaaacaacgaggaaccaaaggcttatcacattggaatcttagcctctgttctgggtagcgaagccgcggccaaggaggctctggcttacagttacaccaactctgcttctggattctctgctaagcttactccacaacaggtcgccctcctttccaaagatccacgtgttcttcaggttctcccaaatagaaaaatggagctgcattcaggtaagaataaagccataggaatgttacattaacattcaaccattaatttaatattagataatatataattaatcatggagctaagagagacagtcggccctttttttttttttttgggacaatataattagtttttgaattttcatgatggggtagtgttttgattgatcttgtattaatatattgtatggtactttagcttatttaattgttgtggtaaaatattacttattttatataaagggaatctctcataattgctttgaagaaaatgatcaaacttaaaaagtagaaattttatgtaattttaatgttttctcgtttgttgattggtggtggtacccctttctctaatgatcatattgaatttaagtcaattttgggaaagtttttgtttacaattttattttaaaattatatttgggtaataaataagaactcattatataagctctctgagcaatcatgaggagagtcacttcttttctttgcaagtatgcaaaaatcatcaatattggacaattgtacaaaatatttattgaatctgcagtttaattcttgcaacggc

SEQ ID NO: 232436 - DNA, 1550 bp, Cannabis indica
agaacaaaactctaacgtcgatgacttggaaaaagcctcgcagaacgacttggatgagttgaacttggttccggtggaggtactaggcgagtcaagcatatgtgaaacagaagacgtcgagatgatagacaactctcctacatggatgactcctattatcaattacttactctacggacaacttcctaatgataaaaacaaggcgcaaaactattgtattaagtgcctctctacacaataattgaaggcaaactatatagaagggggtactcaatgcccctacttcggtttgttctccctgtagaagcgaatgaaatcatcagagagattcatgaaggcttttgtgggaatcatgcgggttggcaaagtctgtctaaaaatatcattagacaaggatattattgaccaacgatcaacaaggacacccacgagtttattaagaaatgttataagtgttagaggttttcacatatacctcgcgtgccgccaacagaactaagaatgatgacctcgccctacccattttctatatggggaattgacttaattgaggcattacctgttggctgaggaggatctaagtatgcggtagtagcagtcgacttcttcacaaatggatggagggagccccttgtttccataacctggaagaaagtcctcgactttgtaacattgtctgtaggtttggaattcccatgaagataatggaacccagtttgatggcgacttgttcactgaattctgcgatagaaacaaaattatcaagagcttctcgtcagtatccaggcctcaggcgaatggacaagtggaagttgttaataaaaccttaaaggatgctatcaagaggaagttagacactgcaaaaggcagatggttgacgagctacctcaggtactttgggcccacagaactatcgagaagacgacaatgggacacattcctttcttgctagcatttggctcggaggcaatgctgcctgttgaagtgaacatatcgactcacaaaaaaaagttttataatcaagaagaaaaccaggaacttctaaagttgtccttcgatctacttgagggaaaatgaactaagtcacaaatcaccaacgcagcataccaacaccgagttacaagatacttcaacaaaaaagtcaggaaaagactattcaatgttggagacttggtgctaaggcgagtatttgaaaatactagagatgtatctgtgggagtgttcaacccgaactgggagggttcatatgtcattgaagtagtagtcggagtaggagtttataaattggatcgactcaacggctcgctaataaagaactactggaacgtggaatatttgtgaccctacaaccagtaaatatataatgtaattcgaattacagatgtaaaatttaaactccagttatgaataaagagaatcatttatattaagtaattacaaagttttactctttaaaattacttcagaggcatttatgtatgattaatcgaaattcatctggaaatacatagtataatgcgaacccaccatttcaattttttttttttaaa

SEQ ID NO: 232437 - DNA, 3604 bp, Cannabis indica
ctcgatggattctttctccaacaacttcaaaacctgttccaatgtcgataaaaacataaaacacatcacatcagaatgatgggatcgaaatttgaatcataatgtttgtgaaagaactatcttttacccgtcttctacgaagtcctttggagctgtcttcttcccctttcgagtctaagatcagcttgagatattggatagctgaggatgaacaatacatttcttttcgaatattattatttcgattaacaaacaatgacatcataacaaatgaaaatgagcagaaaaccgaattggactaacatgaaatgcctgaaagtgacgaaagaagatccttcaaaagccgtaccgctccctttgcatcataatcctgcaagtcctccaccatgtcctcttcggtgtcaacatctctatcaacaacaagaagagaaaaatgagaataaagaattggacaaagaagaaaaatggtatttacatatcctacgaattagattagatactgacttgctggtttcgagaatcattttacaggactcctcgtgtgcttcacgagcctttttgtagtaaatctcaccctgcaaaataacaacaacataagccatgacgatgactctgttacaacacactaaccgcaagtcctaatccgatcaagttcagtaacaacaaacatacctgttcttttagcttttcaaacagatcaccatcgccttttgtcaacgcttctacagcctaaccaagaaattacatcagttccaaacttattaactcggttagatagacgagaaaaggccacatacagatttataatactgcttcatcagttcactattctccttcacacctcgacgaacagcttggaccttttcctcatcttgatctgcaaaacaaaacaaaacaagcccgtcattacagaaatacttattagcatatatatatatatactcgtagaagtggcaaaatgagcataccatactcatccctttttcgtggctgcaccgaagttataatttgttctacttctagtgtagagtcctgtagaggttctttcacagcatctccaaacaaaccccgcgactttgttgtttttactcttactttattaggtaacacaaaatcattcttatttgtatcgggagcacaaaataaagaagtcagtatatccctctccagattatttttccgatttcctacaacagagaaatcttcacttgagtttgaagctgtatcctcagtagtagtactgtacacaagcacaattacacctcaaattagaaaaccatgtgagaaataattgaaaagctaaatgaattatgaaaagagacattaccccccgggatatcttgtacacttcctctgatatgaagtatattcagctttcgaatgcaagcctgtatactgaaaaaccaactcaaattagaccgagattagtttaacaacgtcattgaagggactttgttccctcccctatgtgagaatcataccaaccttgtcagtggagccactatcagattcgctcttttcgtccaaagttgctatggatatatcaagtaatttctccatactctaaatgaaaaagaaatagttaagtgcaaaagagttttctttttttcgtaatgaagtttaagaaataaagggaataaacaaaaacttgagatagcaatgattttcgtgtaccttaggcatatcatacccacaagcatctgcaagttcaacataaaactcgattagctaatcgaaatatagatcaaagttattctaactacaatcccaaatcaaataagaaaacttgacagcaattaagtaggccgaaattcttacaagtttatatgtaaaaggttttagaattagttcattttttcttacaagatttaaactaaactaatttcacttagcatcaaacaatgtttgttggacaaatttgtaaaacgaaataagttattaaaaaccaaataaagtatttcaacatgcccaaataaaagaattaccaagaacttgtcgaatcacatctctctctaactggaatccatctccaagcatatggaacagaaactcctccatgtcgtcatgcacattatcatccttttcagaatttaacttagcttctcttatcaaaggttcggatactggcaacaccttcgagtttagcttcatcgatttgtttgctttgacatatccttgtttgaattgtgcggtcttcacataatccttgccaataatgcttgagacggtaccaatagaagcagaacgatactttgaacgctctgagacactaacacataatgattccaaagaatcttcgatcccccctatctcttctccatcaactgcaaccgagcaagaagaagacgaactatcctgctctttgctgaaaaatgcatacggtaaatctcccttacctctcacagtcccattaacacccgatttaccttggttcttcatattatggaaagatccattttcctttgaaaactcttttacagcttccgtaatagtggttcctccagccatccctaagacttaacttttacaaactcggctactttatttaccaaactagatgaatcttttctctctctctctctcctataaaacaataagaacataagaaattatttctcaataaaataaggctcttaagcaaaaagtttctccaattcaaattacatttctacagttggataaagaaaaaagaaaatggcaacccttcccaatataatcctaaccaaaaacagaaattgaagaaataaaaatcaaatttgtcttcagacagaaattaaaaccaaaaggtttcgtttttgacaagttattttagactgaaagagcaataatttaagtaagcaacttaagtaagaaaatcaataagatctactgatctacacataatcaatgattaactataactcacattactaaattcccataatataattcagattaaattaacacaaccaatcattaccttaaaaaacacaatgccacacccaaaaatcaaataagcctttaaaatctcagtcttctcttcaacttcaattaacaacatgcaaaatatccaaagaatgaatacccaactaaacagaggaaatcaaagaaaaacaatgaaagaacaacccatttagaattttaaccaaatttaaccaagaaataatcaaataaatgaaaaacaaacaattgggtatcaataaccaatgttcactcacacaatcaaacagaaactaatccaatcccactgcccaaacaaggaattcttcatcattttctttttacttattcactagggagataaaaagagaatctttaacaaataaacaaaaacccaaatctaaaatcaaataaagtaacgatagaattaagagataaaatacattcattgtcttatctctatcaaagtagctacgaaatgagagaaaacaaaacaaaacgaaacagcattaatggagaatcgagttacctgaagagaaatcttgattgaatgagcgaatgagagagaagagagtatggtgaataattaggagagtgagggaatgtgtgagatgggttttggatactgataatgaatttggatgaaaggaatggtctttaatggtggaaaggaaagaatgaagaa

SEQ ID NO: 232438 - DNA, 1118 bp, Cannabis indica
gcatactaagtaattactcatattacacattataatatgctcaaataacaactattaagagtattagccctaactcatgccttcattggattcacaatattaccatatatcatcgctttcttaccttcataatattctaggataataatcctcgaccgcatttaattaaactcaagatactagtttaccgagtctagcttgtttatgccttaaatgcataatccataatcttaatatacatacatatatcatagcatatcaatactcatcaataattcactagggtaataaccctaggccaataaactgctctttttaaggtaacaatcctaatcccggtttccagttactcatatatgtcatattcagtataagcgccattgcgtataactctacgtgttaactactttcttacctgatgtcccgcaaacatggagattctaaacccccgggagctcctcaccaagtgctggtaatcctactcaaaattccaagattcacaagtatagggttaatccctaaatccacttttacaagatatataattggcattcaaaatacaaatattcacatagagctggaaacgggctttccaacgatataaagaacgccccaaacagagtcccaagtcaaaatttatgaacaaaataagtttaacgtgcaatctatccacgcgagcgggccgcggcgcccaaaaggtgggtcctggggcctaggttgaaaacccagaaactccatttcagcagctcgaaaaaggcatcaaaactcacccaaattaaccctaatcatgcatatatcccaaaatcatttcccacataatataactatcataatagagagctaataaacacatttaaagctcaaaatcaaagctcacatgcatcaaaattcagatttaaacaatataaaacataagcttcaacaaaagcatgattcaccaagaacccaacttcaagaacttaaatattgcatcaaaattcccagatgcagaacccaaatacaaacacaataaagtccttaaaatcatcttaaagcattacccaagaatcaaacatcaattttctaacacaatcacacatggggtaccaagattaaaccaatatcatcatacatgcatt

SEQ ID NO: 232439 - DNA, 600 bp, Cannabis indica
aaaacatgagtttgaggactattaccgctatttttggagattagggacttatctgtatcaaactgaactttttgaggacttttgccgcaaattttcttttttttaccaccaccatttacttctttattagcatttttgtgattctacataaaaattttaaataaaaatatacaagttattcaaaacaataattatatctaaaaaaaaattacaacatattcaatttcaataatcttataataatcaaggcaaccagcaaattattcatagtgcaattggtaaggattcctaaaacaagtaaaatgacatagattcaatcctttaaaatgacatgttctctttctttatttctttttttaattgatattttaatttatttaataattttgactgccttcaatattatattttttattttaaggataattgcggttaaagtcccccaaaaacttagagctgatgcagattagtctccaacttcaaaaattggcagtaatagtccacaatttgagattaatagtaagtctgttggtctctttttaaactcatctattaaacccaaatagagtgccacatatcaactttttattgatccaaata

SEQ ID NO: 232440 - DNA, 963 bp, Cannabis indica
gagctacacggcagccaatcctgaacacagccagctcttgaatgaagcaatggcctgtaatgctagggtcacagtggctgcaatattagatagttgtttggaggtgtttgatggtgttggtagcatagtcgatgttggcggtggaaatggaaccgctatgcagctgttggttaagggttgtccttggattaaggaaggaattctttttgatcttccccatgttgtgtctgttgcgctaaaatctgatcgtgttgtccatgttggtggtgacatgtttgagtctgttcctaaagctgatgctgcttttcttatggtacgtacttatatacatatatatagtatataaaattattcagtttagactgatcagtacttaatattggatttatatatgcagtgggttcttcatgactgggaagacaaagattgtattcaaatactaaagaattgtagggaagctatttcagagaaagggaaagtgataatcgttgaatctgtgattgaaaataacaaagagcaaaataatggtatgaagaaagatgagttggagtttaaagatgtgggtttgtttcttgatatggtgatgatggctcataccaataaaggcaaagagaggaccttggatcaatgggtttacgttcttcaccaagcaggcttcactcgatacaacgttagatctattaagggtgctgtctcttctcttattgaggcttttccaatataatataattcggttgttttaataaagtattaatctcaatattgtggtcatgttaaatggcttttgtaatttcttattttggggataatggtcttcattatctaagttatttggtttaagctcttttgtttattttatatatttttatcaataaagtattctgctacttttatttattaacgactcgcactatgatttttaatttgaggcgttttttcctgtttgttatgttggtgtgcaag

SEQ ID NO: 232441 - DNA, 639 bp, Cannabis indica
caagtcctcactgacaactatgttcataaactgaattttatcgaacaaatgtcaggacactggaagggccgttatcctgctgttgtttctgcttatggggaggatttattcaaagtttcattcggtagtgctggtgataagtttagagtgatgaacaaagagccatgacattttcaaaaccatcttattgtgatgtactctctaagtgctctgcagaatgtctcaatcaatgatttgctattcacacctttttgggtgcaaatttatagattgccttaatttcttaagtaagttgaagaccctagcaagaccattaggtaatctcattggtgagtttttagatgtttatgaggattcacttgatgaggggtggggttgttttcttcggattcgtgttaaactgccagttaataagcctcttcctcgtggccaaatgatcagcctacctaaagttcgagatgagttttggattgattttcgttatgagcgtcttctggaattttgtttcgagtgtgggttactcggacatccctttgataaatgcatcaagttcatggaacaaatggataatggtaatgatgatgatatcccatatggtccttggatgaaaggtgccaagcttccttctacgggctatga

SEQ ID NO: 232442 - DNA, 2177 bp, Cannabis indica
aatacttaaattatatttataaattataggtatcattatttacatattatttttttatttctatatataaataatttttaaacaaaaaaaatgaaaattaaatattattaccatcacaaataaaacatgaaatttatttgcaattcatcctgcaaattactttaataaaactcttgccacgtcatatatatggaccccacaggagcctatcaccaacctgtacggaattttttattccactcaacttaaagaaacaaaggcccgcgcgtgcaaattttttttttcaactgctttttcgctatatttctcaaaaaaaaaaaacaaaacaaaacaaaaaaaagccagcacgaatttctaaaattctcctaactgtacggccgccaaatttcggttctcaacgatctgacagcaacaactcctatgtcattccacgccttttttttttttacttttaacgaaagaggccataattattttaactactgcagtaaatgtacaaaaattacagtaaaagaaaaaacagtaatttcttcttttcaatgtaatttttgtttatgtgtttatagcattattagattgccgctggacgataatatatagccgtccgtttacagaatctgtaggcccagcccaattcagatttccacacgtgtcatcaaaacggtgtcgttagaggcagtttcataataattacataattaattagcgggtaacggcagcaacaacggaagcaagggaaacgggagcggtcgttaaaacggcgtcgttaggaaccattgaagctaatccttcactgtaaagaaaatcgtcgacgatcatcgtggccggtccggcaacgagcttctcccaagcgtcaccggcttctagtccttggccacgcttcaagaaagcctcggtagcttccaatcgatgagtattccatctccaattctcgtggaagcgattgattttctgtaattggcgacaagctagaacacacgtgttcttcttgatctcatcaatggcgtaacggagtaatctagctttgtttttctcactatctcctctcaattcagctctgaagtatttatcgagttcaggcacaccaatcgctcgtcgaattcctcgagagtaatccgctgttggatcgaaaattcgcctcacctctccgactaatccgttggctaccatccggtctacgcgctcggagacaaagccgtgtagaaccggtaaagataagtctacccacaaaacgcaaatatcgtaacgaagacgaaattgaggccggcgatgattgtggtgatcgttaatcaaagcatcaataaaagaattagagccgccagctataattgggaggcggtcacggctgaggatggattcgatagcagaggaagcgtggtggcagaaatcagctgcggagaagttagattggggatcggctacgtttccgagaaggtggtgagggacccctcggcattcatcttcggtgactttattcgttgttatttctaagtctctgtaaacttgcattttgtctgagttaataatctcggcagggaatcttgtggccaggtcgatagctaggcgtgattttccggttcctgtggctccaacgacgaagaccaccttgtctttgcggcggaagaaggtgtcgacatttattcccacctgattgatcgaaccaccttggaaattaaccaaaggttgaacttgaacttgatgaacttgtttgcagggtgctgctgtcatataaagtttcatttttgcagagtcctaacaaagacaaagagaaaagatagaaccattttgggttagctctgttcgtatgtctctgtatttatatatataatttcagataattaaattatcactaatcttttaaacaaacataaaaagaaaaaaaaataaaaatcaaattattaagatatatatatattattatagcactagttgagtatatattttggaccactatctattactaccactatttattaccactgtacctttttagccttgataataataatatgcggcgaattggagcctcccctctactacttctgtccgtacggatcacttccctttcttcttttctttctcttttaactctgcagagagatttaaaagagagagagaaaagctatagagatatcaaaagaaaaagttgtggttaaaactgaagagtttttgttttt

SEQ ID NO: 232443 - DNA, 984 bp, Cannabis indica
gtactcgtgtataagagccatttgttccgtcagtgtaaagactcaatggaggcttgaagtaggaacgttataggatcgctcctatgtttaaggttgtaagcaaactcaagagactaaagttgttgttaagagagtttaataagcatgtggagggcgacgtttaagccaaagatttaaaagctcaacagcaattgaaaaatatccaagagaaaattcagtataacccgatgtaagaaaagttcatttaagaagaaaaagatgccagacagcatcataatgagatacacaaagcttatttatcctttttgcatcaaaaggaaaaagctaattgggttgaagatggcgattcaaacatgcaatttattcctgcgagtaattgtgcttggacaaccaagaattgtatttttttcaattaaaaacatgtctggtagtgggtagatgaatcagagtaggttaagccttcttgagttatcatatagataagcttggttctagattgtcgtttcaaaaggctgtgataaaaaggctagtaattcaaggagaagatttgagttttcaatagcagagacgattggtgcagagctacactaagaaggaggttaaagaaactctatttaacatacctggtcataaagcttctagcccagattggtttagcagctatttttacaacgataattgggacattattggcaatgagctaactgaagcggcattgttatttatgcatttggagaaattattgaaagagcttaactccacaacactagctgttatccctaagagtaagcatccatatatagtaagttatttttgtctcgatttattgttggaatgttctttataaagtagcaacaaagttaacctattttgggatgagaaaagttttgcctatgttagtagctcaaaatcaaaagggggtttgtccaaggaagatttattacatttaaaatcatgataagtcaaggtctagttaggcactag

SEQ ID NO: 232444 - DNA, 789 bp, Cannabis indica
ataacaatacaaaataaaaagaagaaatgaaggatgtaccctatgttgtgaatttggttgtttaatttacatattaatggtgagcacgagaccaaatatagtttacgctttaagcatcctaagccggtgcatgttcaatctgggcatgagacattggaaagcccttaaatagttattgagatatttgaaggacacttgggattatggtttgacctatgagaaagctaaagaatacttaaaattgaaaggatttgtggatgtggactatgcctcaaataaagataaagaaaatcaaccacttcctatgtattcttgacaaaatagaactgtataagtctgaaaggcccaattacagtccgtggtttctctttctaccacggaagcagaatttatggcgactacggaagcattcaaggaagcattatggctttgaggagttctttatgagttgaaacaaattaaagggggttactgtgttctcgaataaccagtcatctattcatatttgtaggaacttgattttttatgaaaagagcaaacatatagatataagactttactgaattagagagaagatagaagaatgactagttgatttagagaagataatcctgctgatgttgggactaagatcttaacctcaaacaagctcaagcattgcttaaacttgatcaatcgcagaagttagtatactgagattcctagaacaccaactaatgacgactctattctttcttcatcatcgtcattattttaatttgaagttactaggtggaatttgtggtatag

SEQ ID NO: 232445 - DNA, 1151 bp, Cannabis indica
agattattgctttaatattgtcacttgttaaggtgaacccaacatctccattgttattatgaaacttcaaaagaacatcaacaaagtcttccccttctccacttgacttttccttctcttcatcatgatgagtgtgttccttgatgatattttccattattcttgaagcccttagtttaaggctctcatatttagccctagggttccaatcaagaaaacccaatgaaggaaacacatctgaaaattcaaagccactaattgacttcaaaaattcctcaacaagtgatatgaactcttcatggtcactacttttcttgccaaaggctaccctagctgtgattccataggtcaaagatttgaccattcgagtaagattaatagatgagccaacttttgaagaagctatcaattgatcaatcatgttaaacatctcttcttctctaatgggttgaaaagaatgaattcttgatgggctcaaaagctcttgcatacaaatccttctaagttgtctccaatactcaccatgtggagcaaatatgatgctcttaccttcataaaacaaaatcagagaagcgagagttcggggacgattcgcaaagatgatatcatgtgttctcaagatctctttagcatactctggtgatgaaactactatggttggaatttgtccgattttgaggtacatgaatggtccatattttttggctaagtttgagagggaatgatgaggtaaagaacctaaaagttggtgcaaatttcccaccaatggtagtgtccatggtcttgggggtagttttgaagctgagttttttgtttgagttcttttggaaacaatgcttatgaacacaaaaactaataataaagagaagagaattgggaaagaaagtagttttagctccatgtagaaattaagtgatggtacctttgaagaataatgtggagttataaagctttatgtatcttcaaagtgatataattttttagactaaaaaataataattgaaatttctcccaaatggaactatgtatagaacaataattatgcatataacatggaataattatagggaaatttacataatatactaacgtttgctatttttttacaaaaatactagtcaggcggtattttttacttttttactgtattt

SEQ ID NO: 232446 - DNA, 1024 bp, Cannabis indica
aaaaaagaagaaaaagagagaaaaaaagatttggtagtgaaaatgggagttttgggatggtgaaaaatggtgattagagggggaaatacgaggctgtcggtggaggttccacgaaaatgaagagagagaaagagaagatgaaaatggggaagaagagttcgtccctgactttatttacttaagacttttgccggcgcaattaggtgcgctggcaaaagtttcccacgaaattttcacacgttttcctttgggcgggaagttgaccgccaaaaatttcaatgcgccaggaaaagcttaatcctgatgcaacgtgtccaatggtcaaacggttcccacttttgccgtcgcatataagcgcgccgacaaaagccccacctacttttgcgggcacgttttttaattgcgagggaaaattgaccgccttttttttcctacttttgccggcgcagtttggcgtcggcaaaagtaaataatattaaaaaaaaaataaatttatagtttttccggcgcagttaattgcgtcgccaaaagtgggaaccgtacaaccaacaattcacaccttttggcggtttggctccaacttttgccagcgtaattggtaaattacaccggcaatattgtctattgccggcgaaaatagtcgctgataaaaggttgaggtgggcaaaaaatgttgacttcctttgccgatgactttgttgacttgcaccggcaaatgtcagctaatgtcggcgcaattacccaatagggccagcaaaagttggcattcttgtagtgacgtgagggcatctcacgtttttctcatcttcttctttaaatgtaatgggtggttcctttttttcaccttcttggaaggttttggggcaaatatcgactgctcgttctttatctccttcacatatctcttctgagcgttaatgctttcccctgcaatatgcggccctcccgaaataaccaggatgtcctctccttccacaggaataggttgtaatccccggttgtttgggttattaggctgacgggg

SEQ ID NO: 232447 - DNA, 857 bp, Cannabis indica
tagtcaaggctagctgataggctacttggcccatttactctaatataaaaaaggctttaacttccctctctacatttctcttttataggcaagactcagagaaaacaaaatctcatatctggaactcgatactcctactctttaaatcagcccagctttttatatgtacttaatgacgcgagtatacaactcaaattcacgctatggttttataagttcctcaaaatattttggtccattttattcttttatcacctgtgttattctagttaacaagtgtctagtatttctctcgtaccacacttgttaaagtacctaactaatggtacacttaattatcacctttaaacaaacactctattagtagaagatattaatccaagataatctaacctttatcaaatatgcccagactaagtttctaatattccattgatcctctcatattacccatctttcaagataaaacctcatactattttcgctttaatctcccttattctcaataactttctgtaactcttaaaatcatagccaaagatatcagccttggaatttcacaagattcgactattcctttgaactccatatcctcatttattgtataaatcatttccactgatagacagcatgttaaattggcatgtccaactgttactactcggtcaaaatcataagatcccacagtatataattcatgattatgtctttctattcattttattggatctcctaagctggtgtactggtttaagtttctaacaagctaaatatttgtttttttggatagatattcaattagaatatttcttatttccatcgactactatatactcctatcgatgccttgtaaatct

SEQ ID NO: 232448 - DNA, 3228 bp, Cannabis indica
tgtaccaattaacaaaataacaattcatggtaatgataaagctgaaaatgaattgaaacttaaataaaagttcacttcttaataggtaaacctctcaaaattctataactaatagaccaaactaattagaaatcatataattaacaattgttacaagtaaaaattaattttgaccaaacaaatgaatattaacaattacgtacttctcttatgaatcgcattctgtagatcatctacagtggcctgaagaaacaacataaaaattaaataaacacaaaatcaaagtctctaggcaaatttcaagtatactaaataaacacaattctgcgttttaattctcattccagctaattgatatcatactcagtaattaacaatcaacagtgtcacaagtctatacaatcatattttcgtacatacttacatttgcccaaaaattccattcataaggtcatcacattgtatattaagatcttatagcagatgctaagactcacgtgcatttgaaactctgcccacatgccaaatctgacagaaaaagacaccacctttagcgtgaacaccatcaacaataggcttccaagcttcaacatgctcttttgtccaaataccaggtgtatcagggtacctatatataatagaaaccacacacaaacattttacaactttcaagtgagtagaaagcatgaatttaaaataaaagtacttgcaataaatagatcagtagaattacccttgagcagtatcagaaactccagatgcttctgaaatgagaagacccccattggaggttctttgagagtagtacaaaatggcatgtggttgagggaaattgttgtatgacctttgtcgagtcaagggtgcaaagacaaccctggaagaaatcaacatcaagtacacacatttagctaaaattaagacttcactaacaatttttttagttctagacaaataagctttggattcccaaatagaaaagaagccaatgctctatcaaaggttatacaggttaaaattatgtacagtaaacaaaaagcaattgaaacaaataaaaaaaaaattgaagaaaagtcatattgacaatcaacagcaaaaaatgtaccaacgtatatctcctattctccctaccagagtcaaagatcagatgccatcatgacatctaatctgactttagaaactgaattgtaatataactgtatattattactactattattattatttcaatttacacaaatttaagtttttttttttttaaaaaaagaaacaatcagtaataaaattaatcgggagacaaaaaaaaaaacattgaacaagacccatatgagattcctactaatcaaagaagaaagatggtcacctatgagaaagattgaactttcccattttgtaaggcgtcataagatgatttgtttgaattggagcagaagtcattttgggtttgggttgtatgtcattcggcatgaaactgatgcaatagtagacctccattggatagtcgccatacctcctgctaactctccaattcgacgcatctctggcagaatcggcgcttgattagatggtcttttagttaaaagcaaagtttgacgattcttcagcggcaaacgctgtacgaattgccgattccttaataaatctttgagcagtatacgattggagcttttcttcttcgtagattttttcttttgtggagaaaatgattgtgatacaacttgcctatgcattaataaagctttgagttgtatatgattgtagcttttcttgtggagaaaatacgattgtgattagggtttgagatttaaaaaaattagattggagaggaagataaattaaggatttgaaaggtaatcgtttttttaattaataatatgaatggtggatggcagatgaaagttaatcgagaatcattaaacttgatgttacttagccaaaaaaaatagttaaactaagaattaaaaaatcgttattttaataaatcgttataaaaaaaagtcacctaataatttctcataaaccaagaattctattatatagccacattttatatagaatagatatattactttggctctactttcaaccacctccgatctccatctcaaagccaactatttttaccagctaacccattttggaatcatctcaaaagatctgtaaaaagaaatggtagattttcatctttgtccatctctttgaaagggggaaaaagaagaagctttagtttattcacttgcttatgttgttattatatatctctgctttgctttgtatggtttctagcatctggatattttttttcttccaatttgaagcttgcccatttcatttttttcttaataattcctgtagtgggtcggattttttagattggaatgcttgagttttgtgtttagagattgaatgtgaaatgcatttgttcttctttgagattcacaaaatttgagcaggtgggttttgtgttttgggaagttttaatcattttgatatgatagttttggggtttggtagttatgggattgataatactgtttatggagagatgcaaatgtttgaatcttgatttggtattatcatgctcactatgaatagtttccaaaaacccttgtggtggtctggtcgatcgacgggtgaatcccatggacgccgactgaggtgatcgagagggtgaggctcggggctgggacatttgggagtcgaaaaagttggaagtggcctccgtttgggctgtcggtggcctgagaaagccctgggctggtcagaagttgggcgagagggaagtcgagaaggagaaaattgaagagacggagaagagagtgaagaaaaaaaaaaatattttatttcatttatttttcattttaaaattattttaataataatataccaattgaaaatcgccacgtggcattcttggaggacttaacagaactattaaaataagtactaacggaattaatagaatttgagaatttgagtacttttgccgccatttttagagtttgggtatttaatagcaacaaattaaacaaaataagtatttatgctacaaatttctctaattttaaatatacttttaataaaaattaaatatttttgttgatttttaaagttaattgacaccataaaatagagcataattataaaagtttgaccaaatataatccaaattcattttttagttaaatttggtatacatttttttaccagagaaatgcaagtaaatagctt

SEQ ID NO: 232449 - DNA, 1117 bp, Cannabis indica
aaagaaaattatacatttagaccctgtacgtggccgccaaattcccgaacaaattactaaaatgttgggaaggtaataatttaattactttttatgtaacaaattttaattaactaatgaattaaaatgctaatataatttttcaaaaagtgcattcagatatatagggaaaacacatgagtatctttgtgaggactcggttgaccgagtcaaaagtaatatatgtaaaatattaataataataataataataataataataatatatgtataaacaaaaaaaaagttaatagcagaccccctatcgtgtgtctctctgactctctctccctctctctttctctttctctctcttcaagcttcaaagaaaaacccacaaaacgcaccatcaccaccactccggcgacccacctccagccaccacccggccccacacgccggacaaatcggaagcccaagtgcggcgacctcacccccaaagcggcgccgcttctcttgccgccgttagcttggcatcgcgagtcaaagtttgcgagttcaaactttgaacgaattttgcggtcacctccggcgtccgtttgacgagacgttttcaccactaaactcagctcgtcgaggagaacaacctacactaaaccatttttctcagtttgctactttttttgatgacatttttgtagctccgcccctttccggtgactttccggtgacatcgtgtaccgtttttataaacggttggcatgggtgtgatctactcgtcgaggtggtcgtttttatatacactacccctattttcggcgacgtgtccagtacaccaatttttaccgccaccgattgttaatgtgcaccgcttaggtgaggtttcggaaccccaaattttaaatattatcatattatgtgtcattggactcggttttgaatgtagaatgtgatgatgataattatttaaccatttgatggtataggtgagagtaatatgtaagattggactaaaacaattggagctcgagacttgagagcttaagatcgtcttttgggaaaaagtttaaagactcgagagaggtagggactcaacttgattattggacttgatttttttatatgtgttgtataacat

SEQ ID NO: 232450 - DNA, 971 bp, Cannabis indica
attttatgtttaaatggttgtcgtatatatttcgttagcaaaactttttgtaacagggattcccggaacacacttttttatgccgttataatgtccgtttttagtgttttattttagtcaagtttttaatattatcactgtttttttaataattaattattctattagtattaaactagtttataaaatcacacacgtggcgtccctatagattagggcgttacacaaatccagaccagaagctggtccgggacctagaccttaactaggaccctgatcgggaccctgacccggatccgaaaaatgacatggactcaaaccagcacccgaacccaaactcaaacctgaacccgtactccgacctaaactcggacccaaacttgggatccaaacccaatataggatgagaacccagacttgggaaagtaacaggacccaaacctaaacccaaactaagaccagaatccataccgggacttgagcccagaccaggacttgtgacctggacctaaaccaagactgggacctggacccagaccgagactaggacctaaacccagaccccaaaactggggccgaacccaggaccgaagaatcagactcagacctgggacccgaaacccagagctagactgggactgggatgcgaactcatacccaaacccaaaccgggacctggactcggactcgacctgaacccgaacccggaccgggacctaggacatgaatatagatggcggactcacacctaagaattgggccccaaaactaggcctagaactctgatctggatcaaggacctgaccctagacccaaacctggacataggacccacatcgggacttgggatccgggactcgatggttggacccgattcgttgttggtgtctagatctaagacgtcgaccagaacgcgaacccaaactcaaactcaaataaggaccgaacacataccacgacccaaacccaca

SEQ ID NO: 232451 - DNA, 1045 bp, Cannabis indica
gatgccatgtctcacatttacataaattgataaataacacgctaaaacctgatctgcggacctaaactctcaactacaagtttcaatatcgataactaacattacgataccctaattattgaggaaacacagaaactaaggctcttaaaatgacatgaactagcaaaatggattttttggggatcctgcctatgattcagttaacccgttttataggacctgtagaactgattaactggtttacactagaaaacccctaaaatttcaaaacttgcccaattcgtatctaaacttcaccaaacattccagaatttctgtaacaaaatccaacaacagaattgaagttctaaaagcaacatacaaacatagaatccaaatccactatttatgagttaagtttgagttctcaaattcaaactttctcattcttctctcaaaccaacataactatcaataaacgtcctaattctattcaaaataacataagaaatcatactagaaccaagcctaccctaaacagccacttattctaaaaaatgcataatcaaaccaaacttaatgattaaacaacataaaggttagagttctagggtttatcttgatgaaattcttccacaaactgttgagaaacacttggaaatcaacaagaattactcagtgcagaggacaagatccctaggtccttggttttttcttagttccaaaaagagagagaaagtgagagtttctaattattctcgattttcctaattgattaattccaataattcaaaaaattagactggattaaaataaaatggtcagctaccaaccaaggacaaagccacctaatcctctaacgcaaaatagccaaaacgccctttgacttctaaattaagcaattataagcctaggggtaaaatggtccaaatacttcctttcccctatttcatcccaatcctaacatacaacatttctttgggagccatccctattatacattgataaatattattgtaggaaaattatatcaaaggtaagtatttattccatgaaccctcaaagt

SEQ ID NO: 232452 - DNA, 1164 bp, Cannabis indica
gtagtacgactccacccttggggaattacaagaataaggtactattggctcactacaccgaagtgccggcaacggaaaagaaggtgggggtggttggaggaaggttctcgcattcagatttggtgttcatcgaaaacagaaatacaccaactgctcgttggatttttgacagagggagaaaagttacttttcagaagtatccttcatcgccaagtttaaacaacaccatttgggtcataaggtatttcaaaaggcttatggccaactcttttgctgctttcatgttttcaaattggattggtaatgtgggtgaggatacatggaattgtttgattatgagcagtattaggcaaaagcgtcagaacgagtttttgctttccacttatggtgttctttgtgctttgactacaaagatatatggccttactaaagaaaacaagccatttgagataatatatgtatttcctcaagttgttttcctagagcttgtaagtgatgcttctcaagtattaagatttacccataatggattgggatatgagaacagagcctttgggttctatttgctggctacgcatttacgattcaaagatttagttggctggaaaaggcttgttaatgggtccatagtcagcgtgcacaacaccatacaggtaccaagtgatatacaaagggataagtttttaatttccatttatgggaattttttgtcttatacctattttgttctactggttttgggcaagagcaccacaagaaaaaaagaaaaaggtcctgaaatgtttcatgtgaaacacagttatcgattttgggggtgtgtctcttgggtttttgacaagggaaggacaataaattttggaaccactcagattttggcaacttcagggttggtctttctattttcttctcaacttgatttggaagctccattcaatggcgtgggagtggcagtttttcaacttgttttgcacacaaagggaagaactattaacttgctcagctggttttttgatcgaggacgactcgctgtggaggggcgtctctctcttggccggaacaccatgcatttgttggcttggttctttgacagaggacgtccaagcatcgcagttgaagacttgatgttcttcaccttgaggcaaggtgaatttcgggcggccggta

SEQ ID NO: 232453 - DNA, 827 bp, Cannabis indica
ttttttttttttcaagttgttgcaaataatatattcttgaaattctctcaatattactcttatttcccacataacatgcataaactttcaccattataatcccccaaatttaaatctacttatggtatagttagggtcaaagatatataataatagattcatttttttagctcaaaatatgtgtagaaataaaaaatcacaagtcaaagctcaaaaggataaactaggataaagactacaaggttggcttgaaaggcacaatccatccaaaaatttcctaattatgcatcatttattatttaacttcaaatagcaagcaagaaagttctagaatttttctcaactaactttccacatttcacatttaacatatataaaccgatttcaattgttagaaatttactgcgtatgcttacatctttaaagtataaaattagaattaattaagaatgcagtctcaccaagcacatggatttttcaaagagataaataagatttcaaaccatgctacataccactttcacattggctcatatttagaagattgactcataacacaaacatgcaaatagacacgcaaaacaaaaaactaaaaaaaatttagttcaatccccaaaatttaaatggcacattgtccccaaagtgacactaaagaataacaaagggaacttatttaagcgccacatcagtatggcagtggtggagttggtggttggtacgggtaccatagtggtggagctaaaaagtaattcagagcatcgaagttcatcgtacacatagataaggtgaatttagttcttgtacttgtcgacaagcgaatttatttt

SEQ ID NO: 232454 - DNA, 797 bp, Cannabis indica
aaaatttctataattaattttgaaatatttggcactatatgttgctacctttagttcaagagcacaatccaaacattgtatgtaattaaatttataaccatatttttgattataggtttacaagtttaaattatatatattattattattctaacgtctaaacaaatgtattgtactaattatttagaaactcaaaaataagctctggaactttctagcgggctgtatcccgtctctctggtttctcctgcattctcaaaattctggatccaatcctgcgtttctcatcttggtgatgtcgttttgatgcttcattcctgtgttttcttaattctcttttccttgcattgggtttgacttttctgttgctctgtttgttcatttattgctcttcccatcaactaattgtcattaattgctctggtgttttagatttcttttagatctttttcaggagagtttatttgtctcttgtttccttctttggttttgttttggttccatttaatgcatgtcgtcgttttgagcagcccaaggatggaggcgatcattgctcctaccggctatggcgatcctatagggatactgaaaggactgatatggcatcttcagataaccttcctctgcaagtatcctctctccaggtatttctctaaatttctctatttaaggttttggtacctgttgcgttctcttctcatccaactctttgtccctagtctccttcctgtagctattcctttctctgtcctcttgagcctgttaatggattccctagcccttaacatttctgaagt

SEQ ID NO: 232455 - DNA, 1213 bp, Cannabis indica
gcttggttaaaatgaacataagaacaaaatcccaagcccccttctgtctttgttttacagaggaatttccatttcttccaatgggtctttttcttgtcgtctgttgaaccccaccagaattgtgccatcattgtatccaattgattacaaaagcttttgaaagtctaaaataactcatagcataagtggggatcgattgaaccactgctctcaacaggatctcttctccaccaattgagaataatttgtcattccaagcatgtaaaagtttctaaattctttctttaatatcaccaaacaaatgctttttatcttgctcagaatatgctgggaggcctaagtatttttcatgacattcgcttactggcatccctagtatttgactaaaagagttcttcatggtggctggtgtattcagagaaaatgacattaccaatttatcttcattaagtaatctagaagcccgatgataaatatccaatgctcttttaattgcaccacaagatcgatcattggctcgacaaaagagcaagctatcatcaataaaaactaggtgagtaatggaaggagcgcttcgagaaatagacagaccttgtagccgtccaatagcctcctcatattgcaaaagccgtgagagaccttctatgcatattaaaaaataagtaaggtgataaaggatcgccttgacagagtccatgttcatgtataaccaaatctttaacttcaccattgatgaggaatgaaaatgaagtggtgtgtagacaagtcataataagagaaatccatcgaatgttgaatcccatttctcccatcacaacagctatgtaataccattccacacgatcgaaatctttacttatgtgaagttttagagcagcgtaacctttagttcctctctttctatgcttcaagctatgaaccatcttaaaagcaactaagacattgcccgtaatcaatctatttggaagaaaagcactctgagtctcgaagatgacatggggaagaacatgtttcaaccgaagaacaatcatctttgaaattaatttgtaaattacattacaaagacttatcggcctgaagtctttcattttctttgtcttcttcactttaggaatgagagtgattagggtcttgttaaacgctgctggtttgccaccacaatttaagacattcaaaaccacttgtgtaaccaaaggtccaacagtatcccagt

SEQ ID NO: 232456 - DNA, 1099 bp, Cannabis indica
ctttaaatatcaaaaatgataagttgtaaaaagggcagcaaccatggatgaacaatttcgaatttagattgtaatttttgtgttgaacatgagctaattttcttaagggcttgagtggctatgaactcctatgttgggtatggttaattttaaagcttactttagtatttttgcctttattcattcaagtgagctctaatttttaattgattgttgtttcttaaggcttaattaataatgttgtcggtttactatgttatattagtacaaaagtctaactcccaaattgatatgtcatacatatatttcttagtgaaaacttagaaagttaggtccaacaaatcaattgaagacttttactacatataaatgaggagggtgtatagtatcactactattataattaagtattgagttttatataatttaatataataatttttagaacgtatcgctaactaatcaaaagaaaacacgtttatatataaagtgttatacactataaaaatagctatttttagtgataattttttagtcactacgtacataaattttttatgactaaatatgacttttagtgatgacaataaaaagttaattaaatgtgactaaaatataatatttaaatagaaattgtcactaatttagttttagtcacaataagtattctgattaaatgcacatttagtcacaataaaatataatttttgtaactaattaatacatatatttagccacaaattttttagtcataacataagaataatgattaaaaattaattataactttttttatttttaattacaaattttatcgtaactaacagtaaaaaaaaattaatgagaaatactgatggctaataacaatgctatatatatatttatatatatatgctttcaaacctaattttaccaaaccccctcatgcctccactcccaagacatgccatacataataaaagaaaagggtagtttagtcattttaaagaataaaaatacaaatcttctcataatatatacacatgtcattgttgtcattgcagactatcacttcaaagactagctaggtgaaaattcaactttaaattaatgaggaaaa

SEQ ID NO: 232457 - DNA, 1054 bp, Cannabis indica
ttttttcttccaaacaacctttttatctctattacaattaacaacagtatgccccaagttagcacaagctgcacatttggaaggaagccattcatactccacaggttgttcaactagttgctttctttcattaacaaaagcaatagctttcggagggtcatccgatatttcaatctccacaaggacacgagcaaatttcaccatcgatcgctcttgcgtaactttgtctatcatcaccggtttgccaatagtactaacaagtgcactgaggttgtttcgtccccaatattgcaaccccaatccatttagacggatccaaacgggaactgaattcaccatacgagttgtatcaagatccgtggaccaaggacgcaagacaacaggtttcttgtcaaaatgaaccacacctgcctcaagaatcagatcacgggttgcttcatctctgaaattaaccagactacaccctgaatgcatacggacgatcttctcaataccaagattgccccaaattctcttcacaaatccttcaaacaccttgaatggggggtttgcacctaggacaatacacacaattgcatttttccagaatgaagcttctacttctaattcctctagatcaaggttagccaaaacttgatctcctacacggactggttcagtatatttgagtctagaagaaggggtaggtacctgattagaatggaacttactccacaaatccttcgcatcagtctggtaatcggttatctctgcttcctcagcccagcttccagttctcgaagaagctcgctgttgcacctcgcctccaatgtccactccaggatctgaaatcaagatctcgcaagtatcatgaaattcatctgtttgttctccttccgcagtagtaccgtcagcttctacctcttggatcgaagggaggtcgtcgaccgattccaggctagtcgtggcagtaattccaggctttcgagtgatccgcttcttcttcgccatgggagaagcaggggaacctcacacgcctattttaatcaactactgatattgacttggaaagata

SEQ ID NO: 232458 - DNA, 1683 bp, Cannabis indica
aaagataataaaactaagaagcacatgcgctcgggataaatagcacaaaggctaaaactctcaaggaagagtatcttcaggcgggtccatagaagtagcagcaccaggaatattagtagtgggaggaagcgtggcttcttgaaggagtcttgccttgcacttcataagctccttatctttagtctggggaagcatgtgcgaaaggttaagattttggttatttttccacaactgataaaattggtcgtcgaaggcacgcttgtatttctgacggtctttcgctgccctctcctcatgcttctgaataatgtccttcaaagccttaaccgttgagtcatgttctttagcgtccttctctagctccgtattcttctttgcaagagcgaagttctgatcaatgtaataaaccacttggccctttctctccttcagctgtgtttgcgcatcgttgagttctgtcaacctcttaccaagaatgtccttaagttcatccttgtcacactcatactttgcatccgaaagagcaaagagcttcttctgctccttaagggttgcttctgcggcagccagtttctcttgtaaatttgaagaattaagattggagaccatgaattgagttacaccctaaaaaaatataagagaatgaaagggtgttagcacaataaaaggatatgagatcatataaatatgagcgtgcacgtgagaagataggctattatcaatacattttgataaatagtccatcacttacccgaaggatatctaggactcccctagtgacagtatcaccttcgtagttggacatgtcacgcaccacctcaacagttgcagtttgtcgaacaaggaggtcaatgttgtcatgcacagactctagcatctgaattgtagcatcgtcgggacgaagtctgggaaccacgatggaaggtctcctcatgcggccacaaatatttgggacagaaggagaggcttgagcattctcctcgccttctaccgctgcaggacaaggcttcctcagttgggagcaggctcgagggactagaggaaggttttgagcgctttcctctcctccagactcactcacatcctcagtctcaccataactcgcacttagttggtggaacatatctgaatctgtaagaaaagaaaaaaaaaattaatatcgcaacacacacaacatcataatgttatcatatgagtatgtccaaaaaaaaaaaatgctaagttaaattcacttgataaagtatttaggctagttaattaaaataaattagataaaaactaattcaattacaaaaataagatgtaaactaaatttgatgtaaattaaattgaaaaaatctaattgtgttaaattggattggaataaacctaatttaaattaactaagctgaatgaatttaattttttttttaaaaaaaaggtattttattttattttttggcttgttttgggtatattagaattttattgaggcatcaaccttctctatgtgctcttggtatatacataaagaaaaaaaaacaatatgtgtggctccatgagctccaacaaaggagccaaatggctccataagctcccacaaagggatcaaatggctccataggctcctacaatggagctgaaaaaaaatgggagctgaaaaaaaaagtggagcttattggaatggctccatgagcttcaaca

SEQ ID NO: 232459 - DNA, 726 bp, Cannabis indica
gggacctgagaaggacactagtagggagctactggacgaatgaatggaggccttccgctcagaaattcagaaggagatttcagacgttagatctcagttggaaaaagaggtttcggaaacacgagcagaaattcagcgcttaccggagatagtgatggctcagttaacccgtttctttgcagggggaaaagagaagacggagacgaacaccgccagcaacaaaattcgtcctcgaaccgtgcacagggatggctctttgtcctcaactccgacggaaccagaggttcgatttcctccattgatgatggcaattgccgtcgatgagtttcagcctcaatcagtaaatagggacagatcatcttcctcaataaattctaagttgctctctgaaaaagaagtagagattagatccagccatcaagtaattctagcaacgaagcttgcatcaccagagacaaagatcgaactaccaaggttggagatgacatcggtgctggagacgatgtcggtgttgtaccaggagaagccaagccagaatattcctccaaaaatccgtcaagcttggcaagggaaggcgacgcggcttgaacgccatcttttgcctatggcaatggaggctcacaacctttttgatcgtggaaagcacaaccagcaatccttcgatgccgttaatgacgaaacaacaacgaattctaatgtcgatttgggtcgagtacgttaccggcc

SEQ ID NO: 232460 - DNA, 865 bp, Cannabis indica
tatattaatgatagtttaattattttgtgatgacttaaaaaaatatgtaatagttgaaaccgcataaaccgcagaaaccgcaccgcaccgcatcattttttgcggtgcggtttttgcggttttttagtatcgcggtgcgggtgcggtttggaaaattagaaaaaccgcatgtgcgggttggtttgaaaaaatagttaaaaaccgcaccacccgcaccgcgaacacccctaattcatatattataaccataaaaagataaactaagtatttatttataaccaaaattaaacttaaatatttacactgtacttattataattttatttacaaaataagtatgacatcaatgctaaattttagtaacatttcctatgattagcttcttcaaagcattctgtcacatcatcaagcactttgttcaagcataatgctctaatgtccaccacactatgaatgcccttaaagatcttgtagatatatacaaatgtgggactgttccttcaaaattagaacatagatacctaattgataattaatatgtttgtcattaaggctgataattataacaaacttgattaacacatgcctataaaatagaaataattacataaaatactatttttctttaataaaatttttatatttgtatgtttaaagatttttttgtttttttacatttttacaatattttctaaaacaataaaaaaaaggagtttttttctttttatacataaagcagtatttttgtggttttacggaattctacatagaaacccctattgcaactagcgctgcaacttaaattgcaacaaaaaaattagatagaaacctctattgcaactagcgctgcaattactttagaaac

SEQ ID NO: 232461 - DNA, 782 bp, Cannabis indica
tgctctaatattttctatctttaggtaactatatttgtcacatgtattattaaatagattaatatacaattattctagtgtcatatatatttagatatgttgtaaatagttaattaatacttaatttatttttattaaatattacttttagttataacaaaaaattatttgtgactaaattaaacatataatatttagatcaaattattattaatttagtttaaatattgtgactaaaaatatatgtaattagttacaataaattataatttttgtgactaatattttttatcaccgaccttttaatcacaacgtcgaaattataatttataattagttataactttttgctttaattacaaattttattgtaacaaaatataaaatttgtagtaattgtatatataagctattattttagtgttatgcactgtaaatagttaatattaattttgtgttatatatattcagcaacattattgtaggttaaacatacccatgcatagctttattttgtggctttgtatgcttaatagaatcaaaacaaaaataggttgaagaatttgagaattctaaatgctttctatgcaacattgaagatgagaccgtgactcacttattttttgagtgttctttctccttggaatgcttagaatggacgtaccttagaaagaattgtaaggtggataaggaggacaaaattatgcaaggtgaagaaatcaatttttattgctgttactgcagccctgttgctataattttaaacactacgcaagtatacg

SEQ ID NO: 232462 - DNA, 624 bp, Cannabis indica
cccaaatgttgtggacttgtgactcaatattgaaaaagaagatagtattacgaacaataacatggactttgctgaggaaggaatgactgcgtgactacttacatactgtagaatgggatctttccatgtagaaagaaatatattatgattaagaaaaattagtaatatttacaagcttagtgactgatttcataaaaactaatactctagcatttggccgttaaaaatttagaagagaaatctacataataagctacaactttttattagtacgaatacttctgacacgtcatcaaaatagagaaatttgatgaaacatcactttatattttttttattattgtctttttttatttttactctcctttttaaagtctatcatttttacttttttttttaacttcctgtcacttcaagatattctccatgtaattctcctatattagggtattttggaaaaagtacatacaaaaaaaagtatgtttcaattaaatataaattagaggtagatttggttaattaataaataaaagaagtattttttaatttaccctgagaaatttctctaactagtaaaataaccacgttaaacttatgttaggtaaatataagatgattctagaa

SEQ ID NO: 232463 - DNA, 882 bp, Cannabis indica
agtcaagtttgtggatggtcatgagcaaagtaagaaagaggtgtcattggaggctgaatcacttgtagttgtttatttgagttcgttaactctattatattacgaaccacctgtggacccttattttccattcatgccaactgcaccatattacattctctacgagttatcaaaggtttctccccaagcatatcatccaaagtctagtgttgctggtgctacttttagaaaaaactcatgtcacgccaagctggagggcatttacaatgacaactttcaagctatcgtgcatgatactttttatggacatcaaccacttgtcgatgtgaaaaataaatcctgaggtgcctgaccattttttggccccaccacagtggcgtccgtaccaaccaccacctcctacaccgtcatactaatgtggcactcaagtaagttctctttcctagtccttagtgtcactttggggataatgtgccattcaagtttggggtgaacttaatttttaagttttttattgtgtttgtttgtctatacaatgttattttgagtcaagctcttgaatattgaatatgagccaatgttgaattgagtatgtagcatggtttgagaaaaattttgattaatttttttctcaaaatctgtgtgcttagtgagatggcattcttaattagcttcaattttttgctttaatgaacatataatcataattggtaaatttctaacaattgaggtagtttatgcatgataaatgtggattgtggaaagttagttgagaaaatttttagatttgcttgcttactatttgaggtgaaatgatagaagatgcatgattaagaaagtaatttaggaaatttttggaccgattgtgcctttcaagccaac

SEQ ID NO: 232464 - DNA, 1360 bp, Cannabis indica
atcaaagttaagaaaaacaaagttaaaattctcttctcttctccttctctctcgagctaagaaacaccaccgccatcacattttttccttcatttcttttcctaaaaaacaccaactccttaactttttgtggcagctagaggtgtagcaagttgaagtggaagctaaggtaaggtttcgttcttttctttttttgaaaaactttaggtttgaaggttgactttttattttgtaattactgagagtttagtgagctttgagttttgtttttggggtgttttgggattagttttgatgctcatttgatagttgtgctgttgtttttggatgagagtcaagtttgagtttttaagctcaacgcttgagttctcatgatatttttcatgttaggcaggattttgatttctattacatatagattgttgtatggatattgtatgattgttttgtgaagtttggaatgaactggttatgttttggtgagattttgagaagttgaaaattggggtttcacatttcttatagaaaatgacagaacgtttccctgacaggaaccactgaaaatgacttgccattttctaatcggcttattgtttttattggtgtttagaaccctcatttttcatgttttctcgatgtttagggtgttggtaccctagtgacctatagggggacttacggtgatgaattaaggacttataacgggttagatcaagtgcgtaactgttattttcgttgttgagacatagcgcccgggattgttgatcttctccattcaggtcgaccaacatacctaaattgaaacttgaggtaagaaaaatatattcataccacacaacatgttaagatacaattattatcgttatgagtcgatacgattatcaccattgttgagtcaagtttgagctcaaacatcacaatcagcccacaaaatcactccaaataaacttttaacaactcaataaaacttcagaaaacaaaccccaaccacctagggtttggacaaaaccaattccaaaaatttgcatgttcaaactatctaaaacttaccaaaattaaaggaaagagttctaaggttttactttgtgtctttaccagtaaattcccactaatttcttgctaaaataaacttaaaaattacagcttaattagtgtatggttctctttggttcaagagaggtcacgagagagaaagttcaaaaaatagatttttcttattttttaaaaagataaacttaataattttttgttttatcttttactattgctgctagaaaaattaagaaaaagggtttgctaaaccactaaaagacaaagtcaagcccctaagtaaaattatttttttgccccttacttcaca

SEQ ID NO: 232465 - DNA, 675 bp, Cannabis indica
attccattgattttagtacttctaacatggccgtgagcacagtaacaaccccttgctcaaaccttttctgacgttattgatctaacgcataagcatgagccaagttttgaacctcagaaagcagtttgacttgccaatgagcagagggcaagcgagaagtgagcgatgaactcactagaggaatctctgatgcagcaggggcagatgtggtaaagacaatcatagatggaggaatgggcttgccaaacactggttgaaatgtcttgccaatagagggcacaagcactgtaacatccggctcaaggaaagtcggattacctcttaagaccaacctctgaaccaaactaggataaggaagtgtgtgcttaacccctttagccttagcagaggccaacattcgggtgtagatcaatgatggtaaattaatagagacaccagtgccaagagcatatagaaaccgagtagtattgtagttgatagtggatgtatgagaattggcccaccaatttgacaaaacaattttatgaagaacccgataaaactcagagagtatagtgacaggaaactcctttccattccacacaaagtcagatcgaccagtaacttcagcacccacatccttaaacaatggtttatactcatcactgaaataggggtgagctagcctaggtattt

SEQ ID NO: 232466 - DNA, 2098 bp, Cannabis indica
ctggagcgtacagtctttgggactgggcgacaaacttctgtactatgcactgtaaaacgtttgtaaatattttgtaacgggatcccaatttaatataagtattttgctttgatatttattgataattaagtaaagttttaattgttaacgatttccaataaactcgttgattagctatgagctgcacaattaagttaaaaatcacgttaacacgcttaaactagtagggttttatagtaggtatgggcgtgagtgacatatgagtaccttgtgtaggtacgggctcatctgattatgtaatgttatatattggtgccaggttgtggcatgggctcacctgattaggtggtgtagtgatatgatatatgatgttgcattatgacacgagctttcctgattaggcaatgcaaatatatgaacataattatttctatgcatatggttggttatattacatgttgttgaatattatggtctatttattttatgataataaaatgtataattagttatttaatgtattcttctttattatttttcttgctaagtttgtgtgactcacgggtgctctgtggtccaggtaaagataaggaaaagttagagcagccatgagatgacattcttctccataaatgtacatattgacctcatcagtttatgcgtcgagttgctaggagttgttttagactggttgtatctgttgtattttgaattgttattgtatatagtctcctaggtaatcttttataacagggatcctcagaacacctttttactgccattatgctgtttgtttttagtgttttattttagtcaagtttttattatcatcacaatttttaataattaattaatatattagtattaaattagtttataaaatcacacatgtggcgtccatatggaataaggcattacagtaattttactttataattaattataattattaaatacataaaattaaaatttataaagttataattaaaagatgacatttgagaaaagaaagataagttttaataaagtggtaaaattaaaacccattaggcctactaaggaattcgactatagggttttaaataaagctatttttatcgtttttttttttttaatttcctttaaattctaaacctaaccctaatagctatcgtataaatataaaattatgactcttatttttataaccctaggtcctagagttacttccccaggaaacataactcctagatgatagatctggaacacaggaataagaaaaggaaatataagcgtattatagtctgaaaccataagagtcccgaacaatgtaagcgggacacaataaaaccttgagggatactattagcatttgtgggatcgatagttaaataaaacaagagcaggaatctcatttccctaaacaaggtaaggtctctacgttcaaaattaccttacaatttcctaagatctcaggcaagtgaaaagcctaaaacctctctacataacagagctacttagcaattttttagaaaataaccctctgaaaaccccaaaatcatggcattgccctattaaatgcactacccagagcataaatacacaagaaatgaagtatcaaagtcaaggaaacaagcatgtacatattgcacttgaagtcgaatgcggtggattctaggtacgcgcgaggtgtttctcctaaaaattgtgtaaccttttgacaaactcatcaacgttttcttgaaaatctaatgagactggtgtttttattggagcgaacaggggtgcttctaggaaaagccttgatcggagatggagaagacgatcatgaagttggacacggagatcgaacattcgctggaggattttataattttttttgggtattttctctctgaaaaattggaagaaaaatggcaaagtgactaaaatggaaaatagtcagtttccttcatatttataaggaaagtgtcattctctgtgctttagatccaagggctcagattgaatcagagaaagcacaaatccctggatccaacagtctaagaatgtcaaaggttttcattaaattccatttatggaatcaaggacgtgtacattaatgatgatatttgcctca

SEQ ID NO: 232467 - DNA, 1607 bp, Cannabis indica
aagcactcacataggtcctccacatggccctttcctttttggacttgataagcatgtcatccacatacaccttcatgttgcgggcgatgagatctgtgaacatcatgttcaccaacttttgatatgtggcccttgtgttcctcagcccgatgggcataactttgtagcagtaaaggcctaggtccatcatgaagctcgtgtgttcctgatctggttgatacatctttatttgattataacctgaatacacgtctatgaaactcgagatttcatggccatctgtggcatctacgagttggtcaattctgggaagtggaaagtagccttttggacatactttattcaaggttgtgaagtggatgccactctccactttttgttgggtttaggcacgaacacatggttggacacccactacgggcagaatgcctctattatgaagtcattggttctcagcttttcgacctcatctttgagcgcttgggtgcacaccttatccagcagtcgccatttttgctgaacaagccggatgcttggatcaatgttgagcgcatgggtcatcacagaagggtcaattccatccatgtctacatgtgaccatgcaaaaaggtccaagtttggtctcaaaaattctatcagcaccaacttagtttctaaagacaggcctttttcgatctttaatctttttgttagaaaagtgggatcaacctccacttcttctagttcttgtacaagtctgaagtttcctggaagatccccaagtgaggatctatgtctgtgtcctcgccttgggctacacttcattgcgcgtggcagggctagttttctgggattttggcagacatcttctctcttttggccttggatagggccaagttttaacagtgtcgggtagactgcttgcacccctcaaacatacaaccccatgccttgttggaaatttgaggaataggttatatatagatgtcaccaccttcaagtcattgagcgtcggtcagcctatcattgcgttgaaagttgagggaacatcaattacaacaaactatgccatcagtgttctgatagttggattttctccaaatgtgatgggtaatctgaagtacccgacaggtgcaatgccttaaccaaaaaaagccatatatcacttggttgcaaggcactgggtcagtgagtcggagccccatcttttcatatgttgacttgaaaagaatgttggaggagtctccatcgtcaacaatacatcttgctacggtcatgctcttgatttgtacagtaatgaccaggggtcattgagtaggaaattgaccgaagcaacatcttcttcggtgaaggagatcatgggctctataggcttttgttgcttagagcttcggtcttcaacacctaggatatcacttttgggctcgtgatggagtgtccgagcatagtgctccctagccttactggtctcacctgcaatatggggtccgccaatgaggaaccctaggtgtcctgctagaggtggtcgcatgggatctacgttctaggctccttgcgccagagtttgatcatcttacacataacaatgcaggtggggcttgttacgccttatgaggtatttaatctcc

SEQ ID NO: 232468 - DNA, 1238 bp, Cannabis indica
actaattataatagactatgtaataatgtaatttatatcatagtaagtctttataaataacttttgtgatgtataatatgtaaaaaaaaatcatttaaaataaaaaaatttaatagttggcccccccaatgattcagtcctggctccgcccctgactatgatagctggtgtagatgtagcactgtcatttcttgaatacttcatgctatctctgatgaaatcacagatagcataatgtatcatgacaatgatgctgaaatcttaactgagctacatgagagatttaatgagaagaatgctcctcgaatctttgaagctaaaaagactatgcagagtcttactcaatgatcgaactctgtgactaccaactacactcgattgaaggctttgtgggatcagataagagaatatagaccataacctgtttgtacttgtggtgcaatgagaattattcaagaatatcaggaagaagatcgattgctggaatttttggttggtttgaatgattcgtacagctttgtcagatctcaaatcttgatgcgtgatcctcttccaagtgtgaataagacttatgctactgtggttcaagaagagaggcaaagaagattaactagttgatttaacaactcatctgacttagataaatccacatcgagcaatgctcgagagtttgctgcagttgttcaacgttttcgatcaaagtacaattgtactcactgtggcatgaatggacactcaattgaaagatgtcacaaactcaatggatatccccctggtcacaaacttcatgacaaatttctcaatcgtgatgccaagggacctccaggaaagcctgctggtgtgaatttctctagtactgatgaaggaaaatcagaaaaaaaaaagccactagaaagaaaccttgtttttagcctgtccaatgtgtaatgtcagaagcttatgggtgtggtgtagtgtcactctatttttttagagaaaaattatttatcaaattattattatttaattaattaaataaaaaagattttttttaatgtatctaattaattggtaaacagaggctttggcttcctgatttttagcatatttcccacgatcctacgttctaacagtaacgtctttcttctcgttactaccttcggtgcattgcctatataatgcatcagaaccaacgggagaaacacatctcttttttttcactaaaaaaacatatacgatatatacatacgattatatta

SEQ ID NO: 232469 - DNA, 658 bp, Cannabis indica
ttgtcggagcatgcatatgaagacaaatctgttgcacgacataagatatatcaggccgagtgaaagtaagatactgaagagcccctacaagactccgatatttagttggatcatcaaaaggagtatcactggtggcactaagtttggacttaatgtcaacaggagtagaacatgaactgcagttagacatgccgacacgatcaatgatttttgcagcatattgtttttgagataaaaataaaccatgggcatgccggtaacaaaaatacccaaaaaaaaactcagaggacctaagtccttcatagcaaactcaaaacccaatagagtcataaaatgcttacgaagacgatcagttaaagccgtaagtataatgtcatccacatataacaaaatataagcagtgtcagaaccattcttgtaaataaataaagaatgatcaggcttactatgagagaacccaatggtagcaacaaaatcaacaaacctttaataccaagcgcgaggagcctgcttcaaaccatataaagatttatttaagaggcaaacatgatttggatgattttagtctcaaaaacccatgggctgatgcatataaacggtttcattaagatgaccatgtaaaaaagcattcttgacatccatttgatggataggccaa

SEQ ID NO: 232470 - DNA, 2453 bp, Cannabis indica
cttattcgtttcggacagaagtccttcaaatgtggaatccaaggatccgaccagatgttcgtagattcaccattagcaaccaacttgcaggctccttttttcagaatagaggtggccttgacaacacttttccaaaaccaagagtcagagtttctatacctgcaagagaggagatcatttccccggaggtactttgccatcaaaactttagagcacaaagattggctcccatttaagatactccacccccatttggccaagaaagcctggttcatttcttttgtttttcggaaccccaatccacctaaagatttagggagacagagcttatcccaagcctttaggtggattccatggtttcctttctcgaacccccaccagaaatctctaaccaaactatcaatctgattaaccatccgagaggagagcttggttgtttgcattgcatacataggcaaagacaatcccacagattttataagcgttgcacgacccgcctttgacaaggtctttgccttccaaccctgaagttttgacgttagattgtctaggataaagttgaagtcagcatctttctgcctagatctgaataagggaagacccagatattttaaacacccctcaggataatcaattcctaaggcttccttgatatctctacgcatgttctccgaggtattgttactgaagaaaattgtcgtcttaagcttattaacctgctggccagaccaagagcagaaattttctaggcagctccagaagccatttgcctcagttaaattggctcgacctaccaaaatcaagtcatccgcaaagaaaatatgggataaaacagggccgcccctactaagagtagtacctttaatggagccccggtcaagggcgttatggattaatcttgagagaatttcagctgcccagataaaaagataaggggagagcgggtctccttggcggagaccgcaagtaggattaactctacctacttgccctccattaaggcaaacattaagggtcgtagtagaaatgcactgagaaatccaatggcggaatttcagagggataccataacactctagaacatggtcaatgaatttccagctcaacctatcatacgctttaaccaagtcaattttgatggcaaagaaaccctccttacctctcttcctattaaatgagtgaattatctcctgaacaatgacattgttatcatggatatttcttcccggaacaaaggcagcttgggttgggcaaattatggaagggagaataggtctaattctgttcgccaaaatcttcgctatgactttgtacaccacattacacagagaaatgggcctgaattggttggtacgtttagggttctggacctttgggatgaggacaatattggtggcattgattcctctatgcatattaccgttctcaaagaagtcaagtaccgcatcacaaaaatcagatccaacagactcccagtagtgcttgtaaaataaaactgacatcccatcaggacccggggctttatgattgttcattgcaaatagagtcctcttaatctcgtcagtgctgggagagctgacaaggtgatccaactcctcaagggagaggctctcctgaatcagacgagcgcagttgtactcctggctagtagctgcctccgtaaaaataccctgaaaaaactcagtaaactccctcccaacggcctcgcgtctagaaatccagacgttatctctattcaaaatactctcaatagcatttcgccggcctttaatggcggccgaaaggaaaaagaactttgagcacttatccccatctttgagccacgagatcctggccctttgcttccaatagattgctttcctttcccttgattcgttgagttcccggcgaacttcacattcctgcttccaatttctagatcccgccggaagactctgaagagagttgagcttatcttcgagctccttaatggtcacatcaagtttaccaaattgggttcgattccagttcagaagcgccacccgtgtagcaccaacttttttgaaaattctcgccggtgcccaggcatgattgatagagttccaagcactatccactaccagattacttctagagtcacgagtccaaccttcctcaaacctaaagcaccttttgaacttggtcaccagaccattcgacagaaggcataagggcctatggtcagagttgctagtttgggacgaacataagatagccctgggacataaattgagccaagctccattcactaatcccttatctaaagcagatttcacatgatgccgtccggatcgatgattgtcccaggtcaagttgtccccttggatcggcatatttatgaggcctcgagcattcataagattggatatgattggaatgaacggatcccggccagaagaaccttccctttctgaggcattaagaacaaaatttgt

SEQ ID NO: 232471 - DNA, 1372 bp, Cannabis indica
aaagagaaaaagtctcttggtgaggagctcgtggtggtctcaaactcgaaaggaaataaggccttaatgaaaaaatgttgacattaaatgagggcattaaagagaactccggtagagatttttgatcaagatgtgcaaatctatcttggagcgcatgagcatgactaattagttcatcaatcatgtcgttgaaatttagtttcattagtaacgtctgagactcaagaacagtcactgggggtggtgcatatggatactcacgatcattgatctgaagaagaagattgatgtaaaaatcaatgtactactccaaaattgtttaagtagtcgtcaattcttctctgaaaactcaagtcttgtttgaaatttgggtaaaagtgataaatgatggtatttcacaatatttatactcaaaaagagagattcacacaatttttagatcaaagaccaatatcaatttttagaaaacactaaacatgtccaacggttcgagaatgccatcattcatacatttaatataatatattgaaccaagaaaatcttagtgataatattattttctagacttgcaccgaaataaccagctgccagtttaataagctctacttcaaatgcctcctcaaagatcgttaatcccataaaccaatgaagtgatgccacatattgccttaattcaaaaaatggaaagctttcaaaaacttttaaagtgaaattgaaattccaaaaattttcacctatagcctccacgtgtccatttgtgtagtatggagcaagcctgtgcaactcctagaatttcagaagcttgggggtaaatgttatttgtgtttctagttagggacacgtggagtacttataataaatatagcttaaatacttaaggcccaaaacatgccttgttgagataactgggccgaatccatagatcatcaatccttccgaatgaagaataaataactcatctaggtgagatcctattctgcatggttaatgcagaagaggtaaaatcgcatacccagaagaagcctctagcacatattgggaagcccagtacagtttccttaattattaccagatcatgtatgattagggattgccttctaataatctcagacataagatcatatctttctaaataaggaaatatggtaattaggaatcaagtaattaatgtgcattagtttggacgaagataagacatgattttaacaaccaatatcttgatgtggcatccgcatcagcatacacaaggcaccccatgggctgggcttcaccaaatagcctaaagttaatattttatttataaactccccattagagggaaaaaggtaactcgtatgacctctaagcaatataaatactcaacaaatcctac

SEQ ID NO: 232472 - DNA, 1149 bp, Cannabis indica
gtctgcccggaaggttgtggtctctaggaggcaagatcagattatgacctttgttgggccattggtttgggctagacataagaaagattgtgccttcataagcagcttgaaatgctggcttctggcagtaatcatgaatataaccccattgatgatggttgcaaaacaaaatagcagccaaagcatgtccacaaggtattcctgagagcttgaatactctacaagtgcaagtttgtttatccaaatcaaccgtaaatgcacctccaatgttcatcctaacctaaaaaattgttgcattggcacgtgtaattgaacagtgtcgtgaaacgttctaccattgtctgacaatcttcacaatattgttgtggacagctcctatccacctcgacacagattctcttctcttgcaaaatcgacacatcaaccagaaccttatactctccagaagagtaattattcgcttgtcccttgcatccatgatagcgtggttaaaactttcacatacgttgttcagtagcatgtcacatttaactccctctttaaaatgtgcttttgtccattctgttggtggtttagcagccaaccagttgtaagcactctcattttgattctttaactcttccattctagagtcaaactctgctggtgctatggctctagctgctgcccaaagcatctgtttcaacttgattcccggatagtcctttttaaagtttccatacatgtgtctcacacaaaagcgactagttttcggtgtcaaatcatccttcaaccactctaagaaccatgtccagctactagttgtctctttttctgtaactgcatatgctattggaaatatgcagttaccccatctatcccaactgctgccaacaacactcctttgcaataacctttaaggaaacaccggtctaaacctatcagtggtttgcaccctcttaaaaatccatccttgtaggccttcaagcatatgtatactctcttgaatattctttttccatcaactaggtcagtctgaatcttagctgtgctaccaggatttgtagctaaaacctgattgtaataatcctccaacatagcatattattgagctaccaatccctctaactgagcccttgcataattcttagccctataaaattgagactc

SEQ ID NO: 232473 - DNA, 1124 bp, Cannabis indica
ttacaagtattgtgtttcatgtgtaatatactatacaaacgacatttaataactctttgaattttcttaactatatgtaaaacagtgtaagaactattctcatggatacatttatttttattcaaccaaagatagtaaaccgttgcagaaagtgtagcaaaagtaatgtcattcttagacttccctgctgtgttaattagagatcacagtcaaccaaccttcaaactgtaaaggccaagccttgaaaccaagccaattaaacaacatttgaataactcaaattaaaaattgacagtgaaaaaataaacgattatgactctcaatgctcaatccacaaaccaagcaatcactcgaagtaactgttatgccaacatgagaaagttgatctcgagtgagaagatgcttatgaactgcttgccagaggataaatctgtgcttgggcagattaaatctacacaaaatagctctaaagaagttgtcttgattacaaaccaacaagctattatagagtttagaggctctaaacttacattttcccccactaccttcacctgtcttaaatgacacaattttctccaataccatttgatgtcttggggaagataataactcgagagttcagctcccttcaagtggattgagttgatccatttgacccacaaaatatcatgcttctccataatagcccaaataaacttagcaagaatagctcggttccaattagaaccatccttgaacccgagaccaccaaaatttttgggcctacaaactttttttcaagaggccaaatggattttgcttctattaccattttgaccccataagaaaagcctgcaatgtttctctatttttttttacagtgctttgagggagaatgaaaatattcatccaatagttcctcaatctcagcaaaatagtttggataagttgcattctaccaacataggataagtttctagtggtccaagtatgcaacctctttttaatcatattcaagataatcccacaatcttccatgcgccatttagtagatctcataggtacccccaaatatttgagaggaaaatgaccctcctcaagcccaatctcattagaaatatcttttctaatagaatgctccacac

SEQ ID NO: 232474 - DNA, 1717 bp, Cannabis indica
taggtttaaaataaaattatacaaacgactcaatggtgccatgcaatatttcccgaggttttgtttttgtgcaaaaatataatttttcccaaaattagcgctatagcgcctcacttatggagttatagcaccacaagccatttttcgtcattcttttactacttcgaccttacttagtacatcatgcataacttttacgtccggactctaaatgaaatgatttaacatattttagaaaactaggaatgagctctatcattttggatttcataagctcttaaaaatctcagtccatcacaaaattatcttttaagcacaaatctacacacttagacaaaacacatcaaatctatataaaactttaagacataaatactaaatcatataataaaagactaggaatgagtgtgcaaatgtgcactcatcattgcaccacaaccaaacagtttgtttcaagagatactgtaacaccctactagtttaggcgtgttattgtgatttcatactaactgtgtaatccgttgctaatcaacggatttgttggaaaacatgtttaataaaactttacttttagttgaaaataaataacctttataaaaactgggatcctgttatttaaaagttacatccataatacaaaatattaattacaaaagttgtcccctagcgactaatcaaaatacaacctactgtcctaaagatcaaacactccatgtctgaccactttgatatgtacaatattcatctgctcgcactcactactgctcagccttagctttgcccttacctacacatgtgaacaataactgtgagtcgacagacttagtaagaaaagcgtaatcaaaacataaacttaatccagattacaattaggcacccatacgcccaatcataaccctatcccgcatcccacatgtattgagtctagaacattcgtataacagttctattgaccataatatcagcctatactcggtactctagtcgtatcgatgtgatatcgtcaatcaatacttaagccaaacatacattcatcagtatctaatatagctctatgtatattgataccgttatttcaatatgttatttaacatgcattcataaacatgcacactaaacatgtagtcatatatgcatatcattatactaattttacctcaatcctgaaattaggtgttctggtcaacctgagtagaactgcttgacggtttacaggctcctaagtcacaacattcataaagttgataagtgacacgctaaattactttttggggacttaaaatcataactaaaagtttccctattgttggataacatgaaaataccttaagtaccgctaaaacatgaaaaactaggattccaaaactgctagaactggtaaactgaattcccaaaacgaaaaaccagttcttagggttctgcctggggaaccgatttactggttctacagggcaagcttgatttggttgaccggttctctgaaggaaccctaaaaaacttcattaacaaaacaattctacctcaaattatttcaaaccttccagaatacctatacaagccataataaacttaactcaagcaatagaaacaactttaaacttcataaatcaattttaccatggaagaacagtccaaacacaacaacaagcaacaattcaagccaaaaccagctaaaataactttaaaccaaccccaaaaatcaaaaccaaactcaaat

SEQ ID NO: 232475 - DNA, 1177 bp, Cannabis indica
aaaacatctaggaattcccgaacaaccttgatgtcctctggccgaaaagactcatgctgagtggtatccaataccacagccaaaaaacctagacatccatctcgtaacgattccctggctgttagtactgaaattactgggatccgagatccttgaaccgatccaacaaaaatgaacggttcttcaccttctggttggaagattaccatcttcctcttacaatcaatactgactgagtacttggataagaaatccattcccaatataatattaaaatccgctaaatccatttttattaagtcaacactcaactccctatcctcaattctgatcggcaaagacctaacccatgttttggagatgactaactctttgctctttgccaggcagtagggttccaaaccttgattcataactatcatgcagtctacccaatcaactaaaaattctggctaccacataagagtgagtggccccagagtcaaataacacagtgaagtaagagttgttgatcgagagctaacctgttaccacagagggactggcttctgcatcagcctgaattaacgcgaacacccttgctagagcaggtttcggtgcagtcttctattcttacttcttgagttgggggtaatccctttatagtgtcctggcataccacactggaaccacctctgctctctacactctcccaggtgatgctttttacaactggggcattctgggtaagtttatcgggttttggagccaccctaatgattgcctcgaccctggttccctcagaacctcttattctgacctgaaccactagatgcagtaggttcctttattttctggtcagtggtcgagtcactacctcccctactaaagcctgatgtaggaggagtaggagccccaccaacaacctgagtccctagcgactctcgggtacactccactgagccctcagcttgcattaccttacctaccatatcaacataggctgcgttgtcctcggtagtgatcactaaatcatgtcttatctttgagttcaaccgatctaggtacttctctttcttgctgaaattggttggcacgattctcgaagcaaatcttgcttatttaattaaaaatataacgtaacatacatataaaattctgggatcccgtttaacaaaaaaaaacatttacaaaagtt

SEQ ID NO: 232476 - DNA, 754 bp, Cannabis indica
tataatatttttaaaattaatatttcgtggaccactaaaaacttgccacgtgtacaaatgtgtacgcgtggatagtccaccgtggcacttaactgtaattttttgacggaggtgtgcaaagcaaaacggaaccaggatttaggtagtttagccgccaaaatttcgatttttgtggttaagtgttacaaatcgtaaagttcaagtggtttagccgccaatatccccacaaaaaaattacattgtgactaaaaagttgtcactaaaagtaacagtattttgtagtaaacgaaagctaatgggagttatatatagaagctttaaattggttcaaagacaattattttatttttgagattgattgcttggcaattgtccaagccttaaggttaagggggtggctggttatggtttcaatatttggtattgttatttatgaatctaaaattttactttctgagttaagaaatattttaattttttccgttgaacgattaactaatgtagttgtttatgaatttgttagaacttctctagattttagtttgaagatgtcttgattaatttgttatttcgtgtttggtagcataaattgttagtttataaagtttgaattttccattaagaaaatatttatgtgtgaatgtatattttactcaatataaaatttaattaatatccaattttcaagaaacatacattacatatttattcagtattatcctgtgattaatctagaaatgagctggtttggaaa

SEQ ID NO: 232477 - DNA, 1025 bp, Cannabis indica
atctcttattggagatgtaaaaaattatgttatattatttggtatataaaaaaaaattatgatatatttttcatattttttttgatattaagttctaataaacaattgtaaaattgaactaatgcaaaatttaatattgaataaaaaataataattttaacttttcgttaattttattatataaacaataataaaaaataaatataaaaagcttataatttaatactataactaaatataataattaaaatagcataaaagaaaagtgtacatttatgataatgaaaattttgtattataacaaatgctgaatttaacaccacatttattatatactatgctaaatttgcattagttttctttacattaaagcaattataggggctactttctacaattactaaataggataccaacaacttgtggagaacaaaagaagtgacaagagtttaaatgggagcattggtatgttagcaaaaaggactctcaggctcaagttattacactacaagaaatgtcacttttgccagcacaaaaaagttggtattgcgctggtaaaatagaatttacttgtgatgtgttcgcaaaaaggggttggtaaatcaatgttggtattagaatttttgccagcataaaataaaaagcgctggcaaaaataacttttcccagcgcgtaaatgcgttggtaaaagttagattttagtcactgtaaatgtacgctgataaaactttgacctctttgccagtgcagtttatgaaatgcgctggtaaaagtaacttttatcagcacagtagcgaactgtgctggtaaaagtgatatttcttgtagtgttagtatgatattgtataataacaataagtgtaaataaatgaaatataaatggtattgccctctcttcacgtcaccttttggctggttcaaaatggttgccctaatattacgggtatatgttaactattgttttaactagtttcaagtctatattattagttttactcgttcaaatgattgtttggatttgaacc

SEQ ID NO: 232478 - DNA, 558 bp, Cannabis indica
atggtgaattgattgtactttgaactcatcgttcggttttgatctacatacaactgtattctccattttttggctgataattgctccgtaattttttggacaaacaacctaggtttctgtaaaaataatttgtaataagatttattatacttctatttatgaaaatggataaattttagatatttatttttgtatatttacctcgtccgaatatgactttagttgaactgcagtacatgagaatatattttctgcaacatctccgaacatcacagcatccaacaactcggtaccatcgtcggatgtacatatgtccatgcactaataatttatacagaatatataacggttagtataaaatttttgttttatttaagatctatctaagtggaactatatgcaactgaataaggtagagtgtaaaaaataatttccaagtctttaggcagtagctaaattgtataagattttttcttttcaagttaacgattgaaaagaatatttaaaatttttattttttttatttgaataatttataaaatacgattgaaaagaata

SEQ ID NO: 232479 - DNA, 604 bp, Cannabis indica
tttctgacgggaagggagtactcgaacggagccggtattgtggactccggcaatatacatggatcataattctcctttcaaagatttatgcttgaagaatatatgaaagatttttcacagaatttttgaagttaggtagcccgtaatatgactgattatgcgatgattttataggcgacagttttatagatcatcagtaattctttacccgacggtgtaaaactgttgggaattttaggtttttagtagtgtcattaacaataaaattcgtttcaccttcatgggatgttaattttatactattttttacaattaaaaaatgctatcagtatctttttaagttctccaagcacaagcacttgcactgttggtaagtttgtgttgggcttaagacatgagactacccattaaatgggtctttttagattcttagctttgtagggttatgtataaggataaattaggtgttatctttttttgatctaaaattttattgtctagctttcttaaggcatctctctcatgtcattctcaacttgctattttaatgttgaagctcatagattagctaagcatgtttttaggatagacaatcaagtttttt

SEQ ID NO: 232480 - DNA, 890 bp, Cannabis indica
aagtttattttatttgctcataatttagtttcttaaatgttaatttttaaattacaaaagtaaatgcaaaggacatgattagtggaggtgttatttgggaaccatttcagattttaagagactgttctagggaggacatctgagctcatgctcgtcgaatattgcattcaagccccacctttagttctaaaatgtgtcgactacggatagaatattgatcattatgtaatttcaaataaatagactccataaaaatttattagtgcattgtgtgattttttttttctatattgcaatatgtattgtgcattgtgcattgtgtgatgtttttttttctaagttttattgtgtgttgtttttgattatgtttgtgatcaattttttatttttatttttattcgtgtgtgcatttttttttcttcatttgattgactaatgaaactggtttcggttgacttcattgtttatcatttatgttttgttatgatttttcatagggtcaaaattagtttcaccgggttcaaggtttccaaactggtttacatgttttgagacttctgtaatggagttactccattttttgatgtaattgcatattttttattttaagttacttttttattattttgtttctaggttcgaaacttatacttatattttattttcagattattggtacgcattgtgtgttgttttgattacatttatgattagtattttattttgtatttttttgtgtgtgtgtatttttttttttcattttttatttggttgtctgatgaaacttgtttgagttaactttatgattcaacatttatattttgctatgatttttcatagcgtcaaaactggtttcacaaggttttaaatattctgtaatggggttgctc

SEQ ID NO: 232481 - DNA, 752 bp, Cannabis indica
aagttcatccctcagagaggtttgcgttaaggagatccgctttctccgttattatttctcctttgccaagaagttttatcgaaacatattgttaaggcgaaagaaagaggtcttatccatggtatcaagattgctcaatcagctcccctggtgtcccaccttatgtttgcagatgatattatcctcttcacccgtgccaatgtgaacgatgcccagaagttgattgaatgcctcttaacttatgaaaaatggtcgggtcaatcgtgtagcaaatccaagtccagtgtgctcttctcgaaaaatttgagtagcggaaggaaagacaatatcctgggtatccttaacattgatcaagttcgtggagtagagaggcacttgggtaatccatttattttcaaaagaaggaaaaaagatgattacatgaggcttaaggaaagtatgttgaagaaattagaagggtggaagatgcaactcctctcttatgtcgggcgactaaccttaatcaagtcagtgacctcgtcgatgccaatctatgctatgtccactaccaagatccctatcgctagttgtcgggaactagattcattgatgagaaagtactggtggttagggaatgtagacaggaatatatatctggctcttaaggcttgggatcagatttttcaaccaaaagcttcaggagagttgaggttaagaagatgtgaatatatgaataaagccttattgtcaaagttggcttggagtcttgaaac

SEQ ID NO: 232482 - DNA, 1634 bp, Cannabis indica
atgctctcaccttgtggatagtgttttaaatgtaaaaaatgagctaatggagctctccttttataggtgaaggaagcccgcaaaaataggaaaaaatgaaaattagacattttttactgtagatgatgatctaatggtaaaaattagctcttggtggagaaagaaattttttcggatcccaaagggttaccctgtgggtaactcagagcttgttattgtaactcccatggaatgaaatttgacaatgatagattcagaattaagattgaagtgtgcggtatcacttgatagagcattgacttatcttctaaatgcaagtttaatcgcgtcaatcgaataaatattgagtgagttatggctattattttattcaagatagttcatgacccagcgcccaagttgacatcccagcgcccaggttgacatatgacgccaacgtggacgctggataagtgcaaaaacgtctaagagatgtactttaaggtgtctaagtgatattttgacatcacttagtctgattttgtgttctggcgaagctggtcaccagttctcagaaataatgttcttctgtagaaatgagagactcaaaatcttcatttccgagtgagtttgaaatgagaaatgaaaagttttgaatttgacttctctgacttcatggatctatgttattgtaacaaactagatggactgtcgatacaagattagaattagataagcagaacccaacgcgccagaccttttgtcaacctagatgctgggcactttctcccgagctctcgggatctcatttttgatacttcaaaggcttctcaacttgaggacgaggtgtcctacccccatttttaaccattccacattcattggtcgaattagatttggcatttgcgtaattgaaggcagcaacccaagtttattgttaacctgtgcactaggcccagtaccaagttaacctgggcgcggggccccgtttccaggggcttgagtttgtggttttctccccaatttttcttgaatcttcattatttctgatgatggaaaaaatacattaaacactttttagtgaacttgattggaaacaacccaattttacaatacatcaactgggcgttgggtcccagttttggccctatagaaattccgtttgctccccaaaaatagttgaattcctatttttttggagaagatgttcgaacaaaatctctgaaaacaccataaaaaatggcccaggttgacaaaatatcaacctggacgcagggcgagccccaagtgtcaacctaggcgctgggctctgcttttggcacccaggaagtgctatttcttctctgaaagcacctatttccccatttttgatgaagatgaagaagatgcaaaaattgtatctttgatttgatacatggaaggcacacagattgacagattgccaacctaggcactaggtgctcggggcctcaagggctcaggtgcttaaaagtgcacttgcaccaattctaattctgatgcctcaaatatgtcagtggtatgtttagttgatatctcgaagaaatttttgacctactttctctaagaaggtcccaaaaactgaaaccctagttgagaatgggaacctaggccctggctaaaaccctaggtgccca

SEQ ID NO: 232483 - DNA, 2206 bp, Cannabis indica
aggatgcttgtccgctaaactttaattaaaaatatatatgtacttattagtaaaatatttttaacttgtattttgatactcgggatcccgatccatatgattattaatatataaattattaaagttaatttttgagtttattaatataaaatacgagcgttacattcagtttttaagcacccggagcaccaggtgccccatgcacccagcatccaagttgacatattgtcaacttggggcatttccaaccataatactagagaaatatctagagcattttctttgtcttcatccaaaacgaggaaacaagtactttcaagggagaaatggattgacttggaggccaaaatagggtcccaacgcccaggttgacactttgtcaacttgcgccacttccatcagtagttcaaatgaaatattttgggcatattttctattttcatcaaaaattaagatttgagtgctttcgagaaacaaacgaaatcgtctcagggtcaaaattgggacctagtgcccaggttgacactttgtcaacttgggccattttcaatgagttttttgagaagtacatattctccgtttttgtcaaagattaagatccaagtatttttgggaatcaaacgaagtcatttggggcccaaaaactgaacccaacacccaggttgacattttgcaacgagcttccaatcatttttccaaaaaaatatttcgggcattttttctgtcatcaaagataatgaagatacaagtaatctcggggagcaaacgagatatctagagagcctaaacagggtcagcgcccaggttgacataacactggaccatacgcctaggttgacatgtaacctggtttgcatgtttccgcttctcaaacacaacttttgctccaagcattcttaaacttcactaaacttcactttgaaccttattatttaggaaatcatgccattaaaattactcaaatgttgaagcatatccatattgtcttgcttccgcatctgatacaactccttccataagtagaacttgttagaaatattcttggacatgtataaattctctaaagtctttcaaattttcttataattcttggcactctttcgattctatattttccaagacgctatctgacagatttagacaaattgtgtctgctgcgatctcgtctatctcctcccaatgtttgtccttcatcgtgctagactttttctctatgcctaataacgccttgtgggtcttctgttgaataagaagatccttcatcctcctctgcaagagggaaaaattactgttgtcgctgaacttctcaatgtccagtttttggcacgtcatttctttagtctcattgacctctgtactggctaggtgatttctaggaaaggttgtaattatatatcgcagtccaatcaacaaatgataggttcagacagtctcttaaacaaatttacctttataagtgagttcccaagaaagaagaggagagcccacaagtggactaattaaattctagtctcctaaacataactacttacaccgtacgtaaccaatattgatgcaagaatagagctctcgaccttaacgctctgatgctggttataatggataatatcccaattccccttcacgattaatatttgcgagaaaatacaatggagactctgaaattcttttcttatgtaaaagatcaatcacaactacaaactatattttgaattttcgaataccttctaatgtaaatatttatttatgaataataatcaatgtactaaatgcacgtaaaaaaattatctcgtggcaaataaaaaattacggtaaaccttccactataacaataataatgggtacacaatattacactctcaaattttgacaaatacttacactcattaatgtggtaatctcaccatctttatacaaaatatttctcacaattttgtaggaactctatttttctttctctctctcagatttctcttactaagagattattttttctattttttctcaagagtctcactcttcattcttggaatagcttgtgataattgtgatgagatgagcaaacgaaagggataaaactttatttatatgcctctttaaatgtatgaacaagacaaaaaatgaagcttgcattaaatatataattgaatatcaactacaagaattttgtatagtaccggcggagacatccgccggtataattgtc

SEQ ID NO: 232484 - DNA, 2155 bp, Cannabis indica
gaccaagtttgaagacgaagttgggtagaaggagccccataaaaagccgtaaagtgccatcttgtttgattatgatacgcaatgtaacaatcaaatacatttgtattataatttaaaatagatacatctacatcatccttccaaagtaacattaaaccacctcctaagcctactctaggtacatcaagaccattgctaaaatgcaaactattacgaaagcgagaaagtacattaggacctaatttagtttccattaaaaaaagtacatgaggagattgctctttgacaagcaaacggagatgacgaaatgcgctaggattccccaagccacgcgcattccaacttaggattttcatggctgattgcggggctgagaatcagccaccgctgcagtgtcaagtgaaccagaaagatccaaattttcagtggaaacttgctggttatgttcccttccaattgacaaagttggattggagtttggttgttgaagacccctacacctcttgagtgtgtcccgcaatgagcttttatcatgctgccttttgtaacatctattgggagaacaattttctttgccaaaagacactttctgtgttgacaaaatggtggatgaagagggtggaagagtgaccataggagtgtttatggtgttgctactgtggctatgaacagagtatggatatggtggataagttgcaaccacatttggggcattggaaaaaccagtaggcggtataaagatgtttgataaatcagcatatgaatctggtttgggaagggaagaggcagtatgtgtggcatttgtggattttatagcaacagtatctatgaggttatcatccaaaggcattgtcgatatgtgtggtgtaaaggttgctggtgcaaaatgtatgggatcatttgtgcgatgtatagccttagtggaatttgcagagtcagtatgatgagatgaagcacctggtgcactggaaaccggttgtgttggctggtgcgagacaaaaccaggaggagataaatgtgtaggccttgagtgatgcactgatgtcctttgccaagattgatccccttgcctggaagattcaccttcaaacagtagagaaggttgtggtggtggtcggctgttaagagttggaactgctgcagacaatgatgttctagccaaacgagtaagcaatggccaagcatttcccttcccaaaatcagtgcgatatcggtcataacccgaagtaggcaatggagatcctttaatagttggtcgatactcaagttcaggctcaattccattgtcaagcttttcaaggaaactcatacacttgttgtaaggatgtccaattctgccacattccatgcaatactcaggtaacctttcatatcgaaattcaacccagaatttatccttgacttgtgtaagagcaatcatacgccctcgcaacagcggcttggtaacatcaattttcacacgaatgcgtaaaaatggaccccatccttcaaagagagagtcttcgaagacatcgatgaattctccaattaagttcccaagtgccacagccaatcccttggttttactcatgaagggaagtcgatatacttgcacccaaaatggtgtgtgggtgagcatagatggggaaatattttgaccaatggttggagatagtaaaatgatgtgatgattttgaaagtgaaaaggctctttgtcaaggaccctttgtcaaaataataacttggcatcatatatttaatatttttttatttagttttgttcaaatattcttttataataagtcaatattgtttgtcatcgtttaacataaaaaattgtacctaattgcaacaaaatattaaccttttgtattagttttgaggtattaaaatacaacaaaatattaactttttgtataattatcccaaaaaaaaaaaaatagaaattaaaatgtagcaattaagaagatttgagtattatggccgcaaataactcttaatccaatatgtatacttataaattaataaaatttatttgagctaatattttaaattaaactatataagtgatctaattaaatgagtccaataaacatcttatttagttgaattttgtaatgtataatacctaataataaagggtttagccccttaacatcttatttagttgaatttt

SEQ ID NO: 232485 - DNA, 1223 bp, Cannabis indica
aaagagttttatttagggcataaaacccaacaccatcaacatacaaagtccacccttcgcccgttggtaattcggggtcgactcgctcttctgtgattatggccacttcatcatttggaaactcgagtattaaataagcaagggcttatcccttgattgccgatcttggtttgtacctgatgtcgaactggctttgttctactgatcatttgagtaatcttcctgatgcttctggttttgccaaaacttgtcgtaagggatagtttgttaaaacctcaatgttgtgtgcttgaaaattcgcaactttcttgaagcgattactagtgcaaatgctagtcattccatttgtggataacaggtttcagcgtctaagagacacttgctcacatagtataccggatgttatctaccttggtcttcgcggattagcactgaactaatcgcgtattcaaacaatgcgaggtagatttataagacttctccaggaatcagcttggatagtattgggggttgccccaagtgcatttttaaggcctgaaaagcttcttcacactttttagtccattgaaactttttatttccatttagaatttgaaaaaactctttacatttatcaaaggaacgtcatataaagcggtttagtgctgcgactttacttgtgaagctctggacttcctttgttttggtgggagattgcatctctaccaaagcttttatatttgcaggattagctttgattcctcaatgattcaccataaaattgaggaattttcctgaacccactccaaagacacatttgaggggtttaagctgcattttatactgttgcaagattctaaacatggcttacaggtgagtgacatggtcttttgcatgttgagattttacgagcatatcgtcaacatatacttccatcgtctctccaatcagatccgcaaacatcatgttaaccaacctctgatatgttgctcccacatttatcaaaccaaagggcattaccttataacaatataaaccttgatctgtaatgaaggaggtgtgctcttggtccggttcatacatcaaaatctggttgttcgagtatgcatccatgaagctaagaagctcatgacctgtggcagcatcaacaagttggtcaatgcttggtaagggaaaactatccttaggacatactttgttgaaatcagtgaaatcgacgcatgtgcgccatgagccatttggct

SEQ ID NO: 232486 - DNA, 919 bp, Cannabis indica
agtagtattaatttaattagagaatatatttttctagtgagcttaattatacacattttctaattataattaatggtgtagaattatagttgagtttaaataatcaattttattaggaaatataattgcatgtacgaaatttgtgtctttcataaattttaaaaatcattttctcaattttctcatcacattcaaggttcttatattattctcgtaaaattattaactgcccttttgagtgtatttttcctccgtgtggatacaacatatagcccgtttactactgcgatcacattgtaactaattggacgacatcaaaatataaggggtttttaccacaaaaaaaggagattaagtgtataaaaattaaaacataagggggtttcgctacaaattgctattttataaattatttaatcttttctcttattttcattcattaagaaaacatctttagtttttttgttctttttattattattattttaagatattgaggtacgtctaaattttttataatttttctttatttagtttttattttatttttcaataatttttttaaaaaaaagcactaaacatgtgcaaatagtaaaatatatataaccaaatcaaaactattaatatataataattttttttttttgagaaatcagcaagtgttcttcattactccaatgaactatgtattttacatcctaacatcactctttaatttcaagagtccaaaaaagtttctatacaattcataaaattcacaatgtgttaaaccatgataaatcttctagaggtactttgttaggccatacactatgtattctatttttacaagtaattttcaattgttgtataagggctttcgaattctcttctttttgttgccaaaaattcatgtttctagtcttccaaattaagtaca

SEQ ID NO: 232487 - DNA, 750 bp, Cannabis indica
aataaaaatattctaatttaagttggtctaaaattaattaagaattaattttcaacttaaatatatttttctatttaattaaatatcagaaaaaatataaattagtttactagaaattaattatctagaatttatttcgttaaacaaagtgtatttttctaaattaattttaaaataatctaatgaaaaattaatttcatatattttataactaattatgtggctaatcaatttttaattaggctaaactaatataattagcctaatataattatttaaataagacaaatgaaccttcacaattggggtagtccatgtgagagaggactgagttcagaatatggtacccactattatgacctcctaactctcacacaagactcaaaagaaaagaatttaacctttaaataaataatttttttattaattgaataagcgcaatactaattgggcctattaaggtgatcattttatttttaacaacttaatccatttaattatcaaaagttaaatagactcatatatgcatctcagcccaatagcaaatatctaggctcacataaacattgatttggatgagccctatcatgttactaggttcatgacaaagataaaagaaaattgaaaaattacctgttacaaattatttaattaatttattgactactaactatgattaatttagatcataagatccatcaacaagttaatcatagccattcaaatcaattaaataataagtttattaaa

SEQ ID NO: 232488 - DNA, 831 bp, Cannabis indica
agaagagggatcatgcatgaactgggtataagtatggccgaatcaaacatcattacctaggcctcccgctgtttagatccaggcagaaaaacgctgatttcaatttcattattgtgaaccttgtctcgaagcttcatggatggaaattgaaatccctatctaaggtcgggagtgctacgttgatcaaatcagtaggaatggccttaccaatttacacgatgcaaactaccaagctttctaagaagctgacctcaagaattgatggtatgtttagagatttctggtgggggtgcgaacagggtaaccggggtctttgcctgaaggcgtgggaccgtctgtgtcttccgaagtctagaggaggcctgggtttccgtaaaactttggagatgaaccaggcactcctagcaaagtggggttgggatctcctgaatgacaagcaatcgctttgctgtggagtgttgaaggccaaatatcttaaaggaaaaccgttctttgagggatcctataagggatccgattcttggatctagaaaaatgtggtgaaatccaaagacttattgctgaaaggagcgttcaaactaatcactgacgggaaagatactaatgtctggtcagaaccttgggtgttgcatagcaagaatttttacgccaaacctagtggttcgtcctctggaagtgtgactaaggtcgctgagctgattacggaggatggggagtgggatattccgaaactccagactcattttgattcgggaacggtgcgcgacataatcaaaggaggtaaacctggtggagtaggaggagacaggtgggtatggactaaggagcaaa

SEQ ID NO: 232489 - DNA, 1467 bp, Cannabis indica
tcaataaatccctctaatatcagatcattaattccctaatgaaccacaaaataaaaggaattttctagcaaaagattattttgcccctaagcataattcaaaggttaaaagcttctaagggtagcttggtcattcaaaatcccgtctaattctcgataccatcaagtcaattatattaccccactattagtaaaatttcaaaccatataaaaacgtgattctctaatggcccaacgtcgcgttccactgctaccaaaaacaaccacagaaaaataagatattcacatacataacataattaatacaagctgaaattaaataaatctccacaaatatgcaaatcataattaataattaaatctcataaataaatcctaattatttgataatccaacatatcaacataggcggtctttacaacgactgttcatcgcgttgaccgacgtgaatattaccaaattataaacagatttgtcatttttaaaacgacataaataagtaatggtttgcgtcggttctctgtccctcgctaattacataatcgagacaaaaggaagaatttaaaaatatatatatagaatttgcgtcaattttaaagccttgcaaacacattttgtgactttttgaaactgacatttttcaattttgcgtcggttttaaagcctcgcaaacccattatatagtcaaaaatgtaaatgggcgaaagtcctttctacaaatcctaaagcaaaatcctacacttaaatatatcttattccctttctctttcttctattacagttgcatatctctttcttcttcttcttcattctatctttccctttttccttctctctttctcgattcactttcccactacagcccccaacaaccacccaaccgcgatggacgccaagccccaatgacccacccttgtgtttagtgaccgttagcctcattttgccatgttgaactcacgctgcaccaaaggtatagttctatctctctctatcactctttcagaatctctcttttttagatctggaaattttctatttcttttgtaggtttcatcgttgatagtggggagccgcagcgatgttcgagcattctttcaaatctcgttttttttttttttgtaaaaactgcattttggtttgttaatcgttatttgagtttgagcatttttcaaatctggttttggtttattaatcgatgtttagacggtatctcaaatgtgtgtgtgcgtatttttttatttttaagtttgtgtcggtacaaaattgacagaaaaatgtataaaatatgatttttatactattcccgccggttataaaggaacacaatattttcatatccactgtccaaagccgacgcagaaaaatacccttttgtgttttctgtgtatacgtcggttatgggaaccgacaagaatagtataaataccagttaaaaaccgatgaaaattgaccattttataatagtgtt

SEQ ID NO: 232490 - DNA, 1467 bp, Cannabis indica
aattcaccccctcttggaaacatatcttgggttaacaattggtatcagagcaaaagctcatttatttgattagatttcacaatctagagcatgatgtttccaagtaatttacaaagtaacatgttagaagttttgagcgcaaatagtgaaccatacttcaatggagtaaatttttcttactggaaaattagaatagaaacttaccttcaatctatggattataatttgtggcatattttgtctagtgatccttacattgctaaacatgttataaatggtgtagaagttgttaagacttatgaggcatatgatgagaacgataagaaaatgaattctaaaaagatttggggtcaaatggttgataaaacttgttttgaagactttttggaaaaactgcttgttgcaggaaacggttaactggttcctacatacttgacaaactggtgaatcagttcacagcaggtaacgatcccaatgtcttttttgtcttttcaattgcaatttttaccacataaaaatcctaccatcaagtttctattccccattcagatattccaaccctaaatagaagcctccaaccctattctctaaaattttcactctctaatgcttcatcttcaagagtaaataggcaagaatcctcaatgcaacaaagggaacaaaggtccaaggcaaggaatgacctcttctcccatagaaaatatgcaaaaagattcaatgaagacttctcacaaagagatattctaaatggtaagcaatgagatctcaaagctcttgagtatgtcaatttcaattctctttttgaacatatgggatggaaaaccttgttagaaatacaaatcaatatctatcctaggctagttagggctttttatgcttgcattaaaactcattgcaatccatatagtgttaagggaatcctcaaaggggtagcatttgagttaaccatagacaagcttaataatattctaaatgcacccaacgatggcctcttgcttgaccataaactccgccttatgaatgataccaccttcaattataaccttttcaataataatgtgtgcataggtgacaactttcgtataaaaccaaaatagaaccttcatcatccttcaaggaaaaatcctccatgcttttatatgctctaaacttgttcctagaaaaggccatcaagatgaagtaagtgcaattgatcaaataatcctatacaacatcatcatgaaagacaaccaaatcaacctaatctaccttatcctaaaaaccatcaatgaagtgtataagcctaccctaaaaggagccttaccctactatttatcttcttagttacttgttcccactcataagaatcccaattgaagatgaaactaacatttatgaacccaaggattctgacactcttggtgagatcacattcaaattaatagcgctacaagtttaatgaaagtggaaaagaagtggatttctacc

SEQ ID NO: 232491 - DNA, 1032 bp, Cannabis indica
gtccaaaatttgagacttttggttattgaatatttataatatataattttcttaatttacattacacgttcatatatatactagttattgcacgtacttattacataaagtgttataaaatgaaaaggcagcagtaataaaatatacatactaaacactatactataaaaatatgattaacttttttttttgtataaaaaaaaaatgattaacttaataatacttaataatagtaaccaccatataatcaaaatattgacaatcaagaaattgtaaaacaactgtagaaaataagtaagggaaaaatatatagaaactactttagtgctgtcaatcatctaaaatgacagccaaaaaaaaaaaccactttgaacaaatatacagaaaccacaaaaactgtttgaggactgttagttatcgatattgacaatcaaaagaatttacagatactactttaaggttgtcatttatccaaattggcagtcacatgcaaaaagaaatattagacgcagtaattaattctttgttacttcactggatgaaaccgatgaaacgttattcgaaattggggaagagttgtctagtgaagaaggtgacgcatctaggaagttgtcgtcttcatcagaatttactgtgattgaggggttttccaatgaagatagtgaaacaccaacagattgaacattttgtttaagctttttgtttgcatataaggtaggagaaacttggtgatcggttgcattctgaagatttagttgttctattttttcacttggcagcatagtagtgatggtttattttatatctattagaaaaccaagtgttagtttcatagttctcaagtaaaaaaagaatttttttttaccttctgcatggtttattttatgtagttgagtaattgcttcctgcaaaaatgtaaaaaaaaaaaaaatcattcatttatattatatgtaatggaaatgaagatatgctgttgtgtttattgttgggttttaagccctaaataaaaccacttcaatataatcagattta

SEQ ID NO: 232492 - DNA, 2426 bp, Cannabis indica
aaaaaatatttccatatatgttactttcaaaaaaattcatcatcaacttgtttgcatgctcgtttttcattttttacaaatctgagattccaaaattaaatttacaaaataaaatatttattacaaccattgaaatcaataagagaaatttattttaaaaaaatctagaataaaaaaatttctaataatatatatgataatgttacataatacttcacttagaaaattagaaaattctataaaaacttagatatacttcacttgtagcctataaatagatttgaggtctatgcttagaatacaagatgaagtaagataattcaagtgtgagaaagagagtctaaagtgtgtaaaagagtaagagtgtcgtagctagtcattgtgtccaaatgattctaagcttgtaagtactctttcttaataacaaagtgttgcaattttcttactcaacaagtggtatcagagccaagtttgtcgagctcgtagtggtagaagagcttattgttgtcgtgcataatttgagtttgtgaagcttacaagttgggataaacttgtttggtaattcgtttcccaaacaacgatgggtgacgctcaagtaattggtggtataaagcagcttaagaactagaattaaaatacttgggcaacaatgatggtattatacctccaaagccaagacttgtgggaggttgtaattagtagtgaagtaaacccacttgaagatgttgtagctttgataaaatggaagatcaaagctggaaatgtgttgtttgcaatcaacaccatgaccaaagaggaaatttttatgcacatcagaaaagttgaatcgccaaaggagggttgggtacacattcgtcacacttttctcaaagaagagtgatgcaagacttcaacttatagagaatgagttcttgtcaatctcacaacaagaaatgacaatcaactaatattttaacaaagtataatctctttatcatgagatttctgatttagagccaacttagaaaataccaaaagcaagaataagaagaataattatttgtggattgcaacttgaatatagaagttttattgttgcaatacaaggttggtcaaccaagccttctttcgtcgagtttgaaaacttgcaaccgatagagaaactttggctaagcatatgtagaaaatttaaataaagagtgaagatgatcaagcattcttctgcaacaaaagacaagggtaacccaagcaataaaataacataggagtcatgagaagttacataagaaacatagaagctcatagtcagagggagctcaaaagaattatgacacacaagaataattagatgagtaaataaaaaaatatggaaacaaagggcatattgctagacatttttattcaaagaattatgtcaaaggcaatgcaacaacctccaacaagaagattgatgacgaagaagagtgggattttaaagcatcatttatagtaaatgaatcttgcaagaagaatgcaagctttgaagaatgggtattttggtggcagtcactccagagcatattaattaaaagagggactggattatggactctagatgcccaaatcatatgactggagacatggaaaagttaggaggtgtgacataatacaaaggagaacgtgtagtggtaactacaaataactctaagttgccaatcacttacatcgacaaggttgatgcagtcccacattctagtacttatcatgttcaattacaaaatttttatcatgtgccaggaatgagaaaaaatataatacccgtacctcaattggaatcatcaaaaaattatgtcatttttggtccttatgatgtcaagatttatcaaaatcttaaagtatttaagacaccgtttattaaaggttaacatttagaatctatctatgctatgtcagtggagactgtttacgtagataaggtttaaaagaataaaacaccatacttgtggcatgccagactaggacacattagttaccacaagttaaatgcgataaaggagaaaatggttatcaaaggtcttccaaaacttaatgtcaaaagtgacattgtttgtgttggatgtcagtatgggaaggtgcatcaattaccatacaatgagttgaacttcaagcccgcaacctcttttgagctagtccattgtgatgtctttggatgagtcaagcaatcgtcaaacaacagaattcactacatggttacgtttaatagacacttctccaagtatgtctaggttttctttatgaaagaaaaatcacaaactttagagaagtttaaggaatttaaagaaaaaatagaaggagaagtagaggaagaaagattgatgcatgcacactgataatgggggagaatatacatctgatgagttcttccaatacttacaaaagtataagatatgtcattatttgatgtgtcc

SEQ ID NO: 232493 - DNA, 1294 bp, Cannabis indica
aacataaacaactgctaatttccaaattaactaagcgggctttacaaaaagcatgccaccaataggtgaagtctaaccctgattgtgctagaagagttaatcccatttctgtaacatgtctatgtttacgttcaaccttcccattttgttcactggttttaggacaaggatgtgtgaaagagatcccttgatcactcggaaacttagaaaatggtatgtactctccccccattcggcctgaactcttctgaactctttttattggcaagttaaattgtttttccaccatagccttaaactttaagaacacatcaagagcttgggacttaagtgtaaggggatagatccaaataaacctactgaaatcatcaagaaaatggatataataactataaccatctttggatttgatgtgtgagggaccccataagtcagtgtgtatgagttcaaggggctgtgaggcatgggaaatcgatatgggaaagggttgtttgtgacttttgcctaattggcatgctttgcaaaatgaaagctggtttatggtgcctgtgtggggtacagtatgtaaggctttatttaaaatggcattcaaaggatgccctagcttgttatgccaatttgtaatattggatttatgactaacattattaacagtaggagagtaagtagacagatcaacaacatcatctttattcatagtaacattgttacatgtgtatttacttattacattgtcataaacaaagttactagaacagattaaagcagaggggttacacacagaggcaagtggttgtttgagagtgggtcttgagtattcttcaagcacgtacaatccatccttaagtgttcccttgagcagcactttcccagtgtgtttgtccttgacaaagcaacatgttttatgaaattcaagaaacacataattgtcacgagtaagttgagacacacttaccaaattcttggtaattgaagggacatgaagaactgagtttaatttgagaggtaaagagttgaaagactgtaaagaagttgatccaatatgggaaatggattgtttcttaccgtctccaacaactagaccttcatgacccgtgtatgtagcagtagaatccaaattctcagtagctgaggtgacatgatttgtggcaccggtgttcacgaactagccagaatcatcgccaaaatcaggcaagaatgtagtagcataggcttggggatcatactcgacttcatgctccatgagataggcatgatgagtggactgagaattggtggatgattgattggtggt

SEQ ID NO: 232494 - DNA, 1563 bp, Cannabis indica
ctggctgttcatcctgattttcagggggtgtctcattttccccaagttgttcttcccaggccttttttgtctcctaattcatgagccacgaggtctgcctcgttgtcttctcagtccaagtctaggttgattttgagtattcgtcccctgtgccgccctggtcgaggtttccttatgttcttactcaacattttgacgctacgcctcttccaaacggcatctcaggcggcgactttctgtttcataagttctttttcctagagattgggcacctccacgattgagctcttcatccttcatcctggggtcctgaccattcccaagccgagttctcctcgagcatgttgtccgcatactaggaccaacatcgggtcgagttctttgggaacgcgtggtgcacttaggccaccctcaggttaagccctcctggaatgggtggtccttctggaccgtagattggtagatcttctggagcccatgggctcctttccagaatgatggttggcttcctcatgtggggtgttaatattttctggatttttagccatgtaggaggttgtttttctccgaaagaggggagggttttttctgagctttttacacagaggctctcaatgaaagcaccaaactgttcacgcagatttttgttaaccaaatttgagcctcaagatattaattccacatagaaaaaataaaagctatagaaaaataatatacgaacacaggtttttttacgtggttttgcagttaaaattctgcatagtccacgagtcaatcttattcagatttttgattgtgttttctctttagagcctctcttgtatatgacttttcgtccctcttttgagcttgtctgccactatttatcattacatagtgggtagttaattacaaagttgaccgaaataattttatagcaatcatccctaaaatcgtgggatttgattaacatattacgtagtataaatgtcgcttatgatttgaaaatcgtatagctgtgattttccaacttttactgggtcaaaactatcgtgtattaaacaaatctttaattgttgaatctggagatgtctcgacagaaacttgattatagtgtttccaatagcgagctgcggccattcttccttccgaggtcgacaatgtatgtcttgtgtcgatcgcggttatttataaagaaatcttctgactcaccagggttgtgagccttgctcctattagttgaatgaagctataggaagtcctcccatagcgagatggtcatcttgcatacttgttctttgactcgatccgacttttacgcttagtttgctcattgcaagctaaggacttttatagtttgtgtgtgtcactttcttcggtgccttgctattcatattcagcgacatatggtttctcgctaatacacttagtgctagtttgtacattgattcctcgccttagacattacagtcaactagttataaatatactctgatacttacgtaagtaatgagttattccatgaaaagctattacaccgattcactttccctttatcttgacacgtgtcctctagccgaattt

SEQ ID NO: 232495 - DNA, 1122 bp, Cannabis indica
tagaatcaataaacaaagctccaactttcccaaaataattctaaaaactcaacctcaatcccaattaaacctacagccacaaaacctcatactctagtctaagaatcaactttaaaatttgaaaattcttaatctacaaaataggtaacttaccccaaatacttcaaggttgacttgtggagcaaaaacaactagaattggataagttttgctgcagaaatcttcaaccttggctggttttcttggtggttcgaaaggaagaagaaggaagggtcacttgccactactttaagttttctccaataatagcaattcatttcagcaatcagaacttaataaacctaagctaagtttatctatagcactacaagacaaaagaaagataacataaccaaaatattaaattacttttctaccctcactcacaaattcaacttgtaaaatcttaagggtaatttggtaatttaactaatccaccaaaccgacaacctaaagttctatcctagtccgatatattcccattcttatccataatgtattttagtgacatatccaaccattctgccaagttcccagtcgccgaacccaaagatattttatttaaaaaatagtatccacgatacccacatattcaaatataatctctgtaattaataaattacactttatataatcatttaatagatttcactaattgatccaagtaagatcacaatcttacttcattaccaaagtaattacatatttaataaaatatgtctaattaaatatcattttattttccgagatattagaggagaagtatgagcgttggcagaatgccaacaacaaagctcgatacttcatgctttctagcatggttgataccttaaaaacaaggtttgctaacactgacacggctgcagaaatcatgaaccaattgagtgaactattcgggatggcatcaattcaatctcactttgaagcgacaaggaatttcatcaatgcacggatgaaacctcatcagaacgtgcatgatcacattctccaaatgggaagttacttccaggaagctcagaatcatggaactgttattaaataaattgttttggcatttataggtttgaattggaaaatacggta

SEQ ID NO: 232496 - DNA, 1289 bp, Cannabis indica
aattttttacaaaaaattgtgtcatacgtaattatcccaatgtaaaatataactcactttgttaaaatttaactccaatagtgtgccaaatagtgattcaaatatctcacataatcaaaagtgatctaaatctggatcacaatatagcatgatgcaaaatttacatcacaataaatattatgtttttatatttactattatgccatttttaatattttattattaaaatttagatagcatgctaatttgcattaaataactttcttaattagtattattttattattaaagtattcatgcattaaataaggaaatcattagacctctcggtcattacaaagtagttcctctggtacagaggagatcaaaatggaatcgtacaattggtgggtgaacgcccacttagccacattgtgggctacaaaattacaatttttgctaacattagaaaagttacaactaaaaaaaagagggagatgacttaatacaaaaagagacatagttatcaagggcccaatggaacactttcctattgagagcattgatcactagtctcgaatcactctccacaataacatacttataccctaaatccgcagccgatgagacagccagacaacaagccgtagcttctccgcataaaacatccgagaaatccaaccgagatgtgtgaatccaaatcaccttacccagatgattcctagctacaatagctgtgcgcatactctctaaacccactctaacatcacaatttacttttatccaatcctggggaggaggagtccaggtctctcgcaggatcggtgtagggacaagtaaaagagaagcatgtaactctgcaaaagaagtgcaaatattgtcaatacatttcaacacatcaggaggagtattattgtgtaccttttcattgcgcatcctccatatggtgtcaacaacaatagaagcataaagaaagacttcctcaaccaatccccttatttgtaagatcccagatgaatttcacccagtcccagacacgaataccagcatcacacacggggtagattccccaaggtgaggatcgccacaaatgcatgccacctcacacgataggaataagtgttcaatagattcttccctcaaaccacacaaagggcagttagaatcctcgatttgaaaacgtttaccaatctcagatctaacggggagtgcacttaatagaatacaccaccaaagtaccttatgtcgctccagaattttgctattccaaagcctattccaaaacgacggggcaacttcacagtgagggg

SEQ ID NO: 232497 - DNA, 1368 bp, Cannabis indica
aaaataaacaaattaaagtatatatcaccaaagggggttgaagattgacctgaggaaggctcatcaactcaaaaacagctttttttggtgtcaattcattatcaataatccgagcaactgctgttaaaactggcatcttcacattatatttctgggctagtgcgaccacagctccagctgttgatacaccttctgccacctactcaatatgaatcatttaagttacaattcacaatttttatcctactttataataatcaataatatgttttgtacacctcaaatcaaaatgcctacctgattcatggaactcaatatatcatccagtctctctccagatccaagacgaactcctacagttctgtttctagaaagattcacaaagcaagtaagcatgatatctcctgttcctgacagaccagttatcgtagttggctttgcacccatcttcaagaattagttacagaaaaagtgagaactgaggaaatgaattgagaaagcaaaaggctatagcagagcaataatggacaaagtaaacaaagcttatgcagaaaatgagagttaagtaacaatataatggtacactgcagagagagaatgttctttcttctaatgaaactttaattaaaaaaaagaaatttcaaaccatgcattagggaagtgggatacctttgttgccagccatcgtatctcagaacaaccctgtgcaacaagagctgccatagaattattcccaagattcatcccctccaccattcctgcagctattgcgagcacatttttaagagcacctgcaatttccacccctgtgacatcactggagttatcagaggttatgagctgggcccgtccactcaaatgcatacataattcttctggcattatttaacgcgggagtcatgaaatatggaggaattggagtatgcaattgtgctagctaacttggcttatcccaaccaacttagttaataggatatgatacacaacataaggtatctcatgtgaggcaataccttgaagtgctgattcttagatgatcagaagctagtagctgctgaacggcatttgccaatttcttgtcttttgatgccaccaccattgctgaaaagaattacacaagggtaggatgaacatctttaaacatggcctaagcaacgtttgttcaacaaatgtttaggcaatctattaatcctcaagatgataagctaaatcaataaatcttaatgccccacctcacctgttggtaatttattcataagttaccaaagagaaagaaggtcctgacaatagcaatgaaaggttgacgctgattcttcagtgcgtggggaataatctgagacatcatccttagtgtattgagctctaagc

SEQ ID NO: 232498 - DNA, 1342 bp, Cannabis indica
aaggtcgacaggactcctactgaggaacttatgcctcgctctgcagaattggcttcgtagttcatcactatgttttcaagggcgttcgttgctggttccaaggaagtcgagtttttgaagaagcagaacgtccagcttcaggggaacgtcaagaaactgaagcaagatgcgactaccaaggacaaagagctcgagaaggagaatggaaagaagcagtatgacaaagaggtttctgactacatatacacgactctttccgaaattccagactatgacttcgcgatccttggagcagaggcggctgaaatggctgaggcttttcgagctatgtcgcctatgcagacccaaggaggtgggggaaatattttccccgaggacgttgaagctgcgaatgctgaagaagtcactgacgaggctgctagcaaagacgcagatgaatccactattccaacagctcctactgcgccaaatgcttagtttacttattttatgaatactttattttgccaaacttttttttaagcggtacgcgggtactcgcaatttgtacttaaacaaatttatctttattgtctataatatttcgaacaacatatatcccttcgggaatatttatttatgttatcctatatgtttttcgcagtacacgggtactcgtgtttttttgctatttcaattgcggttttatttacagcttggtgtaagaaacgctaaggtaaaatgaattttttaatgctcgagaaaactcaacttttataaaaaaacaagttaatcaatagtacaaagtgagtgggctatataccccctatacttagaacatttatgtagagaaattgactaagtataaatacataacgagtacaaatgacacactgcgagtactattgataataaaacttcaagctttcaccatttcaggctcttcgaattgcagtaccatctagttctacaagttgatatgttgcgttgccaatcttttcagcgataaggtatggtccttcccagttgtctccaaaaaccccatgtgccgggttttttgtgtttggtatgacttttcaaagaacaaaatcccctactcgcagaattctctccttgaccttagagttaaaatatcgtaaagtacgctgctaataggccacatttttcaggtgagtctggtcccgtttttcttctcaaaggtcaaggtggaccaattgtttttcttcattctggataatgttgaaaacatctcttcgccaggaacctgccccaaccttgacttgtaccatggcttcgcatccgtaggagagcgagaaaggagtttcaccattcgtggatcgaggggttgtgttatatgaccata

SEQ ID NO: 232499 - DNA, 1843 bp, Cannabis indica
ttgtttatctaagggccaaagaccaaaaaaatacatgaaaatatagaaatatgtccaacaaaaacataaaaaagaaagagaaacttatgccccatagagcttgatcaaagaggacagctgcttggacatctcttgctgaacctcctgcatggcatcaagacgattgttcacttgttggaccacgtgcttgacctcttagacatctgctggagcagaactcgagcttccactagcagcaccaccagcagcagctttaggacgcttgggaaaagctccatcaaattactccaagggttggaatatggtgccagtaaggggaggctcaagtgtttcatgagagtaggccacatcttttcgagaggacaaaattttatagattaagttaggaaacacaagcttatgatttagctttttacctctttgaaatgacacaatctgatccaagatataggaagccaaattgatggatgctcccgaggtgatacgaaagagaaaagaggccacatcttgagacaccacggttttgttggaattgagaacccaattgctaagtgcaaacctcatgagtgatgcatgagcataagtgagatgtgtaatacgaagactctgcccagatttccactcaacccgtgcaccagtgagttcagtgagcatcaaatgtgatccatggacattatagcatttgtcacatcttctagcagttgcagagccttggaaatgtctttttcagcaaatgaaaaccaatgtcctctgacatacactttacgaaagaattcagaattctcatcaagaaaatcatcagacaagttagcataaaattctttgacaattccatcaatatatccctcaaaaccagtaagagtattttcccaatgatggtattgaacaaacttaacaataccatacaccctatgagcatgcaaatcataattcctcattttcaaactttcgggtagcataaagattccaatcacgctaattatcacggtaataaaatttggaattgacaacttgagatggagagatattactaggagatgaactctgcataggctgcttgcctttgacagcagcagaagctttggctgctgaagatgcataaggaggtgctggagcaaatttggtcaaaggtggctcgggttcgagttcagtttcctcaccgtcagaggagactccaaagtcttctggaatctctttttcagaatggatagactcgaatttggtctcgaaatcatcagaggggacctccattggttcttcttcttcagaacttgaagaagccgaagggggattcaacttcagcttcttggtaggaggaataggtttgtcatggcttcgtttagtgcaaagttccttctcgagtgaagcttgctgggcacgagtgcgagaggatggacctgttggtgtagatgtagcaacacccttccctgatgcagcagggggtgatggagtagtacgaggagaagaccccttcgacgatgaagacgatgaagtacaaaatttgtgggaacgcacagatttcctagtaacttgcttgggaattcgtttcggcttgggcttcaccggttgagattcacgctgagaaagcgatgaatctcctgggtttgatgcagcttcagcaggaggtaacaaaattggagcaacaggaggagcatttgagggggtagcatcagattcttccaccctttttggttgccctaggttctttgtcttagccatggtaatctgaaagaagaaagaagaacaaagaagcagaaaaacaaaggaataggaatcgggtacgtggtaagaataaatgacaagtgaaaattggtttaaataaacatgggagagtggagcaaaa

SEQ ID NO: 232500 - DNA, 859 bp, Cannabis indica
ggaattgaggaggggtccaatgcaccaaggatgtgtcaaccgagccattaatctcaagggaaggctggctatttttttgggcattataccaatcaataaaattcagctttgctaatgttacaacatcacttaccaccggctgtttagcatcccaaaccagttcattacgatgcttccaaaccgaccaacacaccattgacgcctccagccgctcagccatggtccatctgaccagtccctcctcgaaccacgctgcccaagtcatggcagcagtcgcgactacaggaacccgaaccaagctccagcacccttgagcaaacggacaccgcaccagtacgtgcaacgccgtttctggtgctgcattgcagaacgggcagagggtgttgatgggcacatgcttcgtcatgagttgaaatcttgtaggtaagcagtttgttgaagctcgccacaagaaatctagtactttcgggggaagtttcagctgccaaagttgcttccaaaaaccagagttggcagccatatcaatgttacctttgatttgttgttgaaggccataagcactcttgactgtgaataaaccatgatcctccttcatccaataccaagtgtcattgacatagtgttgtgagagaggaattttgaatactaaggcttgatcacgctcgattagcacatccaaaatcacctcatcatcccattcaagtgcatcggttttcataagggaatttacacagttaccaacaagagctggatgtcgagattctataaatggattcaaatcatcaactagccacgggtccatcaagatattggtagtagagccatcgccaaccattttcctaaccccagcccgaaccaa

SEQ ID NO: 232501 - DNA, 783 bp, Cannabis indica
acataggaatgatttgatttgatgatcttatatgaagtgtgttcattttggacctttatcttactctttcgttatgttgcaactaatatttatctctcgtttgttaatctacctttcaactctggtttgttgttcacatatacattatatatatgttattcttgtcatttttggttacttagttatatgacaaaattctctattctctcgtttaaagtttaaataacaagatcataacatgattatgaatcccattgaaaacccctgaccaaaattgatatcaagctctgtacttgtcatggattgattttgtctatcccctaaataattgtcatttacttgggctataatcttggacagaaattagagagcaagctatgtatctaaggtttagagagtaagagtacttatacagatttggaggtttagaaagtaagagaacttattacaggtttaaggtttagaaaagtagtactgattgagattcaaaatgtaagaatagttggtacagatgtgaggtttaaaatgtaagaatacttggtacatatttgagatttagaaaatatgattagtttagtgcagattaaagatttagagagtaatcagagtacaagctgagtgcagtaaggcattacaacaagcacactcgcactcgatcacttaaaactccaaactactgttctattctctttacattttatttgtttactcttctccacacactacttctaacaaatactcatgcagggagacagaactacatctgggcttgatccctgaaaa

SEQ ID NO: 232502 - DNA, 524 bp, Cannabis indica
ggctttcggaacttacatgatttcagtatggcgtaattgggaaaacaaggttggagattattgacaaggtcggaatctttggttagcagggtgtatagctcaagatactactctaatggttcttttttaagtgctaagttggggggaaatccaagtttcatttcgaaaagcatatttgaaacccaagagctaatcaagaaaggggctgctgttcgagttggtaaaggtaatgcagtacaagtgattaatgtgccatggcttccaagtgtggaggatccttatgttcatactgtaagtgcctctctacaaggaaaaacagtttcaagcctaatgaccatggatcaaactcaatgggatgaggatctaataaaagatattttcattgatagagatgtgaaccttattcttagtactcctttggctcccaatgaaccagatatttggtattggaggctcgaaaatttgggacattactcagtgaagagcgcctacagatagctgcagaatgataaggaggaacctat

SEQ ID NO: 232503 - DNA, 1049 bp, Cannabis indica
ttttttctaacataagggctctaattttttttttcctgtggcccactttgtttcagggccggccctgtatagggggtccaaaatttgatttcgccttaagcccgatataccttagggccagcccaattcttacatcaaaaaataaataaacaaacataactttatatactctaaatattatttaattaaaataaataaacatgacactataaacaaaaaaaaaataaataattatatatattatttattttttaaaaaattactaaaaaataagcatgacacatatagagtcatataataaacttatgtgaatattattgctttattaattaaattagtatgtttcatttatagaaaatacaataaacacatatatacatacaatagttaataattattaccatatatattataaaaaaaaaattaaaatgccatttaaaaaattaaaaattattaagttcaaaaatttgatatttaggttcaaatgttaaaaaaaatatgttatatagatattttagggatttgaaattgaaaaatcataaaaattcagattttttggtgaaattcacccttaggcgtgcaacaggctgcatgcaacctattacgcacgtggaatggaggagatgcagggtccctgaccgagaaaactcgctcacctgtagcatctgggtgaccgagtttcagataaggaacttgtccgaggcacgagcgtgcaagccctccttgtctgagggtttggtgcgtgtggtgctcgaacctcgacaccccatggacccagattttcaaatcaccatatctccctcgttttttattggaatcgagtttcgtaaaaatgaaaattacttaatttttacaaggaatctaaataaattatttccataacgaaaattaaaaaaaaattaacaaaattagtaattcacaacattcatcaatttacacataaatcaacattaacacatccaaactcatcgttttaaattaccactattttctatgaaagtaaaatcattatcatggttctaaggtcagttgttggaacttattttacc

SEQ ID NO: 232504 - DNA, 1460 bp, Cannabis indica
tgattttaattttctgcaattattttttatattctgtctgttctattttgtcgctgcaaaactggtttctgcagtaacagaattacattctgcttctactgacgtatatagttttatattctcatatatattattgacatttgtaaaaactcagtttttcaatctctatctaggccgcgttatttgatccagctcaaagcttccttcaaccctattaccttcgccgaaagcggagagacacgaccaggcaattgtttggaccaatgataagggacagctccatgatgatcacgagccagccccccaatcccgaaataaaaaaccctagaagtgacagaggcatttatattaattttaatcataccaatactggatacggaccaatgctccacacaaacacaaggactagaaccaattgtgtttgcaaaatttttgtgagcaattttccattgattaaagtaagacaactcattgtgtaaatcaaggtaaaaaaaattgagagccttaaaaaataatcaaaatcttcaaatctaatttagataatacctttgtatggaattatttcaagctcttgtttcgattttttcaaaagatgaaatttgaggtctttgattttgcagggagtgtaatgagaattaaagaaaacaataaagattttctttaatttaggaaaaatataatctgatttttatttaaaatataatctgtatttttatttttttgtggtatgtgaccggtaaaggtggtggtgtggtggttatggtggtaatgatgttgattggtgggggttggacagtggtgactggtaaacattgaaggaagaagaagaagaagaagaagaagaagaaatgtaaaagaatgagaaagaaaaaaaaaataaaagaatgagaagaagagaaaaaaaaagaaaaaatattttaaaattttatttaatttttttaactatttttcttattttagaattatttatttaatattaaaataattaaaattgtgtaaactaataagaacatgacatgtgtacaactgtgtacatgtcagttgtcctatttgacatttaactgtgcattttggatggaaaagtaaataccaaaacaaaatatcaattcggagggttttactactaaaaaatcaatttgtgggatgaagtgttacaaaatctagaatttaggtagaattgttgccaataacctttttctttttgtacaattattgtttagtttatgtgtattttttatggtatatatttttagtttattccacataatttttttttgttgtgtatatgtgtatttatttttatattattttttagttatttttaagtatgtttcaaaatattttttttattcaacaattattttttagttacatttttattcatgtgtatatttttagttttttcttgatttttttttagttgtatgtgtgttgctttgagtttagatacatatatttag

SEQ ID NO: 232505 - DNA, 2199 bp, Cannabis indica
ttcttaaccacaatccaagttctattttttctgagtgaagtcatttcttcttgaattgcctctaaccaggctttaccattccttccattgacagcttcaaaatagattgaagggactgaactgtcaatttcatctgcaacagtgagtgcaaatgctataaactcagcatatccaagtctatcaggtggccttatttttcttctatctctgtcactagccaactgatagttgctgaggtcatcttgatcatcatctgatctatcttgactgccatcaatctgttggtcttgtgtctgaactgagtcattacttagttccacctcaagttgtaatctgcttgaatttctttcttttgcaggagcagcttcagtttgacttgtagtcactttcatggccatctcatcttctctgaacacaacatccctacttatgatacagttcttaaaaccagtttcaaggcaccataacttgtatcccttgatcccatcaggataacctagaaataaacacttaatggctctaggttgaagcttatcttgtctaatgtgagcataggctatgcaaccaaatactattagatgctcatacttaggaatttgactagtccacatttcttgaggagtttcgaagttaatggctgttgagggacacctgttgattaaataacaggctgtctttagtgcttctccccaaaactttctttccaaaccagcactattcagaatgcatctcaatctttcaagaagagttctattcattctttcagctaatgtattttgttgtggattcttgacaactgtgttgtgtcttctaattccttctcttgtacaataactcttgaactcatctaagcaaaattcaaggccattatcagtcctcaaaaccttgatgcaacaccctgtttgtttctctatcatggttctccaagctagattcttattttttagcaagaacacccagaccttcctagagtagtcatcaatgatactgaggaagtagtttgcacccccaatgtttgaatattagagggacctcagaggtcagaatgtgtgtaactcagtttctcagtggttgtatgcatgccctttgggaattttactttgcaactttttcccaatgcacaagattctcaaaactctaacttttcctttagaccacctttgaataccccttgcttgtcaagttctatcaatcctctttcactcacatgtcccaacctaagatgccacattttaatgcaattttcaagagttttgtctatcactggtgctgcagaaccagtaacagtatgcccatcaagataatatatgccatttctaagttttcctttaacaataacatgtgaacccctggtaactttcaatataccatcatctatcttaatagtatggccatttttatcaaaagcaccaattgaaagaaaattccttttcagatcaggtatgttaaagggtacaattgtcatttcttgttttgttagttaactaacaactgtctttcagttgtaggttagctatcaattctgttacaagactgttagatccaatcttggttctactatcattgtatcttgtatatatatctcaactgtatcaataataaagattgaactctttcatcatatctttgtcctcttctttctctttcctttctctctcttttctctgtttctggtttatcttgttcttactcatgctacaatgtcaagaaggttcaatactcctaacactacaagaaatgtcacttttgatgtgctggcaaaagttggtattgcgctggtaaaatagaatttacttgtgatgtgttggcaaaatagggttggcaaatcaatgttggtgttagaactttttccagcatacaatgaaaagcgctggcaaaaatgactttttcagcgcataaatgtgctggtaaaagttagattttagccactacaaatgtgcgctagtaaaactttgacctctttgccagtgcagtttgcgaactgcgctggtaaaagtgacattttttgcagtgtaacatggtatcagagcagtggcctccactggtggcgaatatggcaaccataggtcctagaactgctgcaacaagagcatcaacagctgacaatagcaatggtgtcaatcagattggcaatcaaagtcaaaacagagatacagatgagaactctccagtatactttaataagtcaatttccataaa

SEQ ID NO: 232506 - DNA, 1148 bp, Cannabis indica
ttatgaaattcactatatgacataaaatgcatttcagaattcaataataacagcataaataattatttaaatatctataaataattttccataattaaacataattaactgctaattttcaaattaaactaagcggtctttacacataccatcctcgaacttccatcaagagtcaagctttaggtgacatcctgatagaaggtataactttagaagaaatcccatctgatcagcgagatgcgaaaacctggaagttatatctggatggcgcatccaacgaacgaggttcaggagtaggggtgatattattattgttggaaggctttaagtttcactatgctctaagattccaatttgacgcatcaaatatcgaggttgagtatgaagccttgattgccagcttaaaaatagcagaggccttgaaagtgaaaaatctcatttgtcatagtgatacgcagctgatggtgaaccaggtcctgggagaaatacctggccaaaggcttaaaaatggcgtcgtatttagagaatgttcggaagaacttagaaacattcgattactttaaaatcgaacaaattctaagagaacaaaactccaacaccgatgtcttagcaaaactgccctcgcagaatgatttggatgtactaaatctggtttcggtagaaatgctaagcgagcaaagtatatgtgaaactgaagacgtcgagatgataaatagctctccaatgtggatgacgcctattatccactatttactcggcgggcaacttctgaatgacaaaaacgaggcacgaaaaacttttgtatatagtacctcgctacacaatgattgaaggcaaactatatagaagagggtattcaatgcccttacttcgctgtgctcctcccgcagaagcaaatgaaatcattaaataaattcatgaaggcttctatggggatcatgcgagtttgaaaagtctatctagaaagatcattagacaaggatattactggccaacgatcaataaggacacacatgagtttgtcaagaaatgtgataaatgtcagagattttcacatatacctcgcgtaccgccaattgaacttagaatgatgaccttcccctacccattgctatatgggggatcgacctaattggggcattacccac

SEQ ID NO: 232507 - DNA, 703 bp, Cannabis indica
ttatacctttgtccaaaagcttatttttccctatctctaaatactaaaggaaaactttgagaattataagcccttcgggtatctagaaatgtgcattcttgatagaaaacttgattcattccaaatgagcaccaaaatctatttttatagtgtttatatgatcacacttggagttcaaacacattccaacctaaaactaaatcccaaataccgactcaccccaaaacatactcctcttcttctctcttctatcatcacaattttctttcgttattatattaacccatatttatgacaattataaactactatcttttatctctcttcctttctccctttattataaaaataaggcataaagaataaagggtttgttttttatattgataaaaatttgaaaattattttaatgggtagatatatgtgtggctttgattgtggaccaacaacaacgacaaacaaagttgaggaacttctgtggaattcataagaaagagtttgggtgcgagagagcattaggacaagagcagtcaccttaacgacgatgatgccgccattgattgggaggagaagctccctctgacgacaatgatcaacaagaaaatgtatgagttgagaaccaacccttcgtcagagtctaacggtgatgaaaccggcagagggatgggttgtaataacacgcttctaggttagaaggggtttg

SEQ ID NO: 232508 - DNA, 1841 bp, Cannabis indica
tttatatttttaagttaatattaaaattttggtgtataattgaatatccaatcgaaaactgattcaatccaattagtaaatgaactgaatttcgaagtctaattgaattggatcaaatgattttttttcaaatctaattattaattaaattggatcaaataaggaaaaaaatatttaattggattgaatacccaaccctaaatatgtgtggtgaattattaaggaaaacatatatcatttttacaaataataacttttcttattcattttaccaaattaaaatttgctcaatcgagttgataaagactcaaatctatttttttaaaaaataaaaaataaaataaaacaataataataacttagattaacagaacattttctgccacgaaatgggcatttggtctagtggtatgattctcgcttagggtgcgagaggtcccgagttcaattctcggaatgccccttttgctaactaatttgcttattttattatttttttttttttttacaataaagctaggtgacttcacctaatttttttaagaaaaaaaaaaacaactaaaagtaagaagtaaagaattcatcattagtaagtttcgtcctagtgcatatgtttaagaatatattattttttttaaaagaaattcaaatttattaagaaaaattcactgttacagaagaactctaaaatcgaaaacaagtatctatccaaccacagtctcctaaaatagtagcagaagttgttagtgtatgggcaacactattcgctaatcgtgaaatggcactgcaagaaccaccaccaatagcagctctaataaaatagactgaaaactaaaattaatataaaacttattaatccaaccaattgccatagtagaatcactattaataatagagatattgaaataaaattgatgtgcaagagtcaatcccagacgaattgcaagcagctccaccacattagcagagaaatcaccaaacacacctgatgaccacgccaaccaaaccacaccctttgcatctcgtatcactctctccaatctaacaaagccctttcccggaatcaccgaagcatccatcgctagagcaaaggattcaggaggaggtttcatccatcgagtagcttggtttacaactgggatcgcaaggcccaatcttaaataaaggcctcaccagatggttattggctaagtttggaataatatccaatcttgactgcttgtggtcgaacaatactgagttcctatcataccacaaccactaaagggttgtcatcattaattcaaaagcctcatgagatagcttgtcaaagagaaataggagaatttcctgcattggtccttatgcacatcgatggagcaccgaccacacccctaaccgatgccacactagaattaaaccagagtagaaaaatagagcatgctcaggagtttcagcttctccgcaccgagaacagtaaaaagttacctaaactttctgggagataagttgtgtagctactggtaaagccaaatcgaacatacgccaaacaaacactgtcaccttttgtggcatatagagatttcatactccattccactaacgagttaacatggacgaatctgcaactccctcctcaacttggagcgaccatgccaatgagtagccactcttgacagtataaatcccatctatatcgtagtgccagcaccaaccatcttttgcctcacgctttgctaatggaatagatagaattatgcccacatctattggcaaaaaaaacccaattgaaagcttccccacatcccaagtaccagatagaaagaataaattacactcacccgacaactcatcataatcct

SEQ ID NO: 232509 - DNA, 634 bp, Cannabis indica
gggcccaactccaagcgttgaacccatccttgctctaggaagcagattctcccgcgactgatagcctgttccacaccagtccgggaatattacagactgccccctcagtagacaagttctccatcatcccgcatgacctgaacttgttagtgttttggtccatctcccagacagaatcactataaacaaggggagatgaagacgagacctttgctttgccatttgctgtagttattctcattttcccctttcgggcaatctcaagggcaaggtcttactgaggcccctccgcgggtacctcaacccttagttcctcaatgtgtcctacaccaacaatggtccccactgtacggatgattcgacacacgagaaagaaccaccttggagacctaatagtcagatattttatgtattttatcccaatagtaagtgggctttttacagaaaccttagactggtcatgggtgtccatgcccgtacattaacctgtaaatactcatttatttccatgcaaaagagggatcgaaaaagaaatagccaaagctctattaaaatctctctaagctttcttgtacttcaagagaaaccaatagagcagaattagaattttcttttactgtaaacaccattgtaa

SEQ ID NO: 232510 - DNA, 1858 bp, Cannabis indica
gtacatcatgacatgatataacatgtagagaactacaaactctacagatacattttgagtaaaatatatagaatgagatgaagagatagaaccagagaacagtttaaaggagcttgtctggttgggagaaggagctcagcagtactattagctttaactacattctaattctaatctccatcacttattgtaagcataaatatcaaactatttaccaaaaaggaaaaagtaagagcaccacagtaatcacatgagtcaaattagtgtcggactcttctttttttagtaatgatacgtatatacaaatatacaaaatatattacaaagtaaggaaattttttttttattttatttttaatcattacattttccaagagataaaaatactttcttctaatttttttatcaaaaaataataacaaattaaaactaagaattttaaagtaatattatttctttgtccatccaagtgtattttgacagctggtatagtatttactgtcctcaacatggaaaaagagctagtaaagttaagccttattagtcttttgataaaaaatttatcaaattactgcaactattggaaactagttagttttaaagttattaataaaacgtcatattaattaattttaaggaggaaaatagaaaaactttatgagttcttttgatggtttcctttccagtttccagatgtacctacaaaattgacaagcaaatatttttatttgtattcttgtgttcaaatgaaaaatctcctagtttttttttctctttttttttctttcttcatatataatactttctgcaagggatattttcgtgggtaatacacaattttttttaattattggcacttgaatatttttttttcgataataatatatttcgtcgcaattattaaatttttctgctcacatattaacatatatgtataaagtaatttaaaaattaaaaataattaataactaataaaaaaataattaaaatgctttaattttttttagctatgtattagtgtttaatagtttttaaattttaaaatgctttaaaaatattcatttttttaaaaatgcttttaaaatctatattaaatattatatgctaccatatagcaattaagcttcttcagataaaagaccatgcatgcttgttaatgttttaagcattcatctctacaaacaactatagcttcaaacattaatatttgctttagctaacaatttcctttataaatatatatatatataataataagaagaagaaaaaaacacatacaaacaaaataaaacaagctgcaaaacacaatcaacaaaccatctttttttagctcttccgctttccatgggaaatgtttcaatcttgtatatatgggcaccacaggtgagactgaaaacatagacatgcttattacacactatcagcaatggtctcttgtgtcaaaggtgtcacttctatgaagtcctaaatagagagaataatgtatgacaaaatcaaacctacttctccccaatcaggaactgtttcatcataatttcactcattcccttggcaaggggaaacatgtgtccagcacctcctagttcatggtacttaatccatggaagcttattaacaacatagcgttgcagtgctaccgggacaagcctatcttcatcaccctgccatagatggacagaaccttcattgttaggaaaagggttcttcaaatcagtcattggatcaaattcccaactcccaaatccaactcttaagtcccgatgtgcagactcgaaatctccttgctgtctgatttgcatctgtataaaggtagtaaaagagacaagaaaaagaaaatcatcttgatgacattaggaag

SEQ ID NO: 232511 - DNA, 773 bp, Cannabis indica
ggcacagattcagtgtgccgaacctcaaggagtgaagagaatcctggtagaagattttgggattgtggaaactatgtaagttttccttacacttatttttttttttaaaaaataaaatagattttcttgaaaagtttaagctatgggttatcatcaagattttgtttttcttaattttttattttaagatcgagattcttgtaaggtatgtcattttttcgagtgggtggatctagattttctagttggagctaatgtagtactgcagaggttggaaagaaaaattgaggaccaaagtaaaagatcaagttacttaagaaatttgtgttgaactaattaaattattgttgtattgaaactgtataactaatccatgatatcagtgtttgttttttattaaacttatgtaatcagtagtttgagttaatatgttgtaatgtataattaatatcatggatccctattataatattaatgtgttatgttgttggttacaaaaaatgtcataaattattattactattattattattattattactattattattattattatcttaggtcagtacgttttaataatacaatcactactgtgtggtcttatcaatagtactatatattctcattttagctaatataacctacaattttatgtactatataacttttttctttactttaaacgcaataagaacaaagtgacatgcatgcaaaaattgattagcctttgaatgacattaaaataataaataaaaaataaaaataaaaat

SEQ ID NO: 232512 - DNA, 839 bp, Cannabis indica
atacttgagaatgtgcttcacaataatctattgttccaaacttggataagattgataatgactaacaatccctacaatgtagcatatgtcaagccttgtgcataatatttcatacatcaagctcccaactgctaatgcattagggtaatttctcatgtcctctttctcttgaggagtttttggacattgatccttacatagagtaattccatgtgtagatggtaattgtcctttcttggatttccctattgagaatctttctagtactatatcgacataagttgcttgagaaagtgctaatattctcgtttgtctatctctatagattttaatcccgagagcataccttgcttctcccaagtccttcatttgcaatttatcgtctaagcacttcttaacatctaataacctttctacattgtttccaataattagaatgtcatgaacataaagaactaggaataccactacattactcttaatgtatttgtatacacaatcttcttcttcattttgttcaaagtcatactctttaatagtcttattaaaggtgatattccatgatctagaggcttgcttcaatctataaatggatttatgaaactttgacacctttcaatctttcccttgtaacacatacccttttggttgttccacataaatgatgtcatcaagatcgtaatttagaaaagcggtcttaacgtccatttgacatatctcataatcatatgcggcagctatggaaagaagattgttaatagatttaagcattgccgcaggagaaaaggttttctcatagtcgatacattctcgctgtgtgtagcctttggtcacatgcc

SEQ ID NO: 232513 - DNA, 845 bp, Cannabis indica
ttctcgctgtgtgtagcctttggtcacatgccaagctctaaagatatctaccatcccttcaacatttttcttctttttaaaaatatacttacacctaatggacgtaatatgctcaggtggagtttcatattcatagactttgttggtgcgcattaagtcaattctttaatccatgacatattccaattttttgagtcagggtcatccatttcttctttgtaagtcaatggatcgtccttatctgtgtcaaaaataagaacatgagcttcatgttcgtagcaaacaggctctctcacaatcctcccactacaatcatgtactgggatttccatttcaggaaccgtggtaactggtcgttcaactaatggtactaaaattaatggttcataaatcgcatttctaatttccttaataaccacttgactttgtggcttctgacttttcatatagtcatgttcaagaaaagtagcatttgttaacacaaacacttttttgtcttgatgacaatggaaataggtaccttgggtctcatttgaatatcctacaaatatacacacttcagtcttaggagaaagcttccaagacttaggtttgagaatacgagcaggacaaccccaaatatggaaatgtttcaatctcagttttgtctcattcaataattctagtggagtattgcttatgctcttcgagagtactacaatcaaaatctatgtagccgccaaaagtgcgtatccccaaaagtttagtcgcagtgatgagtaacacatcatcgatctaaccatgtataacaaggtctagttttttctctctacaacactattctatagaggtgttctaggtgatgt

SEQ ID NO: 232514 - DNA, 1485 bp, Cannabis indica
tcgtgaaacttttccctaaaccccaaaacttcaaacttcttggttttgacttatttttgaatactttcattgtttttaatttgtcgagtactcctggttggcatatttgcctgtttattattcgatatcccaaccaaacactcatcttgcgtgttgtcttttgtagatgaaccctggggagttttggggaagctaacaccgaattgaccaggatttgctcaaccttttgtacgaggatcatgcacgtcttcgtgccagtccgtcctcttcaagtgacaagctatccacttcaagttttctatccagccataggatgatggctcgaacaaagaaaacgatgcgcaaggtcaaagcgtccgaccctcacgtggcccaacacaccacattacccagccccgaacaagatctgcccatctaggaggagggggatcatgagggggatgctaaagtccaggagatagaggaactgaacgtcttccatcctggcagccctaccgaggtggaggaagaggaggaggctgggcctccaaatttttggggatacaatgaggttggggagccagtagatgtggacagggaagtctggttgaaggagtggactacgtcaccgaggagcttactgctacagttcctcaaaggaggcaaggtgccttaggtgccggtgggtgagccctccgtccaaagtcactgcggcacgcctaagtgacttggaccaatctggctatctgggcgaactggaacgttatgtccctacttcaaaccaccgagccacaaacccgaagaagggaatgtgttcctggttgggtgctcattccaaacaaggggcaatgctacctttgcacctgtactttaggaaggtggcagacttcttccgtctcgttctgacccagtttacccccaagggcatcaagtatctatcagcactgttcgtcctctacgccacccaaaaatggggtatgccttctacgcatgaggtgagaaagtttttttacctgaagtctacttcaaaccaaggcaggttggggtacttctacttctctcagccagacttcaagtggttgatgggcaccggggacaaggccgtgagcaaaattgaaaattttgttgacgaatattatatggtcgaaggcatgggcaccatctatactcggtttcagcagatccctatatattaccgtccaccttcacactagctcttagggacagagctcaaaggattgttcagcaggcggacgatgctcagaatatcaccttgttgacctcataggccaactttgtggagtatgggctttatccagcagatttcattcctcatctgtgaaggagaagaagaggaagtccagtgctttccgggctgagggagctcattaggataatgaactcattcaactaaagcgtgaggctaagttgaagggaagagccggggccgaacaacatgctcaagaatattctgagcaggagggccagagtgtagggtactcgatc

SEQ ID NO: 232515 - DNA, 963 bp, Cannabis indica
tggattatgggtagtgttgaccagtgatgttctcatccaaagtagtgtcacttaggggtgttcgcggtgcaggtggtgcggtttttgactattttttcaacaatacaatatttagtaaactttcggtcggacattcatatattggacctaaataaatataaaaattggtatttttataatgtgtggtgcgctgcagcttgaactgcatattaacaattcaaaattgcaccgcactccccggtttaggaaaaattcaaactgcgaccgcactacaaagaaatacaaactgcattttttttgcggtgcggtgtagtgcgggcggtttgagcggtttgatgaacacccctagtgtcacttatgtacgtggtttagaatcatgtattttgacggaaaggggaacccattaaaataattagggggttcctaaggtgaaagcttcagtatctgtcccagtgtcatttaggctgccttgtgtggttatgagtagtgttgatcactgatgttctcggtgaaagtagtgtcacttttatgtggttgagaattatgtatccagacgtaatatgggcacccactaacaaaatcaaggagtttttaagatgaatggaaggttcgaattaggtcccaaagtcattcgagaatgccttgtgggtttatgggtaatgttgaccacttatgttctcagttaaagtactatcacttttgtacatagttgagaatcatgtatcaaaacaaaagagtggaacccactaacataattagggggttcctaagatgaatggaaggtataatttcagtgttgaccattgatattctcagtcaaagtattgtcacttctgtacgtggtaaagaatcacatgtcttcaaacataatatgggcacaaactaacataattagggagtttctataatgaatgaacagttcagtttaaatctcagagtcatttaagaatgccttatgtggtt

SEQ ID NO: 232516 - DNA, 1446 bp, Cannabis indica
ttaaaaaatattttatggagaatgttaaaaatctcactttatcatatatgctcaactttgtaaaatagaagaaattcacacgatcaattcaagttattcaatacaacttacttgacgaaccacatgttagtatgcttttttatttttgccacaacaaattaatataatagttactgatataagtccacaaaaataattaaaatcttaactcttattttcgaataaaaaatctaactcttattgatataatacaaaaggtaacttaattaatcatttttattacttattttctaaataaatattcaattccataactcatttaaaatgattatataaattgaaaatatttaataatatttggtaagacctttccaattaatagagataattctatgaaagttagaacgtgcctcgcacgtgattactatctagtatatatatatatttatatatattaaattttgtcaaagacataataatcattatatactcttcttcaataatgcttttgccggcgatatattgattaccggacaaaatcagcactacgttaaagacctcaaattttttaaaacaaacactaacaaggcccaagggatcaatcaaagtcaactttttcttgattagtggcactagaacagaaaaaaaactagtagcttataaatataaaagttcaacaatatcaacatagtgatttactcaaatataaaattgtattttgatcatatatcagacgtttttttcacttcaattttaaagtccacaatcaaattagtgatttactatcatttttttccccacttatttttcaaaggcataagttacggaggaatataatatttctaatttaaattagagtcaaaatcaaataataaaaagtattggattaatgcccattaatgaatgtgaaagactgccgtattattcttatgatgaagcgcgtgcgtacaacttattagctagcgtatatagcttgtgagctgtgagagagggtgtgattattattaattaatgtataatataattaaaattaataataaattagctgattaattaagtaagttatatagttaataatatagcaaattaggcaagacggtgaggtgagtagagaaagaagagaagtagttgtaaaaatgagtatctagaaacaaaggtggatatatagtgagctgtggtggtgatctatagaaagacctattcaagcttttgcatatattggaccaaataatcatttgatttgattatttgacaaatggcatccttgtaatgccgctacctcttctcttaattaatctcctccaccattgacaataatcactagttccagtttaccaagattaatataacgatttggagttttattatggtaaaaccacataacagtttatttattaaatattatatcattaaataattctccaaaaaaagaaaaaaacaaaaact

SEQ ID NO: 232517 - DNA, 924 bp, Cannabis indica
tgctgagttttaaacacgtacaactttcactacaaaaaatagcaacttttagtgacaactttttaatcataatataaattttttgtgattaactgtgagttttagtcacaacaaaagttacttgtgactaaaatatagtatttagctacaacaagtattatgactaaaaatatatttagtcacaataaattataatttttatgactaatactttatagctacggattttttaatcacaacataagaatgatgatttaaaaaaatgtcactgaaaaaatagagaactagacaaaatgacatagtggaggttatttttctcgacttgctgagtttaggggcaaagacgaatcttcatacgaacatcagagctaaccaaaaatccattcaaaatttgaatttcaaaactttgacttgcgatcctagactaacgacgacggagaatgatgagctaccacttaggggttgaagttaccggcatccaacgaatgcaatggtcaggcgcatcgggtcaaatgttgtccagattgtacttgtcatagctccatcgatggtggttatggtgtggttcgtttcaagagatctagagagagagagatgggggatctgacgagggaaatagaaaagaagaaatgtatatatatatagtagacgtaggtcacattctctttgtataatactactttttttaaatgaacagtttcatgaacacttctacccgaaagtccataaacaataaaagaaaataattgggctcagcttaacttgagtgtatacgattcaaattcaagttttaattaacaatctcaaacttcgatgtcacccaaattatttttctacatctgaaatttaatatatattgtgcactcacacacactcactctaaaaagaaaaattgtgaaccctaaaattcttctctctctctct

SEQ ID NO: 232518 - DNA, 1812 bp, Cannabis indica
aaaagattcaataaataatctaaacaaactacgattatgtgtgaagaagttaatattttaagaagttaatcattattataattgagtcacatgtattattccattttttttatcattaattaattcttattttcttaatgcattattaaatatttttcttttaattaaaactaaaaaatagatattattattaattgtaaaataacttttatataaaaactgaagaaaaaaactctatacatattcattacggacttttgtctaattttagtaaaaaattataatatggataaaagttcaagtggcatgttttagtacatatcaaagtttgaggggcatgatttggtagatatcaaagtctggggagcatggtttagtacataaacaatcactaaaatagtaaaattgaatgaaattagacaaaagtccttaaatttaacaatctcaatagttcgggaggaatttttaacggccaaaaaagttcaaagggcacgatttactacatgtcaaagttcacggagaaaaattactaattaaccttacgattatcatcaccatcatcatatatgtatagatatttgtaaggatcacaatcatcatatctagtataatgactttttaacatttttattgattattatgaataatgaagtcaacaacacctcttaaattagccatgaataaagtatgtaagataaaatgaataaatttaaaactatttcatagttttaaatgacactaactaaaataaagaaataaaaaaactctaacattctttgaaatatatttgtttttgctaatatatataaaagtagtctcctatatatatataaatatatatatatatatatattcaagtcttgtatatacattagatcataaaaatactataatttttgtaatggttagaatggtaagaactaagattgattttgtaatatcaacatcaccatctacacgcaagagttcaacttttcatcttcagttcatctttacattcgttttgagaaatataatacataatagattgataatgtaataaatttcttagtacaataattataatattattataaaaatatgatttttgaagaaaaaataacaatttaataatattaagagagagagagagaaaaaacatacttattgtggattgaatatggctaaatacacttattataaaaaagaagaggaaccatcaaactccattttaagtaaaaaaataatgaatcttttatttagatacatatatacaaaagtagagtaaaataccatgctatatatatgtaaaaatttaagttgtaacttaatttttatcaatgttagaagttacaaaattataatttaatgttcattacaaactttataattaatattatgagagttataaaatgaaaagagacgctcttttctctttcaattaaatagttagggttttgttttcaatgttatagtattagtaaattaaaaaaaataatgagagagcaagaaaattagaagaaaattcatatagaatgggatgtcattgtgcttagcaagattattatataaaacacacacactctctctctctctctcttacaaaaataattaagaagcactctttttatgttttttatcttctacatgattaataaaagtagtatatttattttggatgtgttgtactttattcagagttaatttatcaataatttacatattttaacaagattgatgcctttttatttttctgttgatatatagttgtctctttgttattttataattattttacaattatttttatgttgtgtttaggtgttctgtagt

SEQ ID NO: 232519 - DNA, 1028 bp, Cannabis indica
ccgtgagctaacgcccagtaagaagagctatgtaggacataactccctaactagataacatagtcataaacataataatatcacaacatcaaatcaactcataccatgtttgtatagctatatcacatataacgttacacattattcccacatacgatataacatcatatcacattataaacttaatgcattctatactcacacacatacacacacataatacacggtatcttatcgtacattgtcctcacatacgataatctactcccattaatgttgatcagacatgaagtgtaacctgccctaccttgtgttgttctcacacttgtcatccaataagacaatcccttatcacaagttgtactcacccatgataggataacctgcaagtaaacccatacaagcagccaaaaatgtatcctgccagtgctatgctcacataagaagcagaaaacatatcctatgagtgctattctcacaccaacaatcaaaaaccttatcactatcgcatactaacaatactaacacaaacaataattcttagtacaaaatttcataagcacgtgagcatcaaagccacaataaagtcatatgtttcaacatacaccctgtgcacaaatgtccactcttcttacctcagttgttgagaacacctttttgctacttcaagcacctcaatgaatttccttgttgagaacaagatcctaaacattcattatcacaacaagacactcaaaatgcattcaagtatgaaactttgtactcatacagaaaccagggtcggccctaaaatatatgggcctaagatgaattaaatttccgggccctaaaaaatatataaaaaaatatcaaaagaagagttttgtgggatttgaactaatgaccttaaatattatgccatccacctcaacaaactaggctatgaatatttgttgcttataatgcacataaattttacttataaaaaagcctaatattttttttttattttgggaccccagaaagtgtgggccctaggcatgggccta

SEQ ID NO: 232520 - DNA, 861 bp, Cannabis indica
cctatactaaaattacattccaaaaacccaaaaatattttacccaaccgttacttttttcacatttaacaacatatcccaatgataatttttccctttacaagcaaaattaaattacaaataaattattttcaaaagaaataatctaaatatttacaaagaaaaaattataataatccttggaagctttgaggtttccatcttcatagtgggtaggctctccacacttcctcttgcaaacttcttacttgaaatttgaaatttgatgaaatttttagcacttctttttggtagttttctccatggccggaaatggcattgaatccttgggatttttgagtttttgataaaatgtgagtgtttgacgattggattttgtagcataggctatggtaatgtgtttttggctctggtctaatgtaatttggtgagaaaatgaataactttgaaacttttgggtgattgtgttcttgaatattgaagaacattatgaacatgcaaaatttcaaattccctccattttcccaactttattttcatgaaattggtaaaaagtatttgtgggggtgtgataaacttggatgatttgtaggcttgaacacactttgttgaccatcaaccgccacaccctatgaagggtcgggggtgtaccccgagcttggacccttgggggtcggggtggtacccctagcttggacccttgagggtcggggggggggggatacccctagcttggacccttgagggttggggggtacccctagcttggacgcttaagggtgggggtacccctagctaagggtcggagggtacccctagcgtggacccttgagagtcgtggggtacccctagcttggaccct

SEQ ID NO: 232521 - DNA, 765 bp, Cannabis indica
tagttaatccattactggaataatgccaaaaactgtacagaattttccataggctgaataattatcttctggccttcctggtcattttaaaattcatttcaatggtaaagtagagacttcagataggtttttacacttctctgaaataactgctccacccctaaagtaatcaccgtctcataattagactttttagcaacgcaagtctagaaacctgatttgttgtagtctaagagtattaaaatactactcttatcggctaacatgtagtttctcttttaatcttaagagttatttgattatcttccaatgtttctttcctggattaaactgctaattcttaagaaattaattaattcactggcctttatcttttctggaatagttgaaattgttccttagataaataaaatctatatgtaggagacaaaagactttctttagaattatccattagaaaaatagcttcagcatcttactaaagtaagttgcttgcactttagtaaataaattacaacgtataccacaagccacaggtttagataatctcaaacctactatactaggatcgggaagttttgttaagtcttttgaatagacttataatcaaaattttccttcttgtccttgtaatagaaaacttttagctacaccatatgaatggctttaaccatagttctctgggctttgcatcttagttccttattttgactatctattacttgtctaaactaataatgaattttattacaagtatcttccaag

SEQ ID NO: 232522 - DNA, 679 bp, Cannabis indica
ttttttggagtaatttgaggtgcagatagtcagcattaatgagccaaatattgaagagacccttggtcagaatcacgtcggatcaccaacagtcacttcaaacacgtgccacccattcaaataagaattcaaaccaagtgaagtccacgtgcaacttcggaagtcctgcgcattggcaggcaaatgttatcctattttttgtactatgacgtggcagcatgtacgagtgacagtgtttatcattccttgtacttgggtagaaatatattccaaacagacttcaagcaacgtatctacacgcacaaagtcttcttatccgagtagagtaaagggcagattatttgagcaaagtatgaggttagttctccgagatgtgtactaaaacttggctacttcagaattgatatcgtgaaaccaaagtactaaggcaatccctacaataatgggattgaattagaaggatacggtaggctatctcaatcacccatttcatgtattctaattatgtaataaatattctttcgatattgtaagcagaagggaaacattccctcacgcattaagtccctttaaatagtgatgtactataaaaggaatcaagagatttgctttagagagagacctaagagaaacacttagagatttctttgtgagagctttgagagaagaaatactttat

SEQ ID NO: 232523 - DNA, 796 bp, Cannabis indica
agtcatataaacaatctcttgaaggttgccatcaaggaagtcaatggatacatcaatgttagttttgccgtactaaatcagcttcacaacagaataataattatttgattatcattgtaccatagtcccaaagatttccacatatatatatatatacattaaatttgaagaataaattacatcaaagaaataaatacctcttgatgactatcagggtatcctcaaaacttctcgtaatttaaatccaataaatctcacaccatagtcttcagaaacgatccaccacacacaaggagtgtgggttactaggataaagtgtataatttgtacttgttgaattttcaacacatgagcaagaattatttttgagagaaaaataattttccttctctctaagtgtatttcaaaatttgtgtagaaaaaaagtgtcttgatttctcaaatcacacctctatttatagtagtcaatattcaattaattaaatcaagtttaattattcaaataaatatccataaccgaataggttattaatatttttgataagagaatatctcaaccaacttggagagaatatctcaaccaaagtatgaaccgcctaatctgttaattgggcgggttgaaaatgtgtacaacccgcccaatgaacccaatttaacccgacttgtatcattttttttattttgtactttttaatttttaacttttattatgacataataataataataataatatatgatacaattattaagaaaaccaatgacttgacctctcatacacactctctctaatgtt

SEQ ID NO: 232524 - DNA, 1858 bp, Cannabis indica
agtattattcagatgagaagatagcttccctatctcaaagaagaacaaaacaacattggagatttcctcagaaatattaatcaataacactttgaaactttttcaaccaaacccatcgagatctgagcttttcaatttatgaatattaaataaggccttctaacaccaaagctagtaaaagccttaatcaactaaacctatagatctgtactgagctggtcaaacaatccttcttgatactcagagaggccaaacttggactgcccataaagcctttgaagtggttcaaataatggtaaactacctcatcgtaatcatccaccaaggcaccatatgtcatcaacaagagaggaaattcgatttgcttctttcctttctttaatgctagtattaaagaatgttgaatttccatatccaaacttcaaccaaatgatcttgctttttttcctcaaataattaagtttcaatcatcttagcacacgaactgaaggttgcctttatctctttctcttccttaactaaatccataaaaagagtgtcatattgtaaatgttgttggatccattcaaaacgagatttagcataactataagctagttgaatatcccactatcttccatttaaaatcttgaagcactttcctcacccagttaagcataatcttagtttggaaaagacttgtaccatgagcagcttgattcaaattctctaacacttttttgcttaaagtcactttttgaaaaatttaaaagtcgaaaatcccaagttttttaatttttagacttctaataatacgaagacagtggtcagacattggatcaactcattagttaagacaagagacaaccaattacacggatcatcaagttcgagggaagcaataggaaaatcacctactctattcaccacatccaaaacaacattaaagtctcccataagaagctaaggtttaacatggaatggaagaaaagcaagaccctaccataagtcattttgctctataatagagttcaacccataaaccaaagtgagataaaaatcatcttggaacctagaatgtgtaaccaagcaatgcagatactgttcattcccaacaaaagtagttatatttacaaaattatgcaactagaaggaaagtaccttctacaattaatagaactagaatgaaaattcccaccacaaaagttggtcttcatcatatcatccactttgtctcctcgaatcttagtatctagtaaagttcctattcccactttattcaacttacaaagagtattaacttgaaggtcctcaaaaatttcttcgagttgcaagctttggatttcttttgcacacacacaaatcgagattaagaaaccaaatcatagctaatagaaatttaaacattaaaaaaagaatgttaaggttacctttgtgctgccacgatagagcgaggagagggacggagcggaggagacggatggcgtggatcgtggtcgcgaaggagagagaaccaagaaatgaaaaaaaatttacaaataacttcaaaaaaatgagatttgatttttttttggtggatttatatattaagagatggaaatgaaatttcagatctaaattgcggtaaatttaagcatgagaattgcctacgatttaaaactgtgggcaattcccatttaaaaatacacgagatttttttggacacgtttaaaatctgttgcttatacctctcgactgtttaaaaccgtcggaaataccctacttttctcgacgcttttaaacactcgcttatttttttttagcaacagttcttaaaaaattatttatatttttttttacattagtgagagaaaccacctattattattttttaaaatac

SEQ ID NO: 232525 - DNA, 1090 bp, Cannabis indica
tttcttttactatacatatattttttaatattttttttttggattctttactaaatttaaaaggttaaatggaccttgtagtatatagtgatagtgtgttaaatttgtttaaaaaagaagagtaagcattatatttagtactattttttagttgtgttccaatacataataacctgaaaccgcttaccatattatggctggctgttcttttaccaaagcttgtgtggagcgtagtttgggtctgaatcttaatactggggatgaggattttggtggctggtttgaagatttctgtaactctcatttaactgagaatattgagaagttggcaatgattctttggagtgtttggcgggcccgcaatgatttactttggaatgataaggctacttctgtggaaagagttgtttcatctgcaattacttaccttgaactttggaaatttgctcaaaataacaatggaggagcttcgtcttcttctggtcagcctcgtgctggtgttgagcactggattaaaccgtctttgggagagttgaaggttaattgtgatgctgctcttttttctggagaaaggagtcatggattgggttggattgccagagatcatgctgggttgtgctttgtcgctgctgctgtcaaactccgaggtgaagttgaccctgttgttgctgaggcgctgtccatgaaggaggctttgagttggattaaatcctgctggggagaaggcagggttgttgaggacttttgtcctacatcagttattttggagtcggattgtcttgtgttggttaatgctatcaatagcaaaagccacattctttctcctcttggtcttattatttcggattgtattaatcttatacgatccttatttagttttcatgtttcagttcagtttgttaaacgatctgggaaccaagcgattaactggttagctcgttcttctgattcatgtccagatcgtatttccagtaaggggtctgtcccttctggtttggaagctattttgttagctgatttgcttcaataaaagttgcaatctttgattcaaaaaaaaagatgcaaattaaaaaaaaatcattaataataa

SEQ ID NO: 232526 - DNA, 4137 bp, Cannabis indica
attactagagttggaattaagtggcgtttgcttgaaatatgaaaatataggaataagaattattaaattttttctatcatattttggaatggtttttccttccatttcaaaataaaattgtcattctaccacaatagtggaaaagttattccattggaatgattttcaacactttaatatgtaaataaaacaaaggaattagaatgaaaattgttttctttcttttccattccatttcattaccttcaatcaaacaccacctaaaaaaacctataccacatatatatcgatttgtttctttattttctcttagaggagagtattttttttttactaaaaatttagaagagagtatgaagtatgctaatatatatatatatatatgttacatgtaacatatgttataatatttaattatgtatataacaaattttatatttaagattatgactaaaagaactatgctggtgaaagaaagaatgattaattaataaatagtttttgttgtaacacaaccgtattatattattatatttatatttgctttttctcaaggaagaataagtttgaacaaaattgaagcattttcttctagtaaagtagtgtgaagtgtgaacatcactaaaattaacttcttttttcttttgtttgatcatgaattatatttattattcttcatggaatctttaattaaaacaaagaaatatagaatctctttgtttatatatgggtcctcaaataactttggagattgtaacatacatacttgtatatattgtagccagtcattgtttttagcccacaatagtatagcctcccacaatggactttcttcttccccaaattcatacttgtgctaagaagtttctgccatttgaataaagaacccttcaaactctcctatttatataatagagtagagacgattaataagaccatatttacatatagaacaaaaacaaagaccagaataaagtcaaaccattttaagccctctctctttattgttgttattttaatttatatcaagtgtggtccatctatatagacactattttccaacttttggaaatgtcaatcggagacctatatatgtgtgtatatatattatataaataatttctctaataattttgtttaaaattgcaacaataacaaggggcatgtgtaattagttataatattatttttttcatttagcttaatatgtaagcattatttaattatcttacactaggactataaattataattttatggcttctattagtgtcacttcaatagctagtattaggtcaatgactttattttttaaatgtcactatggtttaatatggtcaatggtttgaaaatgtccaataattactaatatctatgtatagtagtacgtactgatcaatttactgaagtaataaggtagcccaaggctcaatgcatattcgttacataaaaaagattgttgttgttgatatctaaatcttattcattaagcataattcgaggtgcatcatcagtatctttcatgagtttgaatgaaatagattcttcttaaaattctgtgtttcacacagtgtttttaatcttttccctaataatattaatatattttgtgttatttatggtccttacttttgtttttatattgacttatatactttcttaagaattgttaattaaaattatttaaatatataagaaatagactctcatgcagtttttgcaaaggcaagtaattttgtttttaaatatattgaagtaatttattattattattattattattattattattattattattattattccaactcatcataatgtgaagtaaaaatggaatatgaaaacaaatgtaattatttagtggtagtttcgtgaaagaaagaaattaagacacagctagctagagaaattgattttctttggaattggtaggacaaaaaattaattatctctctttattttattttgttttttttttttttgatttgaaatagccaagaattgaaatgaaattattagagactattatactcattattatttgttcccacgccaattgccaagccaatattatttcactagaaagaaacattcataaactgggcctcttcacccccagttgggtatattgctctccagttgttgtttttgtcttcttttttggcttcaaattgaaaacatttaatgccttagaccatttttaaatgtctatttaattatttaaattaacttatatgactcgtgagatgaagaataatatctctccctctatacccttttaattttcccagcaaattgaccccattctttttttttttcctctggtggagcccaatgtatagatgcttctcaatttcttggtcaaaagatttagctttgtagtgacaaagtagaagtacaatatataattaatatatttttgcttaacatatttatatatatataatatatttgttccatcttttcttacctttgatttgtgtcagtttcgagtattttgactcaaatagatttcttatagaacttagaggagtgaagaggaaactaatttaagtaacacccacttcatttcatatatcaattaaagaccatctagacaataattacacttttaatttatacttattattgtaaatggacaatgaattcaggctttcttctactaattaattatttttttttaaattaaaaaaaataaaataaaaaaaataaatatatatacaaacaattcaagaaactgccccctttgctaaaattttaccttaattacaacgtatttcattcgctattacatatttttagttttgttatccaaatttagttttgtgatgttccaaaacacaactttttgagaagccaaaattaattaagtctcatatattagataaatggaggtcatataaacatgccacaattattaataaatatatatagatatatttttgtgtatatatatacaactccatttaaacaattaataactagttatgtttgagttcatagggtcactcctattaattagcttgagtgcatatggttgatatccaacttgcaagttgcaaaaacaatgaaacgttattattaattaactaaatatctaataaaaaaattaagtaggaactaattaagtttttaatattatatatttttttttcccacatcataatcatttggcgaaaatataaaaaagttgaccatagttccctttcgtgcccattaaacttgatcatatcttgatattaataaacaattataattaattactacaacttaggctgttaggcatccatttcataggacagattatctcttaaagtcaagcaacactatccatatgagttaatatatattggggtttggaagataaaatatcacatacacatacacaagatccagctatataggatattttatagagatatatttccaaagatatatatcaaacaaaatagtaatgatgtaatatagcactaaagtctcataaaatggttaaagataaaagattgcatccattatccgagtcataaagggttttagccaaataattaatattgttgaaatgatataccaatagttgattagttatttctatcttgttttttttaagaatgaaataatctaagtacttattgattagtgagtcatggcattttcgagaaatttttagtggagtagatatggagtatctcacgtatttatttgtagagatagagagagagtattagtggtgttgaatattatttagaaatgttatattattagagcattgctatatggtatccgtgtggtgcctagtacttttttgagatgtcgtgttgcgattgactagtgatactttctaaaagctattatattaaattatatgatattatattaaattatatgagatccgatacttagttggaccaataacaatattaacacatagaaggatactaagcatcacgggtgatttttagcatttctcataaatataatttaatatttagggtcatatatttttagtacaataatgatactattaatttatgtgaaaactgtgtaatttcatataataattaatcttttttatttttttcccgcaaagtgaatatagtaatgttacttctggtttcgcccaatatacgtggacca

SEQ ID NO: 232527 - DNA, 1362 bp, Cannabis indica
tttgacagtgttaggacactttaatttaggtaccattgtgagaattgttgagtttatctctttgagaatcttaccagaagagagaaatgaggaaactgccctgtacacatcctctccaaccaggtcccaattatcttggaagaaaaaaattgaaaagccatctagacctgaggctttattctcggagatctcaaaaacaactttcttgacatcctccttagtgattggactagtaagcaattgagcttgttcaggagtaacctttgagcctctgttcagaatcttgttagaaactgccttcctgcttgccatttttgatcccaggagagacttgtagtatgacaaaaatgcctctgtaacctattctggttcaaagaatctcaccccagattcattcttaattgagaatacttggttttacctatgtctttgcttgatacttgcgtgaaataatgcagtgttgctgtcaccatctttaagccagttaatcttggctttctgctgtagaaaagaagaataatgctgttgagctgagagaaatgaatttctagtaacaagttcttgttgctgcaactcttcattaagtggatccgcatgtagattgttctgagcttcatcaagagactgtttagcttgagtcaaaactgctagcaaatcagaaaaacctttctgattaatctctcgaaatacattcttcaaaatcttcaacttttgcacaatttgatacatactggtaccatttatttcctgtttccaaactgcattaactctgccatcatactcagggtgtgatttccacatcctaaagtatttgaatggctttttcccgcacttccatttgggaaataaagacaaaatcccaggtgaatgatcatagattccttcctttaagaatagagcttcagcattcggataagcatctagccatctttgattagccatgactctatcaatctttgaaaaaatacggtcctgaccttgttgcttatttgtccaagtaaaaaaacatccagtagctttgatgtcttctaactggcagctttgtatgcaatctataaattcaacttcctcatagtatttaactctgtgtcccactctctcttctttagttgtgatagcattgaaatctcccattagaatccacctttcatctgttttaagctgcattagatccttccacagctctattctatccttcctgtcattgaacccataaacaacagttaataaactgttatatgtaccatccattgttgagattctcaagtgcataaattgacttgtgcacttgataatatcaacagtgaaacggttcgggttccaagctataactattctccccccttggtgccaagctatgtt

SEQ ID NO: 232528 - DNA, 582 bp, Cannabis indica
taccaagttcattactctgaaggccaacgagcactacaatgtagctacatgctatatgaaagtcaggggtacccttgtagatatttatgggatagaatgaaaagattaaacattagaagaattcctaatactcttttcatgaagcaatggagcaaaattgcagagataaatctccacctacattttaaccagccagtaccacaacaacaacacatttatgagatgcttaggtttggctccctcacctcactaacttataacttcaaaattaaagaattcgtacaaccatgcaaaggaagagattgaacgactaacactaatgtttaaggaagaatttaagttgaactccgatccggaaggagagacgccacaacgtggaagatatcataagaaccctaacattattaaagacccaaaagttgtgagaaccaaaggtacaagaaatacaagggaaggaccaaatggggagcaatacccaagaaactcaagacattgttgcatttgtcgctcatcaacccatgattatcgtcagtgcccaaaccgtcaacagagtaatggatctcaggggccacaatctaccaa

SEQ ID NO: 232529 - DNA, 897 bp, Cannabis indica
attgtgccctccaaacatttgtccacaccaggcccccgttaataaaattgaacagaaatctttgaattcaagcatttcaataatttgaagagaatttttaatgtcctaaaatgtttaggagacacaatttaatagaggaataaatccttattattattattaaataaaggcttaattatgcatcatccttaaaaaaaaaatcaaatacattctttttactctttttcacacgatctttcttcaatacatgacccattaatataatattatttctaccgaagaaaaaaatatataatcattttataaaataaatatataattcaatctaggcacaatgcatgtactttgggctgacaacatatcgtgcacatagattaggaatttaggaacgacacagaggaagttgtgcctattttttttaattaaaatgtggctttggcatgacatggccattttaggcacgtaaaatattgtgcctaggtttatttttgccgaaaatgcaccattggagttaggtgggaatttttccgaacagaatttcagcacaacaaaaagtcgatctcatcgttctaccatgtcgtgccatttgaggcattaggcacgcagaaagatggggccgacaaaatttcgtgcccactctgaaaggtgatcccgaaggctcctttttcctcattcatgcagccttattcttttttcagcagtcattttcactattacaaaatattttttttgtcggttaaaggctattacccactaatactagagatgtacctacaaaaagggattccgcaatacatttgctctctctcttgcatttactcttaatcttgtgtttgtattgattactttggagaaatttagtgtcaaatttcttacataatagacaacatagacaat

SEQ ID NO: 232530 - DNA, 668 bp, Cannabis indica
aagctggaagctgcttcgagaacctctctccggacagcatgccagtttgctttgtaaaattgggaattgaagccgtccgggcctggggctttgtccagaggaagctggaaaaacgctttttcaatttcatccaaggagaaagcctcgcttaagagggacttatcagcatcagagagagagctgcaaattccctccaaggctagattcatgtccgagtcagcggggtttgatgaggtgaagagatggtcgaaatgggactcgatctctcgaataatgctttcctcatcggagatcatacctccattttgcgtgtggagttggtgaattttgttggttttcttcctttgggaagcaaaacggtggaagaacttcgtgttcttgtccccttgagctaaccattgggtgcgagcgcgttgtttccagtaagcttcttccttgtagagtaaagcatcaagccgggattggagatctttaacagtagcgatagtacggtcgtcccaaataagagaagaccgggccaaatttaactccttctccagcttactgatttgctttttgaactgaaaattttttttgtggttccaattgttgagcttttgagcacacgaggattgagtagcaacaagcttggggatagcttcctcagaggtcgagagatttgtccaaga

SEQ ID NO: 232531 - DNA, 2187 bp, Cannabis indica
tacggataaaactgaggaggtggtgccaagtagttcgggtcatcaatcccgatattcattctgttgatgagagagttgagttggtgaacttgtccctcatcatgaatactccgctgcaccatatagttctacatgtggttgttctactgaattatataattcagctgtgcatgagtatattgcatcatgggcccaagcagttgtcggggctcttcctcctcttcttcaacactaggctctcgtttccgccttcggccttgcagtgcatcagatgggggctgtccataaggatgtggctcttttagcctgttgacaaatgtgatgtccatctttcgtagcggcaccacagtgttgtcatactctagttgtggcacatcgtacgccctgcggagttcagtgatcacaccagccaaaccaagaccaccacccgtggctccttgaacaattcgctcgatcctgcttcggatgacttgtccaatgttaatgttgtactccttcatgatggcgtacacatatttgaggtgatccatttggacatctaaaaaatgtttactcggcaccaaccgagaactcacgaagtacagccacgtcttcgcgaccgggtttatttcacatctatgcaggatattgggcgacccgtcttgcccatcattgtcgtggaatctcaaccgcggaaatcccacagtttccgctacatccaccaaatcaaactgctcttcctcctcaataattcagagccgttgttcctcccttgagtaatccgggacagagaacataacattaaatgcatcggtagtgtgcggaactttcttaccccgcacgtttacctccccattcctgcactagggccaattggcgagaaattcacatgccatagttacgttggcccggccctgagcatccacaaaactaccccatttcatcctcccaatttgggctcgaattgcttcgaacctaggttgatgcctcaaggggttcttagggaattcaatacccctatcatcaatgtaaggcctaaccttaagcctcatgaagcagttttgtgccgcctcacttgcaaaccgggttcggtcgaaacccgtagatggtgggtttgatgatgaaccaccttcctctatgtgcctagttcttttgggccccataatcttagaaatttttttttcacttaattttcactttttttttctgttttcttttttcctttttttttttcaaataattctaagaaaaattgggcagcacctccccttaaattgctacttcccaaaaattaaaaactacaccagaacaatccagacaaattgatgcacagtccaaaatcacaatataaacccaaaaatccctctatcaaccaataatttcagaataatcactattttcacaaaaatactcaaaattctcatgcaatttctcaaatgtaatagagaaatatacttacaaacccgaagacgccactactccacctccattgttgaatatccttgaaagcttgaggttgaagatgaagaacaatggtatttttagatttggggtgaaattgatgattatttgtgtaatttttgatggaaagtgaagattgatgagtaaaattgggttttgggatgaattgggatcgagaaattggtagataaatgggaagaattgaagatttggtgaagaaaatttgaattttcgaagggggaaggtgtgggacggctgagaagatttgaaattgggttatggttgaattgggggaaaaattcggtttgtatagaaatctgggtggtggtcgcgaccagcccatgggctggtcgcgaccagcataaattcaaaaatatagggttctctagaaacttaggtggtcgcgaccaagaaaaagggtcgcgactagcccacttccttgtcgcgaccactagaacatggaattttctcttgtttctgtaaagtcccaggtcgcaaccagggtcgcgactaccaaaaagggtcgcgacccaggaacacagtggtcccagtcccaaaaaaattatttatttttttttattatttttttcacgttgttcacggttcaactgaaaaaatataatgtctggtacttcaccaaaaattgaaaatactgaaaacactaaaaacataaactaaaaacataacaaaaaaggctggaaaattaaagaaaacacttgggttgcctcccaagagcactgtctttat

SEQ ID NO: 232532 - DNA, 1209 bp, Cannabis indica
aaaaacataaaattttacatatgatatgaataatacaccctaaattgaaataatttccataaaatcataaataataattaataatctagttttataattaagcattaaatatcaaattaaagatatatagttacaagagtatatatacacaaatatgacttaaatgagatcaacctaatattctattcttgcaatatatgaggagaatatctagcctatttaagtgagaaaaatatttactttgaataaatatctggtaataacagtagttgactaatcttgctattgtggctgtatttaattggttgaaggcatgactttaggcatgcgtttgaatacaatgattatctctaacataaatatttgcattggctagttgcttatgaagtttggccactttctcaaatgcttaaccagcaccaaattatagtgtcagggtccttggacatggttatatatatattttttgctttcctcacttgaacctccttatattttacgattacgttgtaattagttgtttaaggaataatctatctatatatatagcaatattctatgtcgtccctccacaggtaattatatatttacatctacaaccatcaaaatttagcccctaagtttttattctttgttatttgaatgaataggaaaaataaatcttatgaaaggagaagcatatgtacatatataaacgtgtagcaaaatattgacatttgtaatgtcagtgaaacaaatatcagatatcaatcacacggtatataaaataaatttagtgcagacgttgacctatcaataagcatcacatgcaatatatttggtgctcttgttaggtaatgtgtaatcaggaccatcttgcttatcgatttcagttcatacgttcaatagtgttagaatttaagataaggtaaatgagttttatgtaaaaattaattggcaatagaatgagtagtctattacaatttatttccacacattagcaatgtgggactaactctaatacacctttactcagggccgaatgtgacatttaaaagaatcctacaagactaaagatcgggaaatttgtgggtgtacacgtcggaaaattcgtagattttgaaacaggtcaaagatccaacactagaaaaaggtacacatttggcgaaaggtcccaaattgagattaaaggggagacaacggaagtatctttttggaccggcaacactt

SEQ ID NO: 232533 - DNA, 636 bp, Cannabis indica
aaaaataatgatgcaaggcatgaaggcatgtaaatacatagatgaaaaattatgattaaactactgttaggaaagatttaaacctgaaaagaaaactattaattgatcctcgtgtgttgaaaataaaactatcaattagcattcttgaaaagaaaactatgaacatcaaataactcattcaattgatctaggtcaggtgtgttgaggatcatccatttcttcttttccacgagatatttatgaaaaaaaataaggtctaaaccttgtaatctgtgggacaatagaccgaagcagcagtagaagccaaatttaaatcaaattcagtttctaaaatataataataataaaaaagaattgttgtatacttacatatatgttaaatagaagaagctcctcatttcattcaaatgccgaaatacttacggttgaaatctgattgtttgtattgaaggattgcagaatgaatttgaaattaaggacctctaataaagtacatgagggacctcaaaaatcatctgatgtagcctatgaaataaatttacaatcataaatacttgcttaaatgcctggattactgcttaaattctaaagtagatgtgttctagcctccaccttatgcaaaataattattttgaa

SEQ ID NO: 232534 - DNA, 1820 bp, Cannabis indica
acatttgtctgaccatacgaatctttgatttttctttgttaactcagttagtggcatagagatcttagagaatcccttaacgaaacgttgagaataccctgataaaatgagaaaacttcaaacttctatcatagattttggcctcggccaattcttcactgattcaatcttactcagatcgaccataattccatcttttccgagaatatgtcacagaaaagatacctctgacaatcagaattcacactatttgaactttccatacaacttgtgatccctaagtcgttgtaataccattcgaagatgatactcatgctcctcttctgactgggggtacacaaggatgtcatcgataaacactatgacgtagttgtcgaggaaatccttcaatactctattcatgaaatccataaaggtcgcaggagcatttttcaatccgaatgacattactagaaactcatagtgtccatatctggttcaaaacatagtctttggtatatcttcttcccaaattatgagctggtgaaaaccgaatcgtagatcaaactttgaaaatacagtcttcccctgaagttgatcgaataaatcatcaattctaggcaacggatacttgttcttaattgtcagcttgtttagttctcgatatcaatacacattctaaggaaaccatatttctttttcacgaacagaactggagctccctaggacgatacactgggtcgggtaaacccaatatccagcatcccctaaagttgtgactttagctcctcagttctgctagagcaattctgtatggagctttagaaacaggttcggctccaggtgccaaattaatcacgaagtctatttcttgttgtggcagtaatcccagcaactcctcaagaaaaatgtcaagaaaatctttaacaactttgactacctcaggcccaaatatttcgggtcttctggagtcaatcacaactgctaaaaatcctacacgtccactgtgtagtagatccctatcccttaatactgaaataatcaggatccgagacccctaaaccggcccaacataaacaaatggaccttcaccttcaggctgaaaaagtcaccattttctgcttgcaatttatgctggccgaatagttggacagaaaattcatcccaagtataatgtcaaactctgttaattccagctctataaggtcagcactcaactccctatctttcagtctaactggcatagatctaatgcgcatattggagataaccaactccccgctaggcattagggttccaaaccctctttcaataaaatcatatgtcctacccaaaacatcgattacccgtcgagccacatatgagtgtgtagctcccgaatcaaataacatagtataaaaggagttgttgacaggaagctgacctatcagaaggactggctgcaacatcagcttgagtgatggaaaacaactgagcaggtataggctttgcctctggcttctcctcttctttctttgcctgaaggaaatctttcttgaaatgccccaccatgccacactaaaagcatgtcttcttgttgcactctctgggatgatgtttcttacaatgtaggcactcatggtaagagtaacctggtgtccacctctacctacgttcccacagaaccacttgctctgccttgagccaccagatgtcggggtaacttttctcttctggttagtggtggaatcaccaccatccctaccataagaagcagtagtaagagtggaggtcccaccaacacttgaagtcacacggggctcttgaagaaacttaactgcaccctcagctcgcagagcttt

SEQ ID NO: 232535 - DNA, 1246 bp, Cannabis indica
cttgaagaatcattatattgtgcggtacggatcgacctttaatgaaagccccttgattttggtccactaaccatggcaacactttagctaatcttttgcacaagagcttagatatacccttatatatggtagtacagcaggctattgggcgatagtctattgcacgagaaggacaatcggttttaggcacaagggagatggtggtttcatggagatcagcaggggacttaccattctcaaaaaattgtatcacagcagtgcaaatatctcccccaattttaggccaaagctctctataaaagcctaaaccatagccgtcaggacccggggattcggtaaccgggatgctaaagaaagctttctttatttcttttctggtaaaaggcttcagaagcccaacttgctgatgaagggaaagtttcctcccactgtccatacactccctgttaaacaaagaatgggcactactcgaactccccataaaccctttaaaatgctctaaaaaatgattcaccacctcaggaaaatggtccacctattttccttcattgttaataaaggaaacaattctgttattcatccttctcttcttaagaaacgcatgaaagtaagcattattatcatcacctttccttagccaagtaattttactacgttgtttaaggaagctatgatacattttaccttgagattcatacgcttctactgcccttttttcagcttcctgcagtaacaaattcccaggattggcctgagactcatgaagagctgaacaatacgtctccttagccaaggaataagacttcccaatgtcaccaactgtctctctattaaatctaatcagcttgtgtttcaacctcttcattttgagaaaaattctctgtagacccgtgctagaacaaggctgcttccaactatccattactacatttttaaattcactgtgctcagaccaaaaattgtagaaaccaaaaggtttatagccaataatctcaggtttcccattagagacaacacaagaacaatggtctgacagagtatcccatttgaacatggccgccgaattgggaaaatgatcagcccaatcttcattagcaaaaacatgatcgatctttgagtaaattcgctttcctcctccctgctcattagtccaggtaaaattggaacctgaacttttcaagacatccataagttgaatcgaaagccagttattagagtttaagagttctccaggagtaaccgggtt

SEQ ID NO: 232536 - DNA, 703 bp, Cannabis indica
tttagctagaggttaaggccttatatgccaaaccctaggtttacaacttaaatctcttgaaaataggatagttaggtagatatttacataagaccaaaatgcccttagattcaagatacttcttagcctatctgttgagcttttggggcccaatatgcagctcacttatgatgtccacgtgtagatgtgtcttgtgggacccactgagcaatcctttgccgaccatggccttgtgctggccaagatgggcgaccatgatgctatttcttggcttggctagccatagggccggccaggggtggctagccaactcccaagagcgagctagactatcacttgatccccgtttgagtgtcggagtctttattggcttggatgctgacttggccttccttttgggtgagttgtactgccacgtggcacagtttctgtccacgtaagcgtgccacatcatgaggacaaaaattgggataacatttgcctcctaagtccctgtgtggacgtctgtacggataaggactttaccaacaagattgatgttatcgagactgcagttacatttgctaaataaaaagtggtgcctgtgttgaagaattctatcttgattgtttaatcttgttgcaattgagaaataattcctttatgtgtctttatgatgagttggtgaagtaagtgagaaaaaagggggcccacatgtacataa

SEQ ID NO: 232537 - DNA, 1106 bp, Cannabis indica
ttataggcaactactaggtttaggttagcaattatttggcattaaaataatgaaaatattaattggaaaatcatgcttgtgttgttggtgttgttgttgttgtattgtgtctgtgtatatatatgtgcacatatacagctgtatacccttggtaaaagagggaaaccaaataaggaaatagtcgatcaattcaaatatacaagtcaactgaaatttttttaccgttgtatttattattatattattattttattacaaaatgtgaaaacaatgtatagcaagacttaattgtattatacttattaattaatacattgtagatgatgtggcttgtaatgattctatttctcatcaatttatttatatgaatttaccatttttgtttgtatttaccgttgtatttggtacaaattttttttattattatattattattattattatttattacataatatagaataatacattgtagatgacgtggactgtaattactcaaactaatttaaatatacaagtcaactgaaaagaagcgcgtattctatcacaacaattttttaccgttgtattttattattatattattatttatttattacagaatagagaaacaagatataaccaggacttaattgtattatacttatgaattaataagttgtagatgacgtggcttctaatcactcaagctcagtgattctatttctcatcaatttatttatatgtatttaccactttttttgtatttaccattgtattttgtacaactttttttattattatttattacaaaatatagaataatacattgtagatgacgtgcactgtaattactcaaactaatttaacagtgattgattttattcctcatcaatttatttctatatttataataagtattttcattaaaattaggggttttttttaaatattatacctaaaattgattttatttgtaaaaatactttcaataaatttatttacataaataacgatgtaccacgtcaacataaataccgaaatttaaaattattaccgaaaatggaagaaacttaaaaattttgcttccagaaatttcagtattttgcaagttttttttttttttt

SEQ ID NO: 232538 - DNA, 924 bp, Cannabis indica
aaaaagttcaaaggtataatttggtacatgtcaaagttcgggaagaaaatcctaattagtctttctaataagtttgcaaaaatataattgggaatttcgctaagacacatttaggatgcctttactttagtgtttttttttttcaaagtgaatgaagaggtaatggattatcactttggtaacacacttaaaatatatagcttctaccagaatgtgaatgaagtttgtgtatacaaatacagcaaagagaatataattgtatttctagttctctacgtgcatgacattatatttattggtaagggatattagctacaaaatcacttaaatttctatgcatatattaagggaaatttatacactaaacttaagtgtatcaatattgttagaacttagaatgagtcaatatttcattaaaccataaaatatcttttctcatttgaaaagtcactccattcactctctccctcttttcttgcttgctctctcttcgatcctctaatccccatcccaaactgtaatgtccatcatgcagtagccaccatgaccaccacacatctccgcttaagatgattgatgtgtgtcgttaaccacaaaaaattaataattatttttatttttatattaccaattattttagtataacggtaaatacaggttaatcccataaaaactattatcaatttattatttaaaaattaagaacaagaattaaaaagagagtttttaaatataaagattaaacaataaactaaaaaataaataagatttttttttttgaaattgaaagtcattttattaaacgaaaatctccgttaccaaactaggcaacaactcaattggaacagtgtccaagttgaacaggcgatcagggtgatatatagaggccctcgcaaaggaatgagccactacatttgctgatcg

SEQ ID NO: 232539 - DNA, 1447 bp, Cannabis indica
tattactaaacttctcggggctgaacctctataaaattcgtgtgtctttacaatgctttgccatatatcgattgctataaattacctatcgcttacaaaataagactcactgtcattggctaaaagcgaggtcaacatataccatcctcaaacatccatcaacgaccaagctttggctgacttcttgatagaaggtataactctagaagaaattccacttgattagcgagacgtagaaacctagaagctaaatgtggatacagcatccaacgaacagggttcgggtgcaggggtaatattaatatcggtcgaaggctttaagttccactatgctatgagattccaatttgacgcatccaataacgaggctcaatatgaagccttgatcggtgacttaaagatagcagagccattgaaagtcaaaaatctcatttgtcatagtgattcgtagctaatcgtgaaccagatcctcggggaataccaggccaaagggttaaaaatggcaaactatttagagaaagttcggaagaacttgaaaagatttgattactttaaaatcgaacaaattctgagaggaaaaaactccaacgtcgatgccttagcaaaactggcctcacagaatgacttggatgaattgaacctagtttcgatagagatgctaagcaagccaagtatctgtgaaactgaagacgtcgagatgatagataacttttgagcatggatgacacctattatcaattatttactcggcagacaacttccaaatgacaaaaacatggtgcgaaaactattgtattcggtgcctcgctacacaatgatcgaaggcaaactatatagaagagggtattcaatgcccctacttcggtgtgctctccccatagaagcaaatgaaatcattagagaaattcgtgaaggcttctgtggggatcatgcgggctagaaaagtttgtctaaaaatatcattagacaaggatattactgccatcaatcaataaggacacacacaagtttgtcaagaaacgtgataagtgtcagagattcacatatacctcgtgtaccaccaacagaacttagaatgatgacctcgccctacccatttgctatatgggggatcacctaattggggcattacccactcgacgaggaggagctaagtatgcggtagtagtagtcgacttcttatggacggaggctgagcccctcttctccataacatgcaagaaagtccttgactttgtcgtcaagaacattatctatatgtttggaattcccatgaagatagtatccgataatggaacccaatttgatgtcgacttgttcactgaattctgcaagaggaataaaattataaaaacgcttctcgtcaatatccaggcctcaaagcaaaatggacaagtggaagccgttaaaaaaccctaaggatactatcaagaagaagctagatgct

SEQ ID NO: 232540 - DNA, 702 bp, Cannabis indica
tttttctttttttttttgtaacaaaaaggataaaacttttattcaaaagacaaacaacttacaagcaaaagcaagatgaaaactagcagccccaaaacaaagaacagctaccagctgttaattacattaataatgtacaaatccatccctttcaagtgttgaaaactacaactcatgattttatacttaacaacattttttatctccctgctcaccaaaccaggagcccgacaacacctattaaaccagcagccattcttgttcagccaaagaaaataaactgcagcagccatgatagtgttcatcaccgtgtccagcaagttcttcaacttcttcgaacaccaatccttccattgcttgaagtcactcggccagttattcagcccaaaccaggtacctatctcagtcatcaccaatttggcaaaatgacactcaaagaaaacatggttgtgagactccgggtgcatctcacaaacatggcagttcttattaacaatctccatcactctactaaggtgatccctagtcaacagatgatcatttatagcttgccaacaaataaacctatgcttaggcacacaaatcttatgccaaatagtaggcgcatactcagatatttcagcagtgatgagagaattataaaacaatttagccataaatttcccattcttacccgcccccaggagagcatctcggttaatg

SEQ ID NO: 232541 - DNA, 1517 bp, Cannabis indica
aggggtattttagtaattatgacctgagaagggtaaaatgctgaaaataattttattacgtgcttaatggaactatattattatatagtatacctgtgttgtcttttcaggtgtgttctgataggttggcgcggtatagtcacaatcgggcacttcgggccgaaccgggttcgggcctgaaatgtaaattggattgcattatttgacattttacttgataatatgaaatctaaaatttatttggagataatttagtatgaaatgtctaaaacacctttatgagggtgaatgtgtatgctttggccttaagggcatttttgtcttttaactatgaaagatatactttaattttgattgaatttcaagggaaaacaaagaaaattctagcctttctctctctcaaacccgatcatctctccctctcttacccttttattttgcaatcttgaaatttgaagaagtgcttgggagttttggtgattttgggacttgatacttggaattgcttgagtttggctttgagttggaagtgaggtagattccttactgaattttaattgatttgtttgctgaaaatattttgagaagaacatgagttaaataaataatcttgtgtatgcatgtatgaggatgttgtagctaattttgatgaatttgagtatgctcatgcttgaaactttgatgtggtgattaattgagctatggatgggattctagggtttttctttaccttaaattcaggttgtttgagattagttgttgctgaaattatttggataggttgaagttaagctcaagtttgagagcttgaagtttataagtttacgcatgattttgagatgtttttacaatctgaattcttggatttattatgggattttgatgcataaaatatattagttgagcatctattatttgctagtgatcctatttgttatattgtgagtttggttgtgaatttggggtaaaaggatagaatttcttgctaaaaattcgtggaatacttgctggtttctgggtttggaacccagatgccgcggcatgctctgaagcatgccgcggcccgcccctagttggtggaacttgggttttgtcccaggtgccgcgacatgacttgggcatgccgcgacccgccctcgtgtttttgggcagtttcgagttgaatttcaaaaatgcataacttttgattccgaactccgatttgggagttgttttatatcgttggaaagctcattccgagctctgtatgattatctaaattttaaatgccatgattgaattctatgagtatggaatcaggggttaaccctaactttgaaaaatcccaaatttgtgtgactaggattactgacacctgatcaggagcaccgggggattcagaatctctatctattgctggacaacaggtaagagagtgattagcacgtagagtatgtgcagtggcgcttatattgtgaatgatatgcatgaatgtttagtaaccgtgattagggttattaccctaataggaacggtct

SEQ ID NO: 232542 - DNA, 1124 bp, Cannabis indica
ttgactgaaaaagcaatgtcaggccgtgttatagtgaggtatattaacttaccgattaagctcctatactaagtaggattatccaagagttttcctgtttcattattgagttttgtgtttggttccatcggagtggtgactggttttgtgccaagacaactagtttcttgtagtaattgaagagtgaaaggcctttgagtgacagagatgcctttattgtttcttgcaatttcaaggccaaggaagaagtgtaaacttccaaggtctttgaggttgaagtgggagtcaagagttgatatgaagtgttgtaattcttcaaggctatttgttgcaacaacgatatcatcaacatatattagtaaagcaagaaagatgccagttttatatctaatgaacaaagagtgatcatttttagattgagtgaacttttgttgtagtaaagtggtgctaagtttagcgtaccattgccttgaggcttgcttaaggccataaagacttttctttagtttagtttacacaccgcatttgaaggaattggagatttgggtgtgtaaccttgaggaagtgtcatatagacatcttcatggaggtctccatggagaaaggcgttgttgatgtccatgtggtggagatgccaattgttaatagcagcaagcgcaaatagaagtttaagagtattgaatttgtccaccggggcatatgtttcaaaatagtcaactccttgttgttgagtgtagcctttggctaccaatcttgctttgcaacgttcaacagagccatctgggttgtacttgattttgtacacccatttgttgcttatagcatgttgtcctggaagaagtgggacaacgatccaagtgttattggcttcaagtgcatctattttagtgtccatggctgtgttccataccttgtctttgcaagcctgtgcataagaacgaggttcaattaagtgagcatcatggatggctgctcgaaaagttggagagagtctatggtaggagatataattggcaatagggtatgatgtgctggttgtttgttgttgaatttggcatatgtaatcttgcaaaaaaccaggtttcttgagtattctaccagatttggtagttgttataggttgg

SEQ ID NO: 232543 - DNA, 1540 bp, Cannabis indica
gaagttcctaggcaaggtttagggggggtcttttgctttttttggaacaactgtatcaatgttactgttgtctcttactctcttaaccatgtggattgttatataaataattctaatgatataaactggcattttactgggtattatggttctccttatcttgattctaaagtttttacttggactcttcttaatcagttatatgacactgcacctcttttaccttggttagtaattggcgattttaatgattatttatctttcaatgatcgtaattccacttcttcccctccctcccatgccatgcaccactttcacaactttctgcatactcgtaacatgacccctctcccgcattctaggaacaagttcacttggcaccacggccacattcttgagcgccttgactggtgcacgatttcctctaattggaaaagcctttttcctcatgcctctctcactcatttggggttttatggctctgaccacagagccctgaaactccaattagaggacactttttccaagcaccaaaagcaatcccgttttcatattgagaattatctaatcaatgatccttcgttctcaaccttggtccgtgaatcctggtgcctctcttcctattcccctcttccccctttacaactttttcttaaaaaacaatctaaatgcctctccaacattaaggactggcaagcttctcagccatcttttaaactccaaattgctagaacgcaggctgaacttgatcacttgttgaattatgataagcttgctcctcattctgctcaacaaatttcccacctccaatctgagcttaacagacttctcctaaaagaagaaatcttttggaaacaacgatccagggttgattggcttcgttctggggataaaaatactaggtttttccatcaaaaagcctctaatcgtaaacgcaataattacattcgtggtttaaccctccctaatggttctatcacccatgacactgagaccattttcactcaattccattcctactatactgaccttctttgctctcaaggagtttctccatctgctatttcctccattctccagggtgttactactaccctctcttcttcccaatctgctttccttgctgaggagtttactgcagatgagataaaaacagccatgttcagtctctctggtgacaaatctcctggtcccgatggtttaaattcctacttttatcataaaaaaatgggatattcttggatccgacctctgtcagggcctcctccacatccttaacaaccagggggacatcactccaatcaataacactattttggtccttattcccaaaaagaagaactctaaaactgtgcgagattttcgaccaattagtctttacaatactctgtacaaatgcctttccaaagtcctggctaatcggctcaaatcggttcttcactctgtcattagccccaaccaaagtgcttttctcactggccatcaaattactgataatattgttattgccatgaatcattcatgccattcattctagaaa

SEQ ID NO: 232544 - DNA, 1233 bp, Cannabis indica
tgatctccctcctttaaccacaatgtttcgatctttggcgccaaaacacctccttttgaatcaacacctcttgaagccgagcttcagcctttttgtaatgatcaactgagcttgcatcctttcctcttttccagcgtctcatctcagtcttgcaagcttggattcgatctttgaaatttcccgagtaatctcttccccaaaccgaaagcttctccccacaatagtgtattttatccatcacagaagaccccgaaagaatctcccaagtatccttcaccaactgcaaacaggcaggttcacgaagccacatattttcgaaccgaaatagcttcgttccacccattctcttcatagcttcaaagactaattgaatcgggcagtgatccgaagtcgacacctctaaattgatgagtttagctagaggaaaacactcaatccaactctgagaaaccaacgccctatcaattcgcacttcaatccaattgctagtacccctgcctctctcccaagtatagggataaccacacaattccatatcacacaagccacactcatctaacattgaacaaaaaccatcaataagccaattgggataaggattacctccttgcttatcagattgggaagtgacattgttgaggtcaccaacaatacaccaaggtagagaactcctatctttaagctcacgaatttggtcccaggtacgtcttcgaaggctacggtttggctcaccgtacataccagttagccgccactggttgccattttctccagcaatagaaacatcaataaaattcaccccataacccagcaactgaacatcactactctgcctccataacatagcaacacctccacttttcccccttgcatcaaccgagaacacaccttcaaaacccaatgaaacacgaactctttccaatgtatcagctcttgacaaagtctcacaaagaaacactactttgggctgcttttggataactaaatccttaatgaattgaagagcccatgggttcccaagcccatggcaattccaagacaatatactcataatgactggtgggcctgaacaccaaggcccacctgtaatccattttttgaactagcatctatcttgtctccaaagcccacgttgtcatcctccacgtgatcatcatccatgtcactaggctcaaccaaagtttcctttcccatacgacgtcttttattatctacaatcagcattgagtcatc

SEQ ID NO: 232545 - DNA, 1479 bp, Cannabis indica
gttcagatgtcttgccttgtgctcgaagcagaagtcaaattctgccaagaattcctgccatcgggcttgctcgggggttagttttggctgtgtgaggaaatgactaactgcagtattatccatcttcaccataaactttgaccccaacaagtaatgcctccacgttcgtaaataatgaataacttctaggagctctttctcctgcactgtataccgcctttctgcctaagaaggcttgcgactctcaaatgccatggggtggccctcctgtatgagcatccctcccaaagcataatctgacgcatccgtctatacttcaaagggcttgcatacatcttgtagggctaatacaggatcttcaatcatggcttctttcaaacatcgaaacgcttcttcgcacttatcagaccacgcccacacaacacccttctttaattctcaaataacctttcacaaatcatctatggtagttggctagaccgagaaaagagcataattattttacattggctgggatcgtccactcttggattgcccgcactttctccaaatccatgcagatccttttgtgttccacaacatgatcaacttgatactttcttgagaaaatgagcacttctctcacttcacatacaactcttctttcctcaacttctgcaacaacacaacttagtgttctcgatgctcttataaagtggcgctgtagaccacgatatcatccaatacaccaccacgaacttatctaagtctttatgtaagacttcattcatgagtgtacagaatgtagctggcgcatttgtcaacccaaacggcatgccgcaaaacttaaatgcctcataccgagtaacacaagttatttttgattcatccccttctgcgattcgaacctgatagtagcctgatttcaaatctaatttcatgaagtattttacctcacatagctggtcaaacaaatcagcaatcaaaagaatggggtatctattgcgcacagtcactttgttgagggcacgatagtctatgcatagtctcaaggtcctatcattcttcttctggaacaacacaggtgcaccaaatggtgccttcgatgacgtgatgaaccctacctctaacatcaccgttagttgcctcttcaactccttaagttctggggagacaaccggtatgccgctttagttgggggctttgcacctgacaccagttctatttgatgatcaactcccctcctgagaggcaacttctttgggagttcatctagcattacatccttgtattcatctaacacctgctcaatttcaggcagagtggactcctccacttttgcatcatacacggcgggagtgataacaaacgttggcctcttcttcttcagacccctcttcaattgcaaggctaatagaatcttgacttctgggggctaccttactttcacgggaaccattgaaggtttctcacccatgataagtaaattccttgttgctg

SEQ ID NO: 232546 - DNA, 2052 bp, Cannabis indica
gtgctagagttgaatgaagcttttctagtggcatatgtgaaacttgggcgaactgatgggatttattacatttcagcacatagttgagtgaatcggctctcatgattggccaatagtaaccggtagaaagcgccctatttcatagacttcttgaacctgattggttgccacactctccttcatgtaacttggtaagaacatagtgatcctctatttgatttctctcattaccacgagggatttcttgttccctagtacggggttgccttcttttatcgtttctacgagaagactttggtaagtcattgttttcattcccctaggttgtgaatccccatggtctccgaggcatttcttgacgaggtgcctaattatttggttgttcatcttctggaatatcccaagtttccccaggtttctcctcctgagtgttatgggggttttcctaagcagtctcctgcctcctggttcttgaacctcgaggtctacctcgtggccttctcactccaagatcagattggttttgtgtgttgttttcatgagtcgcactagctgcggttgcctccctctctaactcagcgtttcgttggtttgcctcggtcaaacgttgccggagttggcgattttctaactcaaccaacggtacgtatctagtggggtcgtaagcgccctcactcataggcatagaaccaccagcattaatgttggtttcctcattcccagtttctaggtttggatcattatcacgttggcttcttcttgaacgtgttgatcgtgttgaacacgttatttgtgaattgggtggcctccatgagcccattggctcttttttgggacgacgattagtctcttcaggacgactattgtcgtttcccagttatcagccatggagaaaaatttccttcttctttagttaggagggatttttctgagcttttatcacgtaggctctcaatgaaagcaccaaactgttaacgtagattttcgttaacgataattaacctattttcgttataaatttggcacataaattgtaagaaatttgggaaaactaatagaaacaaagataacaccagattttttacgtggttttgcagttaactctgcatagtctatgagactatcttattcagattttttctcttaagattttttgtcccccttttttctgtataacctgcccctatttatagtaatataggtaggcagttaattacatttaaatttgaatcccataacaatattactcaaaattatgggctttaattacgctccatttaaatacatgtagataatattagaaaatcacgcatctgtggtttaaaccgtctttaaagcggtcaacgttgacatggataggaacacgttgccaaatgtatctcgctgaggcgtctcgcctagtacttaagtgagtgacttagtttactcgtattccagcaatgacatgagcattagtgtactgagcaaatttaagaactgctctttgaccgtaaggtcttgcagactggacaatcatatccttcaggttattatacttagttgttataacatggattatatgctaagtgttccaataaccaatttgcctcatcgatacttctttacatacagcgaggtagatgcctcgctatgcgttgtttataactccctcaatattacgtctttcgaggccagatggtttctcgtcaatacatgaattaatagtttgcatatccctgtcttgcttaatactattcagccagagagttatggacacactctatttattttatatttaatgagttattctattttacatttaatgacataattatcattaaatctgttggttcatattccacgagattgacgcgtgtcactttctaaagtacaactaaatttcggatataacatatatatatctcaaacttaaactaatatttcacgtttttttatttcactcaatatatattatatcatataaaagtgatataccttacaacaatatgaatataccacaaaactaatatagatgatgcacttaatttttttgtttccttcatgatatactaa

SEQ ID NO: 232547 - DNA, 701 bp, Cannabis indica
aatgaaaagtgctttttaaatgattatagagggtatatttgtcataatccattttaaaaaagcgcatgtcctctgattctggcagttttgtgattttaatgcacatcagcatttaataaccatcttttccacttcttttttcaaattctacccgttggatcaattgtctccctgatctgacggagatcaacccaagagtataaaacaaaaaaaggatcatcttttcactacctttgccatttcaaaaattctgtgaattttttgagcttttttgtagaaaaccatacccaaaatgtttcgaaaccttgcatgccatctttgtcattgacgttcttcttacgggttttgtacgatttgatttttgacctcaagcattcagagggatcatcatgtcgttcgttgttccgtcgattgcaggaccattcatcgtcccaaaacccaacttcaaacattaagtgacttctctctttgttttctttcatacttttaattttgcatttctgggtttgaatactaatttcttagttagcacctttgtttcctcatttggttttaacaattttagggttgatttgtatctgggtaaatgttagggtttaggcagaacataggttttcgagtttctccaatttatcaacttctagtttgataaattccatccaggaattgggattgctttctccttgcagcaatgtcccaat

SEQ ID NO: 232548 - DNA, 1150 bp, Cannabis indica
gaagctttgcctctccttaacagaaaatggattcttgtgaaaccctctttcattactgttatatttttttttttttgctaagataacaatttagtttgaatttctttttacattgatttattgaacttgagaaaatatatactaatcagaatggttattgtgataggatttttaatttacttaaaaagtttataatctgttctacaagatgaacttaacacagccatgtttatttatgtattggcaaggattttgtaagaaattatttttatttatttttatattttgaaaagaaaaataaatcaaaatacaattgtgggtcatttctattgctattactttgaaaaatttagggaaattctcaataatatacttaatatacaatctattaacagaaataacgttaattaatttaatgcaatcccattaacgtgacacatcatcactcctaccgtggaatcaaaataatcaaaacctgtaatctcgctcatcaacgcgccaacctactccattaatcacaagattgaatttcctaacagcgcgtgatatataaacaataaaggaaacctataaatctataactcaaattctcagaattcaaaccatttctcaaaaaaaaaaaaccattaacgaacaaaaaaaaaacttcgtttgataaccgatcaaacaatctaaaacacaattcgtttctcaaactgtaataacaatctgcaaaattgtttcactgcaattataaaaaaatcaaaatcacaactcgaaaccttctctccaaaaaaaatactccattaaagaacaaaaaaaaaagacttatgttacaaaaatcacacctaatcgatcaacaaaaattcagaactggccaagctcagtcaatctacagtcgtacgacagatcaaccaaaccgtcgacacaataatgcgaatcaaaaatctaaagttaagcaaagtttacctttcacactgtatttgacaacatgtccatcttcatatcgatgttttgcctttactagtcgcaccaccaaaagctaccaaaacatgtaataataaaaaatcaaaatacagaacttattaatatacaaaattacttgattaattatgtgagaaaagtaattttttgtacatatacttgtcaacaagaattttttacttacaat

SEQ ID NO: 232549 - DNA, 773 bp, Cannabis indica
tagtcatagaaaataacattattcatgactaaatatattagtcactaaatctcttctacgaccgactttcagcgactacatggcgactaaaaataattagtcacaaaaaattttgggtgactaattaatgagttttaatgaccaaaaaattagtcggagaaaatgggttttcttgtagtgggagaaggtggaacacttatatccaagacaactcttacctattcttccaatgtaggacttaggttaataccccaataattttttttaagtcatataagacccgatacttaattacatcaatagcagtatgacatcgaggagggtgctaggcaccagtagtgtcttctagcatttctctattttacaagagtatgacatggcttgtactattatgaggtagtgccctacaattaattagcgattttccataatttttattaaattaaatttaattaataaaaataagtgggacttaatattattgtgctaaaattaatattacaccctacaaggatgctagacaccatggtgccctttaacatttctcagagcattgatattggataccattggtgtccaacaccttctagaggagcattctatcctacaattggttagcaatattccttaaaagttattacattaaattatatgaactcgataattaattgtaccaacaatgatatgaaacctgggacttaatattattgtgctaaaattaatattacaccttacaaggatgctagacatcatggtgccctttaacatttctc

SEQ ID NO: 232550 - DNA, 1094 bp, Cannabis indica
aaagaggagtctggtctcgagtttctatagtgagagaaatctcactataacaattccataaggcttttagggcccaattcacagcccaaatcatgttatccacgtgtaaaagtgcacagaaaaccctgtagagcttctcttggtcgtcctgacacctgcacggagtaggctaacaagtcatggtgaagtgtagaggctggctggctatagggccaaaccatcaagcaccattatccctggctttttgtactgttttgacgatccaagcatcccacattcttcctcaacagttttcttgtagtgggtaagctttctattcccactattttacttgatttggttgattttgtgatgaatgcatgaacactatttcttgctttcaatatcatttaattcctacattagattgttgtcttgtaagaattttgatcccatgatagccttaggatacgtaatgtggcatttctagacaaaaaaaatctagatctgaccttcattatgattattggctctttgagtcacaaagaacatgaataacacataaaatatgttgagttcttgaaaaacacaagtttttatccgtgcaggtcctggctggccaaggaggtcttatttatgacctggctagccaagggaggccgtcatggggtctagtcggccaggggttgtaccccataggctggccagcctaggcatggaacaagggttcctggctagccactaggctgcgtcacgggctctggtcagccactaaggtctagaaccctgactggcgaaggctaaggctctaaggggcaaccagtttccttccctctgttgacctcgattaaggtcttgtgacggccttcgaggcatatacaattggagccttatgtgtggttccccttgggaactctatataaggctctatagtgagtccattgtagtcaattgtgtaacttagggcttactatatgtcttagtaagtgtacttaaggtggtacttggtcagtaattgaacttgtacatagtgatttacctggaaggtaccattaggtattgttgagtagaatatgtttgtagctttattatgttgctcacctccccttatctct

SEQ ID NO: 232551 - DNA, 863 bp, Cannabis indica
tggaagattcaaaagatcacaatttgagttcttcatcaccatccggaggatacaacttacaagaaaaaaacaaagataccttgattttcttcgagagctaaattattcttttcgtctatttatttaatatttaatatatatatacatgtagtgatcctaaggatgtggtaggatgataataaaaaaattatttttcactgcgtacctgatttagtaccccaaaaccaatacttaactatgcagggatttcccaaaccctaacaattccaagagagaaatctcacgataattaaggaaggttaagcccttcctgtccaaaccacagagaaattttcataatttttgtattttagtgcattgaataggcacatcctcacaatgaaggaagctcacaaagacaaagcagaccacaagagccatgagtagcggatgaaaggcacaaccaacatgttttaaccttgcacaacttcactaatggaagaagggaacaaagccctaagacacatgaatgagtctaaaactagcagagaaagctctaaaatttgggaggaacaacaaaggcacacccatcttgaatctctgaaagaaaccaacccacgaactagacaccaaccctggctagtgcccgctgctacactagacccaccaaccccaatggaaaagcctaccccatctcaggtgattttgaaatcacacttgtatgaagagatgagatttagcttatgccaagacaaaattgggccaccaggagaactgaagaagaccgttggaggagagactagccagagacgaacgaaaaatcggctcaaagtcctccataggaggctcaggggtcgcacgatatgaaatcgcctcacttgtac

SEQ ID NO: 232552 - DNA, 587 bp, Cannabis indica
caattccaagagagaaatctcacaataattaaggaactagggttaagcccttcctgtccaaaccacagagaaattttcataatttttgtattttagtgcactgaataggcacatcctcgcaatgaaggaagctcacaaagacaaagcagaccacaagagccatcagtagcggatgaaaggcacaaccaacatgttctaacgttgcacaacttcactaatggaagaagggaacaaagccctaagacacatgaatgagtctaaaactagcaaagaaagctctaaaatttgggaggaacaacaaaggcacacccatcttgaatctatgaaagaaaccaaccctagctagtgcccgctgccacactagacccaccaacaccattggaaaagcctaccccatctcaggtgattttgaaatcacacttgtacgaagagatgagatttagcttatgccaagacaaaattgggccaccaagaggactgaaaaagaccgttggaggagagcctagtcagagacaaacgaaaaatcggctcagagtcctccataggaggctcaggggtcgcacgatatgaaatcgcctcacttgtac

SEQ ID NO: 232553 - DNA, 1331 bp, Cannabis indica
agttttgacataggcatggtggctcgagattataaatgaatgcttattgagcctagaacctccttctctcatagctcagttgatccttctcttgccgaagtcataggactcaaggaagctctcagttggattaaagcaatacaatagcaaaatgttcacttggagtctgactgccttggtgcgattcaggcgattcgtagtgccttaaaaatgcttttttttttgtttggtttagttattcatgactgtaaatctttgattaactctattggtaatgttactttctcttttgttaaacgatccgctaatgtagtggcccataactttgctaaggctgctatattattttttgatcgtcgtttcagtttggaggatgttccaactgatttgctaccttgtttagtagctgaagttattggttaataaagcaactttattattcaaaaaaaaaaagtaaaagtataccaacaagctaaaatggtgcacattggaattatgtcatattaaaaatcatattacaaatcaattaacatttgtaaatatggagtcatatttcacaaaaaaattcatctcatttattaaagattactcacataaattatatctttacaaaagtaaaattttatatgtttcaaagacatttaaatcttaagtagagaaataatgcaattttcatattaagataatgagatcaaatatagatggagaatactacactaaaattcgtgaggatggataaactccagtctatttgtaaagtttcttaaaaagcacgggttcattgcccaatatatatatctggtacacccaaataatggtgtgtgacaggtttaagaaactaagctttgttggacacagggtggagcctgcatagcaaactccatactttcctaaatttgtgtcgtttgatactcgtcaatgtaatgtgcatatcgaattgtgttctaaccatagttgtttctcaaacatactttgagttgtgataaggttggaaaccgaacttatgacatgtacacattttaaaaacacccgtgtacagttaagagtacaattgtcaaaggacaaaaccaggcccaattaccataaataagcatttcatcataaatgctataaggtcgaagggttacatgttttattatccacctcaaaacaataaaattgtggaattaagatgtaacatcctcgcttcaagcctcaattgggcactcccccacagatttatggctcttatacacgagtagatcactttggatgcttcctggactaacaactggccctacacaccaacacgagtattttcagcatactttgtcctcactcgtacgcttctt

SEQ ID NO: 232554 - DNA, 1114 bp, Cannabis indica
aaactttaaaataacctaggggcattaatggtaattttactaatccattaaaccgatactttaaaatttcctacctagtccggaatacactcaaaataattcttccattaacgtcgggacactactaaccacatcgctaaatttcacaattgtcgggccccaaaaatatttatttgaaagatggtatcctgggtactcacatatcccaatataatcttcgtaattaataaattacgctatttatttcattaaataaattctcaataattatccaagtaagatcataatcttacttagttacacaaattattaaatatttaataaaatatgtctatttaaatattatttatttttcgggatattacaaggaagcatctactttctgataacccaccatgagcttactttggagttaagcttacttaacttagggtaatctcaagatgggaaatccttcggggagtcatcctgaaaagcatatgagtgaggacaaagtacgctagaaagattcatattaggatgcagaatcaatagtcgttccagatattatcaagaggaatggatgtgttaataagtagatattgacaaggtattgagaggagtatatagtagtggatggaaataagaagtactcaaattgaatatctatcagaaatgaatacttaacttattattaagctaagtcagtaggtcaacttaggaggtcccatacaaggaatggaaagacataattatgaattaggtattgtgggatcttatgatttcgactgaatagtaattgttggagataccgagttaatatgttgtctatcagtatagataatctatacaataaataaggatatagaattcatacgaaggaataatctaatcttgtgagattccaagattgatatctttggctatgatgttaagaattaaagaaggttattgagaaccatggaggttaaagcaaaaatagtataatgttttattcttgaaaggtgggtaacctgagaagatcaatggaatattagaaacatactatgagcatatttgataaaggttagattatcttagaataatatcttccctgatgaggtgtttatttaaaagtcataattaaatgtaccac

SEQ ID NO: 232555 - DNA, 1312 bp, Cannabis indica
attggatctgtcaacaagttaatcatagcaatttagatcaggtttgtttaaattttttgaataaataaataaacaaacaaaacaaacatgtaacagatatctgaaaagtaggttaagatattttcagttttaaaataaaatatttaaaatatatcttaactagaatttaatatttaggttgttagaaaataatttgaaaatatttaaaatctaacaaatctcctaaataactaaaattctaactgaaattcaaatatccaactaatttttaactttttcagtatatttaaataattaaaattaattaaatatccaataagataatataatatcttaattttaaaaattgagatattttttatattatatttctaatattataatttaataaaataaattcaacaaaataaataatttgaaaataagatatttagatggttaggatattatcaattttattcaataattaaataaaacaaaatatcctaaattttaaaattttatggttaacaaaccctaaaatttatattcaaaccaaaattaacaagttttcaaaattttcatgttattttgacaaaaatataaatttttaattaaaataaatatccaataagataaaatgtcaaatctaatatttttctaatcttataatttagtttaataaaaatataatttcaaaaataacaaattttgaaaatctaatatggttagcaaatcttgaaattctaattagattatttctaagtttcattagtattttaatatcaaaataagatcatttcaaatattagtaataaaataagtaaaatctggtcttataattaaaataaataaaataaacaaaaataataaaaaaaaattcaaaattaaccataaggttagtttgtgtaaaaatcaaattttcaaattcaaaggctactaatatctaaaactaattttaattgattaaaaaattaataaaaattaatttattctgataattagatttttatttgaaaatttggattatacccaaaattctaccaaaatttgaattttatttcaccgaaaaataatttttgaattaaaaaatatcacaaaacaaaaaaaaatggttgcatacccctgcgcgtgcatgtgagggcatttggccaagacatgaggccgcgtgcaacctccattgacgtgggatctcggtcaggtggggggatgccttcagacacgcccttgtctgaaggggttttgtctgagcgagtcgcacatgacacggtcatgtcccctccatgcgcgcgcgtaggtgtgcaccagaattagatattttcatccaaattca

SEQ ID NO: 232556 - DNA, 1325 bp, Cannabis indica
aaaaattctcattcactttctctttctctctttatctttcttctcatatattctatattatattattttataacatttactaaaatattttgaaaacggaataacagtgatttattttgtttactttattaagaaacgtaatcggaatgcttaaattaactaaattatctttttaagttaaaatatagtagtcattttgtaagatatattttaaaggaaaaattgttattatatatttaatattaaaaaataaaataaaaataaataaattattattttagaatgggttaatgctagcaagagaattgtaatgtgaaacattaccttgtttgttttgatgatctagtattagaatgttattcccttaggggtcgtttggtatgaggtgttaaaaataatttgattatatggaatattatgaaggagaatatgattatagagaaatatgtaaactatgtttggctgtgtagggtaatatgtaatcatattcctgttaattaaattgcactgtttggttgagtacaggaatcttatatattatttgaaaaaattaaaattaaaatattttttattatatctatttaatgttaattatatataaaaataaaataattatttattaaaaaaatatatttattaattactaaatattaaattttattgtattttttattaattaaaatgaacatttctatatattttatcactatgttacttatttttgttcgttatatcatttatgtatgtcatccgcataaaatttatgtagaatgaatatatatatatatattattgctaataatataaaaataactcaattaaaaaaaaacgatctcacagactaaatatatatcgtaatattttatttataataaatgatgattttattggtatttaaatttatttattaattcaaaaatgctatttaaataaatataatggaaggtaataattcaatccttaccctttttttaaggtatcaacattaccttcctcaagtgtaattatattactaagggatgaataacatttcaaggctaaactccaaaacaaacaaggtaatatttcacattaccattcccatgctaacattaagtgattagtaatataactatccttgaggaaggtaatattgatactttaaaaaaggtaggattgaattattaccttttattatattaatttgaatagtattttttaattaataaataaatttaaataccaatagtattatcatttattataaacaaaatattacggtatatattttgtttgtgagattgattttttttaactgagttatttttatattattagcaataaca

SEQ ID NO: 232557 - DNA, 1486 bp, Cannabis indica
caaattcgcttactgcttctctcgctctgaaacttgaccgcaacaatttcctatcttggaaatctcaagttgtccccacggtcatcggccatgacctcgaccgaattctcttctctgatgtgtctcctccaatgaatcttgttactggtggcttgaaccctgaatatactcaatggaagaagaaggaccagctcctcctctcatggcttcgtgcgtccatgacagaaccagttcttgcatctgtagccaatttccacacatctttctcagtctggcgtgcgttggaacaacgcttctcaagccaaacaaaggcccgcctgttacagctcaaaggccaattctcccatctccttaagaacaaccttacgatctctgaatatgttgataaagctcaatctattgctgatgctctcttgattggaggttcaccagtatccactcaagatttaatcttgcagctacttaatggtcttggaccagaattcgatctagtggtctctggaatcacttcaagaagcgactttctttcatttgaagaggttcaggcacttctcctctcacatgaaactcgaatcgagcatcatcaatctgttacagatctctctgtaaaaatgcaagcaaatcttgcagcaagaaatggtccatacagacatcccaatgcaaattcccgtggccctgcacacgacaacaatcgaaatagatacaatggcagaccttctagtgctagaattctttgtcaagtgtgtcttcgaactggtcataccgcagccgtgttccactatcgctttgacaagaattgggtcactcccaaatatggtaatcctcccactcaagcctttttggttgaatctgattttccatatgatccacaggctgctaccaccactatgttccctgaaattggagatgatgactgctggtatatcgacacgggtgctacaaaccatgtctctgttgacacctccaacctggatatggcagccacttacaatggaccagaaactattacagttggcaatggtaagcaattactaataactcacattggtcatacttcctttccatctgcattaccatctaaaccagttcaattgaattctattctaaatgttcctcacatgactaagaaccttgtaagtgtttcgcaattaactacggataatgatgtgtttcttgagtttcacaaatcatgttgttttgttaaggacaaacaaacagggacagtgcttctcaaagggagaactaaggatggcctatatcaacttggtgaagttcccaacaccacacttcaatgcaaccttactactctggacaaaaattctgatgtaaacaatgtttgtagttgtaattgtcataccagtacccctatatcctcttgtaatgtgactgatattaataaaaatacatgtgattcctttactaagtattcaaatcaagtgtttcatactaccaagatcaatgacattaacaattggcattgtaaact

SEQ ID NO: 232558 - DNA, 844 bp, Cannabis indica
ggaacattcacagtacacaagagctctatatttattttaatcaaacaaaaaaggaaaaatagtctatttaagagctgaaattgaagttaatcgaattcacacgtacgttttgctttctctaacgttttatgatctcaggtttaatgtctattattctgacaaaaaaaaaggtatacattagagaatttaatatccagtttgactgaacaaaaatagaacaggcataatacattacacaagtggttgagtaataacttcgctacggtagcgttttgttgggagaaataaaaacaaaggaatatgaataagaatgagaattgaaatacgaagctaatagaataaaatttaaaatacataaaaaaaaattgataaaaaattattaaattttttcgttccttttatttcaaaataaaatagtcattaatgatattccaatactttaatatgcaaccaaacaaaggaatgaaatgaaaattgttttctttccattcccttttattacctccaaccaaaggctacctaagtgattgagtaatgctcaagctacgagcatatatgaacctgttgtaacagaaattagcgttgtttttttaagcgttacatgaaacttaatataggtcttcttaagattatttgtgatgcggcaatttttttatctcattttatttttaatttttttgttgacacgatctcgaaattaaatagttgattatttgatttgtttttctaattttaatcatgtctcgattgaattgcagactatattattactttaaaaaatatataaaatataaaacacacattaaattaatatcaagttattacgtgcaatgcacatatattt

SEQ ID NO: 232559 - DNA, 621 bp, Cannabis indica
aataaccatgttgaacactgtatcgaatttctattgctatgtagagaatcgtcggatacaccctctaatatttaatattattattacttctaaaaaataataaaaattgaaaattatttgtgaagagggaatgtctttctcctgttaattctgatacattatatagagaacagacaggaaaaataaacagatggaaatttattttttctgaatcatgggagacttggatcgtggctaaaaatttgaggagaaaatgtttctgtttactaattaattaaatacatttaaaaataattttaattctcagcctaaatgatcaataaatagtgagattatatattgattcaaaatatgatgtgtatttttttggaaaataaaaataaaatgatatgtatcttttttaatatctttttcgatgaagttttacttattatttttagttagaacattttgcttagttgaatgattaactaggttgttatatatgttgacgcgaaaaatgggccaacgtctgttcgctagatttgcaagataaaatatgagataagtaagtaaataagtgtaataccctaggttaagaaatggattagcaaaatcctaattagataattatgaataatt

SEQ ID NO: 232560 - DNA, 706 bp, Cannabis indica
atcatcccttacaattgaaagtaaatcagatggagcagaaagttcatcataaatataatccgacataaaacaagacctcctcgcaatgcaatgcgcggccctatttgcagatcgtttaacaaaagagataaaaacattgtttaaatcagaaagaagcctttgacaatcttgaataagtaatctaaactgagatagcatctagaccgaactattaatagcttgaacaattactaaagaatcggtttcaatttccacatcagacagatttttgacctttatccagctcaaagcttccttcactccaactagattttttaaataaacttaaaacatgaaggaaaattacataaaacctaattaatattcatgaaaacgattaaagagaacagaaagaagctattaggttttctcctagagatttaagactacacacccttaaactatatttaagggagactaattagttaaatatattggtaaataaagagccagtctaaaaaatataattaaactatatatattttttattatatataaataatattttaatttatattaattgtaattagatttaattggtttttaaatagattttgagattaacatccaataactaatccaattgtaattggatatccaatttttcataattagattgaatttaattagttcatttcaattagatcagattggatcttgtccaacc

SEQ ID NO: 232561 - DNA, 752 bp, Cannabis indica
acgtgtacacacttgtacacgtggcaagtttttaatggtccacgtaatattaattttaaaaaataatttaaaaattataaaaataaataataatataaaaaaattattttctttattttttcattttctttttctttttcctttctctcatcatcttcccaacccactttttcttcctcacccactcaaaaccccgaaaacctaaacccaccattaccagagccccaaatccctaactacccaatcgcatcccgaaccagaaccccactcaagaagcaattcgagacatgggttcagattttgaaaccctggttttcacctctcgaagtaagcgatgccttatgggctcaatcggacccaaatctcacctttgacatcttccgctggactgcccaacagcgcggttacaaacacaaccacctcacttacctcaccatgatcaagattctaatcgaagggaagcgattcagcaatgcagataccttggtcgatgaggtaatggcaggagcttgtgaaatgagtgtgcctctttacaattcaatgattagattttgctgcaatagaaagttcttgttcaaccgtgattttgatgtgtataagaaaatgataaactcagaagattgcaagccaaatcttgaaacttataatacgttgtttaactcattacttaaaagattcaacaagttaaatgtctgttttgtttacttaagagctgttagatcattaacaaagcaaatgaaagcttctggtgt

SEQ ID NO: 232562 - DNA, 858 bp, Cannabis indica
gaaatctcttgcttaagttttgatcagggttgagtagagttatatccctttctcaaactcttccttgagtagagttaaatctcttgctcaagttggctggcaagtaaggactgtcgtgaatagagttgaattctcttattcttcttatacactttttggttgtgcatttatgttaagacctacatgtatggatttgtatatgtctacttgttgtggagtgcttattatagttaggacaaacaagtcttttcacatctttagaactttttaagcatatataacttggtttattccgtatcttggcgactttgaacttaagtttaatatattttttggcacttattttattccgatacttattatctttataatacgggattttaaagataatattaattattgccagtggtagcttgcattttgctagtcttagcaagttgtcggcattggccttaactttttgggtactcaattttagcaggctacctacttgtcaaagtctcaaatgtacgccattcgagatatctttgttaagcaaaattttttgagctgtggctccttggagtgccctcacttgtcttttatctcgtctgtataccgactttaccccttgtctaaggtgaaattttgaaaaaatattcatggcaacattttttaaaattccacgcacttaaagacgtatcagtaatgactttgagatttatatttttttttgtgtgagcacagttatatcctattttattctttggtagattttgcataatagtaaaagatctggttattgtagcactcttataaatgtgagttttctacttacattctaaaaaataaatgtgttagtttaataactaaaaattg

SEQ ID NO: 232563 - DNA, 720 bp, Cannabis indica
attcgatttttattgctcttttctatcttaggaaagaataattttcagctggactttttttttatggaaacttcttgtaagagaataaattttcctatagaaagttaatttttaaaaggaaactttgattattattatttcctttaataaatttgattgtgtcttgataagatcagattatacacactgtttatggcaggtatcaagacccaatacaagatcagactcgttttcggtaagtttccttttctggtctgatttgctgcgacaaaatctggttttgatgctgaaatcaagtttttcttaggaaatttttgtacagctgtggattcgactttgtggctatctctagggtttttatgttctataaatagaacctagagagcagccattcgaatcagctcttctagatttcattttttgcatttttctcattttgtgaagagagagttattttggtgagaacctagttgttcatctaggttctagtatttttcacatatgttcttattctgttttagggttagttagaacaacttaattgaacaagagagaggtcttcaggagaaaacttgttcaagccttacttcgaaaggaagtaagaacgcacacttcaatgacgaagggagttcactgtttgaaggtgtttctgaagtcagattcgtaaagtgcattacaaaggattgcgacaataatttagagggagtctaaacttgttta

SEQ ID NO: 232564 - DNA, 970 bp, Cannabis indica
atggcaaccttgacttcttgatacgcaattaggagagatctcaacaaaatgatggcctggttttcttcatcaactttatgatttatatatgccaatcctacaataatctcatgaaacctatccatattatcatctaaagagagaaaaaattatcctaaaaccaaataacattttagcaaattaatcttactagcaattgatgacttcatgtataattcttcaagcttgttccaaatttctttagccgtcttttctgtgacaagctttctcctcacattgttggaaaggtacatgatgatctataataagctatctcctctattttggctatctcgtctagttttttctctgccaataatttctcatcttcaagaactttggagaccttctggtgcactaggatccctttcaaacttttcgtccatagtgtgaaatctcatgttccatcaaacttctccaattccaatcattattgacaactttaattgtttcttcaagaatgcagcggaaagaatcttgattctgtgttcttgatcgattaccaagctctaatttgtggaaaaattacaattaatgtgaagaatcaaaacaactaagattgaatcacgaaacaattaaaaataataagactaacgaaatcgcaactcaagaaacaaagaaataacagagatgaacaaagcaattaaaactagaaacaaaataaagcaagaaaataataaaatcaacaccaattagttcaagttctatagaacgatgtgatctatgactctactccagttctagaacactactgtaacgtctttattgattgagcaagaataagggtacattacaatcgagatcgattctctgtttggattctctcaaagtgtttatctctcacactcttacctaagaatcttcttcatttacagaagattcttcatacaaatcccaaaatccaatcactctcttttctctatacctctct

SEQ ID NO: 232565 - DNA, 692 bp, Cannabis indica
attaatgcaaaataaaaagaaaaggatatgaaaaactcccgtaagtttactttgtttagcgtcgttagcttgactgcatgttgtactcatgtggtcttcaagtgaggtcttctaacaaagactcattctttatgtacctatctatagaatttaacacattgaatttgagtatttcaccatcaaattccattctaagtatcaatgcttttgtatccaacttcttacttgcagtgagtaagaagggtctctcaaatagagttgatgtaggattggtcacatatatttttgaaagcaaactaaaactaaaactaataacttacatggtggatacaaaagcattgatactcataaatctgaataagattaactcgtggactatgcagaattttaactgcaaaaccacgtaaaaaaccttgtgttcatattctttattttgatagcttttatttttttctgtgtgaaatcaatattgtgaggctcaaatttggttaacgaaagtctgtgttaacactggtatactcgaaatatcttgcttcatgactcctccccttctttagagctttaatccaacttgtattcttagcacttcttttgttcctagaatgactcacatttaattcaaaacttccatttgttgactcgtctgtctgggggcgacactgttgggttctatgccctaaataaaacccatt

SEQ ID NO: 232566 - DNA, 671 bp, Cannabis indica
tatataatattttgaatatgtacagcaagtaatcatttaaatttattttcagcacggtaaattatttttaattttttaaaaaattataaataatattaaataattataatatacataactatgaaaaaaaaattagactaaaatctttttttagttgctgaagtagataaaaaaactatcgatcaaaacacccattttcataggagtattgcttagtaccacgataaagtatctctttataattgactaacgattttctataatatttattaaagtaaaacaagtgagatctaatatcaaattacatcatcaacaatattatatctcaccaccgtaaatattctttagcatttatctttccataaacttagagtatcttatcatcacggacatattatatttttcaatttgcattgatttattaattttgagtacaacacaatatatatcaccttatctgaatttgaatatttaaaatatgatttataacataaactttttgttttagaaattgtagatgtttcatgtttgtgtcacaaaatcacgttatatcatttattttggaggtttgagttttgaaatctaactattaatcattatacttgttttggttaagagaatgttgacctcttcccatattatttggaatttatgaaacattctactcattc

SEQ ID NO: 232567 - DNA, 1184 bp, Cannabis indica
atttaaaagggttgaataaaagaagcagagaaatctatagaatatgtagaacataagcaagaacctaagaatttttgtacaattatgctttaaatagtcatgaaaataagtctagatgtgcttcacataatttattttatatgatcctaatattaaaacattatagatactttgtcaaaaaaaaagtggctgtatacatataaactttcttcttcctgttacttttttattttctttttcttttcattttgattgtttattgtttccaataaatacattttagttatgctttgtattaatattatatagagtacgtaggtgggatttgggggagatcgattatcaaacagttgacataatcttacaaattttttttttttattatagagaagtacttatagtattatattatataagttagtaaaataagtgactatgtggtaaggtgcatgaagttctatttcaaatttaattgacaatgagttgagtagctcgttcctcttatatattttattatttttctacaaattagcgatgtgggactatctaatatccccttaaaatggtagctattttatttgctcactatcttggacaactcgatcatatgcggctctttttttatggctcactatccctgatcacaagtggctctttttactctactttttagatcggtaattttttatgtggctcttttttattttttggctctacttcgattattttttattgggtcggatagtcgctagaggtatttttttatttgttttgctctgataccatattagaatttgggataaggtgaatctcaaaaccaattggcaatgagaggagtagctcattcctcttacatattctattatctttccacacattaacgatgtgagaccatctaacaattatacatatcaattagaaatgcaatataatctttgatttacatgtatccataattattcgatccaaatgcgtaggaataattattcaaataagaaaaataactagagcgaataatgaccactctacacatatgcaagtacggtacgggaccattcttaaaataataatgaaatatcttttattaattgtatatttaatttattccatttatgctatcatatcatatatttaaatgtattttttgaaacttcatcaaatttatggatacttggttgaatttt

SEQ ID NO: 232568 - DNA, 1868 bp, Cannabis indica
accgagtatagatggtgcccatgccttcgacaatgtaatattcgtcagcaaaatttccaattttgctcacggccttgtccccggtgctcgtcaaccacttgaagtctggctgagagaagtagaagtaccccaacctgccttgctttgaagtaaacttcaggtcaaaaaacttgctcacctcatgcgcacaaggcataccccatttttgggtggcgtagaggacgaacagtgctgacagatacttgatgcccttgggggtaaactgggtcagaaagagacggaagaagtctgccaccttcctaaagtacaggtgcaaaggtagcattgccccttgtttgaaatgagcacccggccaggcacacatccccttcttcgggtttgtggctcggtggtttaaagtaggtacataacattccagttcacccaaatagccagattggtccaagtaacttaggcgtaccgcaatgactttggacggagggctcacccaccggcacctaaggctcctttcctcctttgaggaactgtagcagtaagctcctcggtgacgtagtccactccttcaaccagacttcgccgtccacatctactggctccccaacctcattgtatccccaaaaatttggaggcctagcctcctcctcttcctccacctcggaagggctgccaggatggaagacgttcagttcctctatctcttggactttagcatccccctcatgatccccctcctcctagatgggcagatcttgttcggggctgggtaatgtggcgtgctgggccacgtgagggtcggacgctttgaccttgcgcatcgtttgctttgttcgagccatcatcctatgactggaaagaaaacttgaagtggatagcttgtcacttgaagaggacggactggcacgaagacgtgcatgatcctcgtacaaaagttgaagcaaatcctagtaatttcggtgttagcttccccaaaactccccagggttcatctacaaaagacaacacgcgagatgagtgtttggttaggatatcgaacaataaacaggcaaatatgccaaccaagagtactcgacaaattaaaagaatgaaagtattcaaaaataagtcaaaacccagaagtttgaagttttgaggtttagggcaaagtttcacgaagctttaaataagtaaggtgaaaaggcagacaaggtgggtaaaaggctaacatcatcaactacaaagcttcacagatcattacaaagaaaattgcaaagttttaaacctagattttctacttatcctctatagcaaagtcaagagcgcatctatggaaccctgaaattaagcatgcaaaacaaaacaggaaataattgaaaacttactcactgttcgacgtctgagtttagtccaaacgaagttgcacggatacattgggtggaaatctcacgatagacttaaagcaaaaacttcttttttcctctgagcttgcttaatagagaagttggtaaaagtgatttggtgaaggatgtatagccctatttataagcagaaaaatgaaaaagggtaatcatttcgaacgccttagacgcctcggttccccccaaaagcaaatatcgggaatcaaatataatcaagtgtaaccgtcaaaatgtggtgagagaaaaccgggtttcaaagcattaattgcgtcagagcattaattagccaaaaactgaagagacgcctggtcatcctcacatcgaatcgtgaacagacgcgcctgacacgtgtcacccatccaaacgcaaggactgctcgaatgaagtctacactgaacttcagaagtcccgtacagacttggggggcaaatgttatcccaatttttgcattctgacgtggcgtcacacgatggt

SEQ ID NO: 232569 - DNA, 1976 bp, Cannabis indica
gctttccctatcttaggccatataagaaccattggttccaatttcactccacaaagtgtgtaaaacctagggtatattgaatctcacaaaggctataagtgtctaagctccaaaggtaggctatatatagcaaataatgtagtgttcaatgaggaagaattgccctgcagaactggcttcttaaatactcaccaaaaagagtcaactctattgaagttcaaactccacactccgggacatatcttcttattttccaaccaaaaaatgactgaccaaccaacacaaacactacctcccatagtcaaaaagtcttttcagcccgaaactcactcttaatatgatgcaaatcatgcaacaaatgaacttgtaacattaccatacattgttacaggcatagattaggttgatctcacaccaaatctctttgttagtcttgatttcactgaccatgatacctctaatctgatacaatcagagtcaaaagatttatctacatcatcaccagttgcatctgcaagccaaaacaaagaacagtcaacaactcaggttggtcatcctatgataaccaagtccaaagctggagttttcaagccaaatgtatatattggtcaagcacaaaggaatctcaatgatgaagaacctacatctgttcttgaagtacttcaacacagaggcaagaaaaaagcaacgactgaggaattttatgctctttcgagaaacaagacatgggttcttatcccaccttcaccagactacaatgtagttggaagcaagtggcgtttaaggatcattttagaggtgtaaagcaaggcttgttgctaagggatccatcaaagacaatgcctaaattttagggagacctttagtcctgtcatcaaatcttcaacaattcgggtagtgctatctgtaacagcttctaaagggtggatagtgatataacttgacatcgataatgcttttctaaatggaaagttagaaaagattgtgtatatggtgcaaccgtagagctttgtgaacaattaaggacagaacagattatgttcgcaatctagagaaatctctttacggactaaagcagcctctaagggcctatttgagaaacttaagagcactttgatcacctggaactttgagaatttaaaggccgacacttcattctatatgttgaaaactccacaaaatgttgttctggctctcatctatgtagatgatattataattacaaggagcaactcaatagaactgaagaagttcattgaaaaagtgaccaagatttttttctctcaaagattgtagagatcttaattactttcttggaattgaggtatataaagaaacaacttgaatgtatcttagtcaatggaagtatattacacaattgcttaagaagatgaatatgctgaattcgaagccttttcccacacctatgactgttgaaaaaccattgtcacttaacaattgtcaagttctgaacaaaccaaccacctatcgaagcattataagggcaatgcaatacctcacacatacaaggcctgacatagagtttgtagtgaataggctaagtcagtttctcaaatgtccgagatacctcaaaggtacatttcatcatagtatgcatactaaacaaagtgaaaatttgagtcttgttggatactgatcagatgatgactaagcatgctgcccaggtgatcgaaaataaataagaggttattgtgtctactttggtgaaacactcatgtcatggtagtgaaagaacaaatagttgtgtctcgatctagcactgagtaagaatattgagctcttactcaagtttcttctgaaattatatggctcgaacctctgcttcatgaagtgtagtttactcttgcttcattacccgtaatctggtgtgataacaccagtacaagtgctctttgcttccaacccaatctatattgctcgtaccaaccacagaaagttgaacattcactttgttc

SEQ ID NO: 232570 - DNA, 631 bp, Cannabis indica
tagtcacaatataaattttttgtgactaaatgtaactttgaactacatgtaacaaaaaattatttgtgattaaaacataatatttaaatataagttatcacgggtttaatgttggtaacaacaaatattgtgactaaaaacatatttagtcacaaaaattataacttttaggactaatacctttagtcacgaactttttaattaaaatataagaatgatattaataattatcataatttttttatttttaatcataaatttattagtgaataaaatttaaaaaaatttgtaataattaatcattcactcacaattaatattttcgtaatctacaccaaaatgtaggactcagacacatttatgtgactaatttacctgaatttttataaaagttaattttctcttattctttttcaaaagaaataagtgcattgtgcctcgaatttcatattaattaggaaacagatcgtgtttcgcgtgacgttgtattttatttagtatttaagttataaaactatattaaattttaaattttggcatttttatataattattctaatagtaagtagctattaaaaattttatttcttaactcttaataacaaaagtgtaaaattatttattgacatat

SEQ ID NO: 232571 - DNA, 951 bp, Cannabis indica
cctccagtagaaaaagctgattcggaagcaacgctagacatttgaacagccaaaacatctctagcaatgcgagagacaataggatacttactactattccttttccaccaatcaagaatgtcaaagtccacattttcaagtaatttttcctttctatcattaagataatcatccaaatcattagtgatttcttcacttgacacaaacttgagcttgataaggaatgatgtgctacttgaatttccacttgcattggatttggaagtaatattttcagttacttgttgatcattggaagaattaggcagcacaacaatattttgataaaaaccatacaagctagtcatcatattttcaacttttttgatcattgtttcagctataattgactcatagaggtacctaacaagtaattaattagtaaacattaatcaatgtatatagaaaaaattaaatagtaatataaaattagatccataattaaaaagaaataaataaaaaaccatacctgaaaccgttccgaaccacatcaagtttgaatcttggatccaaaatggaggcaatatactgcaacaagttaaccttctcaatattgccccaatacttgttaaacttcaattgcatgctcgctgccattttacttatcaactcatctttactagccttcatatcattgagctcaacttgaacttgcaaaatctcttgaaagaaaagatttgatgtcacgtacaatgacccactaaacttcaaagtgagttcataaaaagatttgagaaagttaacaaatacttcagcattactccaatcactagcttctggtgggccatcaagtttctctccattaactctttcttcttcaaaatacttaatgtagtatgcatccccttccatatacttaaaaacactcttgaacttcaatgctgcttctagcatcatgtatgtggagttcca

SEQ ID NO: 232572 - DNA, 2346 bp, Cannabis indica
aaatagtacaattactaaaaaaaatgaataattattaattccacataaactgtggtttcgaaccaaaccaaaccgttcttaagggtttggtttgagaaatttttttgtctggtttggtttctaatattgaaaaaaccgttatactggtttggttcaaaacttatgaaaatccgaaccaaaccaatccgtgaacacccttaaattcgcatatagctttatgttgtcttatgagttgatctcatttacaactgctattttttatttttcctttataaagaaaaaggtttttttaaatttttgactgtatattgtccatagataattttaatcagttatcttttcctttatggaatttttttaattttttaggtttgcaatataatatgtacttcttgatgaattccagttattatacacacatatatgccccccaagtaattttaaagaagataaactttacaattacttcaacaagctttaattttactcactataagaatttaactaggtcgtgaaaaccctaggtcaagcatcccctgaagttgaatcttcaactctttaagctctaccgaagccattctgtacggtgccttagaaactggtttagccccaggttctaaatcaataataaaatctatttctcgctgtggtggtaaactcggaagttcatcaggaaaaatatctaaaaattccttaaatcaccctgatatcctctggctgaattgattctaatcttgttgtatccaataccactgccagaaaccctaagcatccatcttgtaacaaatctctagcttttagtacagagatcactggaatttgagatccctaaactaatcccacaaaacaaatggttcctcgccctcgggttggaagatcaccatcttctatttacaatcaatactgactaagtactgggacaagagatccattccaagtatgatatcaaaatctactaagcccaattccactaaatcagcgctgaactctctatcttcaattctgattggcatatacctaactcaccttttggagataactaattcttcgccaggcagtagggttccaaaccctttatcataggtgtcatacagtctactcaatttatcaaaaattctagccgccacatatgaatgagtggccccagagtcaaacaatacagagaagtaagagttgtttaccaatagctaacctgtaaaacctgaggggctagcttctacatcagcctggctaagagtaaacaccctttctggagcgagctttgctaatgtcttttgctcttctttcttgagctgcgggcagatgatgcttcttacgactgggacattctgggcaagtatatcgagttttggaagcaccttaatggttgcctcgaccctggttcctcaaaacctcttgttctaatttaagccactgggtgcaaatggtgcctttctttttttggttagtggtcgagtcactaccacccctaccataaccagaggtagggagagtagtggctccaccaacaacctgagtccctcaagactcttgggtgcactcaactggacccttagctcgcaatgcctttcccaccatatcagcataggtggtgttatcataattggtgatcacaaggtcatgcatgattttggggtttagtccatacaggtacttttctttcttactgaagtcggttggcacaattcccgaggccagcctagctaattaattaaactgagttgtgtattcagtaactgtcatattctccttcaaagtcagctgggtaaattcctttctctttgcacttttgactgcctcattgtaatactttacatttaaaaaaatcctagaactcttcccaggtaatggtagtaacatcccgagttagggccaccatgtcccaccaaactagggcatcttcctagaattggaatgtggcaccaaccactctattgttgtcggacacccataaagttcaagatttgtgtagtaattgtcagccaccgctcgggtttcatcacattgggacctcccagaaagactggaggtgcttgcttgtagaacctttcgtgtagtggttccatttgattcattgtagcaattggacctgcctacacagtaagggtatgagccacctacatctctggaacaagcattgcaggagcactctactgcctcatgcctctgatttcttcgtcttgttcattgattctagtttgcattgctgcaaacctgtctttccaatcctgggtagcctacggtgggttaacatctccctgatcgcataccctgcctctaaggcctctgtctcagccacatatattcgggggaatttgaactccctgaccgccactggattcgacc

SEQ ID NO: 232573 - DNA, 1167 bp, Cannabis indica
ttaatagaagattccctattgaagatactagttgtcctctttgcaggaggggaaggaaacttttgaacacttattcctttcatgcgaggtagccttgcacttatggagatcttctccttggggtatttatcttgtctgtaatactggtatccgaccttgggattgggtaaaattcatttgggaccttaagcacaagggtgttaatgcggacgatgtattcctttatgcttcggttattgtcgacaccatctggaggactcgtaatgacaggtacacaataatagtccagtagatgttaaaagatgtattgactctatttgtaactcttttacagatctgcatgctaccattttccctcctcctagtccttacctcttgtaggattggaggcctcctccactggattggatcaaacttaattgtgatgtcaaagtggggctagatagcatgtgttcggcagttgtggccagggatcatcttggtagggtgttgcggattactacggccaggttaggcttcgctgatgcgttgtgtggagaagcggcggcctgctgtttggcggttgaaacggcaattgatctcaaggctaagtttgttattgttgagaatgactcgagtgtggttatcaatgatcttattgggaaggatcctcaatgggcgcttgagaactacatctcattttgtaataagtcttctcctttattttctagttgtattttttcttatgttagtagaacttgtaattttgcggcccataacgtggacaagtgggtgttcacccacaagaagtttggtgtgatttcggttttgtcaataccggagaacctgttatgtaatgaccgtgaggtctaactattctgctattaatatattcgctttaaaaaaaaaacaaaaaaacaacccttcaccaccaattctgatctgtcatcaaccttcttttgaatttcttttgaattgagtgcagcctttacttcaaacatagttaaggtatccttgccatataagatcatatccacaaagtgttcatagtttttaggcaaggagcttaatagtagaatagcttgatcttcttcctcatttcgaaccccaatgttgtttaagtccaagattagtttgttgagtcatcaagatacttcctgagttccttggtttcatccattttcatgg

SEQ ID NO: 232574 - DNA, 1055 bp, Cannabis indica
tttagtttggattttaagtacaggaaccggtcagttgagagagctttggttagaacatctgctgcttgatcaatggacgaaacataacgaatagcaagttgattatccagtatttgatctcgcacaaagtggagatagattttaatgtgtttggagcgtgcgtggaagactggatttgcggcaagtgctaaggcactttgattgtcaacccagatgacaggaatttgatgaatagagacttgaagttcctgtaacatagatcgaatccatttgagttcagcagcagtattggcaagtgctctgaactcactctcagtgctggatcgtgccactacatgctgtttcttggcagaccagctaatcaagttgtcaccaagaaagaccaagtacccaccagtggaacgacggtcatctatgctgctggcccaatcagcatccgagtacgcgtgtagagtcatatcagtggaagggcgtatccataagccatctttgatggtgcctttcaagtaccgaagcaatttcttgcaagcttcccagtgaaccgaggtaggagcatgcaagaactgacttaatttgttggtgatgaaagctacctctggccgtgttaaagagagatactgaagtgcaccaagggtgcttctgtataatgtaatatcatgaaatggctctccttcagtgagagagagtttgaccgtagcactcattgggttaggacttgccttggcaccttccatatgcaacttgactaataaatctgtaatgtactttgtctgagataagtacatgccagttttgtctctgtaaatctccactcctaagaagtaatggacttgaccaagatctttgagagagaaggagttgttgagatcagtaatgagacttgaaataagggaagcattggggcctgtaattaatatgtcatcaacatatactagaaggatgactagatttgtgcctttgccatagatgaagagtgaactatcagctttggaatcattgaatccccatgcccgtagagtcattctcagcttatcattccatgcccgaggggcttg

SEQ ID NO: 232575 - DNA, 1199 bp, Cannabis indica
cttctttatcatgtcttgcggttttacagtcataatgcttgtttcttgactgcataacgtccgtctttcatcttgtttattctaagcttcatgaacttttttgccctaactcaagaaaatttttgagttcttgagttctgacttttctctgatcataatcgttctttaatctgttaagtactcctgatcgacatatttgcttgtttattgttcgatattccgaccaaacactcatctcgtgtgttttcttttgtagatgaactcaggtgagtcttgggaacttgcacatcggatcgaccaggatctgcttcaacttctgcacgaggatcatccttgtcttcgttctagtcctccttcctctagcgaaggacattcttctagccctgtacccagccatagaatgatggctcgtacaagaaacgtcgtgtctagctgatgcaactgaccctcaagtggctcggctcgccactttgcccagcgtcaaataggatccggccatccaaatggaggaggatcgtggaggggacgctgaggtccaagagatcgaggagctagacgatgtacgtcctggcagtccctccgaggcggaggaagaggcagaggttgaacccccaaattacggggagtacaacgaggctggggagcctgtcgatgctgacggagacgtcctggttgagggcgtggactacgtcagtgaggagcttgccgcggtggttcctcatacgaggtagggtgccttgggcgccaggtgggtaagtcctccgtccaagattacggaggcacgccttcgaactcttgaccagggcggatacctgggtgaggtggactgctacattcccgcccacaacaatcttgccacgaaccctgacaagggaatgtgcgcctggtcggttgcccatggttagcaaggagcgttgatgcccttgcataaatacttcaaggatgtggcagacttcttcggtctctgcctgacccagttcactcctaagggcatcaagtatctgtctagcctcttcgtcctctacgcttcccaggagtgggatactccttctcctcacgaattttcctagttctttgatttgaagtcccacccccaagcaaggcaggtcggggtacgtctatttctctcaaccaggcttcaagtggttgaccggcacgaatgacaccatcatcaagatagggcattttgttgatgagta

SEQ ID NO: 232576 - DNA, 1038 bp, Cannabis indica
taataattattaaattaaattagagagaattctacgcagaaactattgaaagataaggtgtcagcatttctcatatatttactctctctctcctgttctctctcttaccctctttcttggactaaacgactccccaaccgaccattcccttatcaaatatcccctcatcacttcatcaccccattcctcaaataatacaaatacaaatctcttctcaactctctctctcacacacacataaacaatcagtaattatactaatcaatatcaacatgatgttcaccattgctgatatggatcaaaataaccagatgtttcatcaattccccaccacactaaccgatgaaattgacaaaagatggaaacccagtatcgaaatcgctcccaattgccctcgatgtgcttcttccaacaccaaattctgctactacaacaactacagtctctctcagcctcgttacttctgtaaaggttgccgacgttactggaccaaaggaggctccttaagaaacgtccccgtcggcggaggctaccggaaaaaccgtcgctctaagtcctctaataagattaatcacggaaggaagagtaataattattctccagactccactgagctctccgaaagctctaatggcgactcgagttcgggttcgggttcggatatcgacttggcagctgtatttgctaacttcttgaaccaaaatccggagtccagttctaataaagcagcagcagcagcagttgattcaagcatttcatcaaacaattgtaacccacgaaaagagggatcatcaccatcaatcatcactgaccaaacgctgcagattcaacagtgccttgttcttgaagaaaccgaactagtcgaagaattactattagatccggaatgtaatcaattcgggtttcaaaatttggttgggaatgatgaagatgttcaggttaatggagaggatattttttggtcgaattctacggcggcggttgcggcggcggttgcggcggcggagaccatgccaagctataataataataataata

SEQ ID NO: 232577 - DNA, 663 bp, Cannabis indica
gtaatttttgtgagaaataaaaactcgaagtagacgtagctccattaccatcacgacatgaggagtgatttactataaattttatgtatgtctctatttactctacttatctcttattttatctcgccaatctagcaagcgagtgttgaccactttttagggtcaacaagtattttgggaaatagggaaaactttaggataattttattatggggtccaattgtatattatattttggttggatcaactttgaagcataaaaagtaaaatttctctctacctattgcgattaaaaaatgttaaggggcaccataaggtaccaagcatcataagatgtagcatactgttattcgtttaatataatatcgagtctcacacattttgatttaataaataatataggaaaccactaaatagacacaacatgccacatcagtacggtgttggacaccttaaaatatctaatagcaatactcaatgagattggtggttacaattaggagtgtgcataaatcgatccaatccaatgataactgatcgatctaattacaaccaaccgccaaacattagatatccaattgtgattggatgttattttttaatatccaattggatcgaatcagatgttggatggggtctccgaaaattcaatatatccaacat

SEQ ID NO: 232578 - DNA, 994 bp, Cannabis indica
ttgtcttttttttttttttattgggttgtctttttttttattattattatcaattttacttttatattcaaaaccagttttctgatgaaaaaactaatttcttgatgaagaaataagaaactagtttcttgatgaaggatcattggtgattgattttgatcgcataagaaactaagaaatttgaatcgcatgagagagagaaaaaaatcttgtgtggttggagagagtagtttgatttttgtgttttttttcgagcaactctgttttactgtgatgtggttacttcattttttattgtgttttgtctttttttttattataagtttgtcatattatctttttatagagtcaacactggatttataagttttttttattataaattttacttttacataatcaaaaccaatttcttgatgaaacaaccaatttcttgatgaaaaaatcaatttcttgatgaatgatctttgatgattgattttgattgcatgagaaactaagcaatttaaattgcatgagagcaacaaatattgtatggctggagagagcgtgatcctattttgaaaaattaatcatctttttaaatattttttatggcatttttaatttaaatgcccatacgtttagttagtttggttataaaatgtcatatttagtggcattaactttacatgccatattttcccaattttacaaaaatactgaatttggattaatacttttcaattttactgccacacggcagatgttacatttatactgtcctcccttttttttttcttttatactgtaaataccaaaaaaaaaaaagtaatgagacctctatctttcacaaccacagacagaatcactacaacaacaccaggacaaccggaaacaaccattaattccgacaatattgagcaaaaacagtgaaattgacatcaaataaataatcatgaaaaaacaactgtaaaacaacactaaaacaatcaaacaaaacaaaagaaaaaaa

SEQ ID NO: 232579 - DNA, 956 bp, Cannabis indica
attaatgaatctccacaaaaaaatcttaagtttttttggcaatcgcagagaccacattcgattccaccattgtcgatgagtggaagatgaggagtgttcatgttgagtttccaaactagcagccaattggtatcctattttcacagaataaattcctgaatcagaatgatgccaaatcaacttatcatctctaggaaaaggactgagtgggatggatagaatgcgctgaatgtcagtatctccaaagtgggtctgaagaatccttaagtcccaagtccgatgaatagagatatagtgctcaaccataaaagaggggtctcccgtataaaagtaaggggtcatagttgtattaccaggtaaccaaggattcgaggcacaacgaacattcgcacctgttccaatcttccatcgcaaaccttttaacaacaagtctttaccatcacatatactttgccatgttaaagatggtagaacaccttttttagccgagagaaaatcaccatttttaaagtaccgagcttgaagaaccgtagccaataaagaattaggattatccagaattctccatgcttgcttagctaaaagagcttggttgaaatgaataaaagagcagaaacccataccaccatcagctttagaggaacacatgaacttccatttcttccaatggatcttagaattattagtgtttgaaccccaccaaaaattagccatcatagactccaattggttacaaaactttttagggagactgaagtaactcattgcataggtaggaatagattgcaccaccaccttaagaagaaattctcgacctccaatggaaaataatttagaatgccactgattcatcaatttccagatacgatctttgatgctactgaaaagctcctttttgtctttgcccgcataagaaggaagaccaagatattttcatggagagaacaaaaaggcat

SEQ ID NO: 232580 - DNA, 987 bp, Cannabis indica
agtcattagccagtagaatgtactccttgttttcatgaatgaaatattccttgattgtcttccttagaacttctatgctagcaaactccatgtatggtttccactccaaggcatccagatttgtctctggattgtatggcaatttatatggtcctccaccttcattttcttcatcactatgaacactgcccatttcatcttcttcaccaatgtcaccttcatcttcacagaggttatcaggaaccaattcagtgtgccttccccaccattcacaattttcaggttgtgtgtagccatgcctctctacttctggctcaccacagtattcctcctcatgcaaaacaaaatcagcatctggttgggtttctggttcagggtgagattttggttgggtttgagggtcaggttgggatgattgtgagggaaactaaaagttaggttgggttataatatttggtttaggtttgggctgtggtataggttctagttcaagttggggttgtgatatatgttctgattcagtgtggggggatttgtagttcctcctctgcctaagtcttttggctcttggtggggtttctggttgagattggggttccttaagcttcctcatttgcctaactcttttggctcttagaggttcttcaagtttagggtgggtttcagattggctatgagtttctggttcagggtggggttgtggttctggttgggtttagggtgttgggagaatgatttctggttcaatgtggggttctggtggagtgtggggttctggtttaatgtgggcatctggttgagtgttgggttctggttcagtgtggggttatgattgggcactgaatctcaacctcctcctctgcctaagtcttttagctcttggagattcttcaacttccgtataaccagtgatctccacatctggggaacctgttgaaccatgattatcctgtaaacaaaaagaaaattaaaaattagaaacatgcc

SEQ ID NO: 232581 - DNA, 1316 bp, Cannabis indica
ttcgaatgagcaaggtgaaagacgaacaatgcgtgatcaaaggcaaatgtcatgaaccgtgaagttttatagactattacagagaaaatcacaaagttttaagcctagattttttatttatcttctacaacaagttgaaaacgcatgtacaaaacccagaagttaaacatgcaaagtaaaaagagaagaagattgaaaacttactcactgttcgacgtctaagttcaatccagacgaggctgctctaatgcttttggtgaggatctcatgacagacttgaagtaaaaaccctttttgctctaagtgtgtttagtggaaaatttggtaaaagtagatttgtgaggaaaactcagtcttatttataggctgagaggtgaaaagggcaattatttcaaaatgcctttagacgcattggttccctacaaaaagcaaatatcgagaaatcaaatgtaatcaagtgtaattgtcaaatgtgatgagaaaaaaccagggtttgaggcactaattaactcagagcattaattagctaaaaaattgaagagacgcctggtcagcctcacatcgaatcgtgaacagacgcgcctaacacgtgtcagccactcaaatgcaaaggcagctcggatgaagtctacacacaattttggaagtcccgtatagacttgggggcagatgttatcccaatttttgcactctgacgtggcatcacacgatggtgacacgtaaaatcaactttacatacctgctcgcaaaagatatgccgaacagagcaccacatatattcgcatggatgaaaccttcttaatcgggtagtgagcagtccaaacagcacgccaacacttagtagttttagcacttgcatcgtgagtcacaagagaaatccctatattttgggatcatatcatagagatatggaaagctgtccaaatccaatgatcagtgtattttgtatttaatgtgtaatcttgacaattatatttgttgtaatcagaacggaaacttcttccccacagtttatagccctataaatagtgatatattctcactgggcaaagggtcgaaaaactaatctaagaatccatattcggagatattattgtagaagctctaagaagaggaatcattgcattctttgttattaagtcaatacaaatcaaggggagtaggctattaccgaactgctcggactcaaacctttataaaactcgtgtgtctttatttattatatctatattatactgcttgtcgcttacaatttagactcactgtcgttggctaaaagcgaggtcaacacatgggaattaaacttttgaacatat

SEQ ID NO: 232582 - DNA, 627 bp, Cannabis indica
ttgtatataaatatatactattacatggaatacaatacgcaatttaatttattattctctacatggtatcagaactgtacttagaattgtaatttgaaattcgaaattagagtttataaaaaaaatataagattagggtttgagtttagggttcctttttgggaaaccctagttagagtgcgagttctttctcaccacccacatagataaattgcccagccaccgatttgtacaatcccaaagtctggcagccagtatcactgcgtgtgggccccacgcgctgcccatctccgcagcctcgactcttaggccatcgattttcttcctgttgttctcctcgacctcccttgtggttccattgtccatttcaattaaatatgttttgtttctgtagataaatatgctaaattcttacagtatcaagtctcttaagtattcatcttcttctatcactactattgctaattcaggtaaaccaaattcgtgtctcttttcctcatctttcaaatgggtcattgattttggtgctacagaccatatgacaggcaattcgagcttttttctaatcttcaacctcacgcttccacttctactgttacgttagtcgatgggtcaccatctcgtgtt

SEQ ID NO: 232583 - DNA, 715 bp, Cannabis indica
tatatattttggtgttgcgaaattcactcgacaacaattaatgctatttgattgttttttctttccctattattaatttcatatttgtgcttattacatgtgtttaattggtcaccttatgcatgctttatgatcacaatataaaatttgaaaagtgagtattgagaatgctctaaatggataaacataggttttaatgtgaaacgagagtatttccatagcttgtgtgaccttttagattattgcttaatgcaaattgttgttgtactatctcaaagatgcagtagttgacatgtaatttaggacctttatgatttaaaaagcgtttagattattttataatctgtcatcacataggaggaagaagtatagttaattagtattaatatatcattgggtaatcaaagtaattgaaaacatatccccaatttcacatccatttttaaacctttaatttgtttgttttatttattttttttgcttattttatttaattttaaaatttatctatttgattgtcaattagaaacaagaattcaattgattggtacttagctatattcctcgtgggaatgatctcacttaattacctgagtatcacttgtaaaaacgatatgtatacttacttgttgtatttatcataacaattttttagcgtcgtttatcgagaattgttttagttaatatcaatatagttgaattttattctaatttg

SEQ ID NO: 232584 - DNA, 1798 bp, Cannabis indica
cacatatacaataatgccattcatatttgtctttttaatatagacctgcgtgttacgctcacacgcctaattatgtctatgtggcatagacccacgtgttacactcacacgtttaaatacaataaggccttagaacgattcatctcgattctagttaccgagtccaacccgattatgctttgaacgcatactctttaatctcaatacatacataacatggcatagcatttacatattgataatcactagggtaataaccctaggccattaaactgctcatgccagggtaataaccctaaccccggtttcaaattactttcaattatcatattcaatataagcacgaccacacataactctacgtgctaactaatttcttacctgatgtcccgcaaacgtggagattccaaatccctgggtgctcctgaccaagtgcaggtaatcctagtcacaatttctggaattcacacgtatagggttaatccctaaatccacttccacaaaatatagaattgatattcaaattataaataatcacatagagctcggaacgagctttccaacgatacaaagaacatcccaaatggagtcagtcccgagttaaaagttagaaaacaaaagctcaaaaaaaaaaaaaaaataataaactgccaataccatggtcgcgaccagacctgcgatggtcgcgactagagcccaaataggggactcaccctctctggttaagcgctaggtcgcgaacattgggtttaaaaacccagaaaacccagttttcagcttcaaaaataagccaaattcacacctaattcaaccaaaacatgcacataacctcaaaatcatccccaaagattcatagatatcaaaacagagtatttagggcacataattcaagcttaaaccacagccaacatacaccaaatctcaagatagcaacatactagctaggctccaaaccttgagctcaatatcacacttaactttgcacaaatttaacagaaaattcagagctactaaactgattaaaaacatccataaaatccctacaagcctctcaaaaacttactctaacacaataatcaaagattaacaacacaactaacaaaaagcatcaaaatccaactaatcctccacatacatgcacaccaagagcaatatcaccaaaaatcatgctttcaaaacctaattttagcaacaaacaaaaatcacaataataggaaattacctcaagccctaagcaagaaaatcaagctttatcacctctgaacatcaacaaaaatccattatggagaggatgcaacaattgaaagaaattgaaagagagaggtaaagaaggggggtttggttcttggctgagaaataactagaaaaaagccttcctaaatttctttgttgcaagtaaatcaagcggtcaaaatgaccaatttgctcctagggccttataacacacacataaatattcaagggcacataagtcattccatcacatataattatttcaaataatttcagaatattcaaataaccaaaagataccaataaataatcccgaaaatgaattttggcctccaacccggttgagcccaaaattcccaattgtgattatactgcgccgacttgtcagaaaatacctgaaaaaggatgaaacaagtatactatttaataatatagtccataagcacgtaattaaactaaattccacaggcttaccttttttgggtcaaaattacgaaaatgctcctggctcacaaacgaggttttagcatgtcatttatcagattaattcacatataatagatta

SEQ ID NO: 232585 - DNA, 2192 bp, Cannabis indica
ctgtatactacatcagcaagagattgatcgatgctaaagtcggtacccgctcatggagaagctaacccatagcttactcttagcttcaaaacaagctaaggccatacttctagatacactaataaacaattgcgccaagttctatgaaaacctgaagcatcaggccgaccactcaagtaaaataaggccaagctctcaccagcttcatggccaatcgtaaaggcatatttccacaaatcactcaaagttcaagagaaaaatgggagccagagaagaagcgagagtaagaacccaagaggtgcattgaccacctgcctgatgctggcatggcccccagggcacctgggggcaactgatgcatgaggtaacaaggtcattttcaaagcttctaacaaggaggctgaacatgaagctctgaatgctggcctcaagctagcacacgaagcgcgggctaaccacctagacatgcaccacgactctcaactagtcatagattatgtcctaggtgaatatacagctcaatacaagaagatgatggcctacctgagctattaagtcagctcaaaggctgtactaaaaggcaagcccccaaagatgacacaacagccaatgcactcgctcgactacacagttatgccttgacaaccaaggcagacttggtacctgctctgttcttcaaagaactaagcctctttcttttaaaaggaatagacatgctagacaaccaacatgttcatgcacctacaacagcatacctccaaagaaaaatcttgccagaaagcagagacctagggggaaggttgtagggtgtccaatcttgctcaacctaacacatagaagtggtatcccaacaccacctctacgaagcattaccaagaaagaagttgaatatctattgatatagtacacaaaggctctacgacaatcatgctggagggtaaagccaatcgatagcaccccaagaaagaacctaggcaaagtttgttacatgtaagaccaactgtgtccaaaaaacttgctcacagattaacttcttaaagttactccttcagttccacatgcgtactatggatagcaccccaagaaagaacccagccaaagtttgtgaaacttggtgaatagcaagtgaccaagagacttgcctacatggtcgcttgggggacacccataccgtacaatgcatcgaactagcacaaagaacttatgcagagaaattttaacgcttagaataagctactaaacctacctataagtcatgcgggcatactttggcttgacaaagtaaattcggacccttacatgtcaaggccataagaagatagccacgacgatcatatgtccatcatagatggctttaagacaaaataatagtagtgtttgaaaacagagggcctataggccaaagcaagaacatgaaagccttgaggccggatatgaaatcggttcacatgcatgaggccaaggccctagaagaaccatatagctagaaaagaactagacagagctcctataggggccatgtaccgggttacggctaagggagaattccttacaggttctaagccatgttgagtcttaagttgaacattcgactataatagactcgccattaagtttcatatagagtttccaaggaaaccacgtatgagactaaggttgtatatgcctacagagctaggtttttccaaagtcaaaagaggacagaaaactggatacccacttggaaccaaggcccatgtcggccaagattctcaagccttgaaagggtcggctagggtcccatgactcagccaagaactggctaaggtcaccaaacccaagcatgaacaagctagctttatagggtaaaatcctaaagctggccaaatcccatgattaatccttatggccagccaggtctccagtaggacctcataggccagccaaggtaagttttgaatcccaatgtgtatttttctttcaaaactcaaacatgtgcctcgcattctctatgactcaaagagtcaagaatcatagtgaaggccataatcaaatcttttccatcaaaaagtcacacattatacattctaaaactgttatgaggatcaaaaagttttcaatagcttaaaaaaagcttgaaacttgttaatggcgggtataaagaagagatacccaagaagagaatatgagacgtagagagagagagagagaga

SEQ ID NO: 232586 - DNA, 1189 bp, Cannabis indica
gtcataaatgacagatcttctacccctcattctcttgataaatttctatcttatcataagctttctgactctcataaggcctttattcttgcagtgacagctctttttgaaccaacttcatataaccaggctgtacatatcaaaatctgggatcaagctatgcaaaccgagatctttgctctcatcaaaaacaagacatggaccgttgttcccttaccaccaaataaacgagccattggttgtcgttgggtctacaagatcaaatataatagtgacggatctgtggaaagatgtaaagctcgcctagttgcacaaggatatactcaacaagaaggacttgacttctttgacactttttctccagttgctaagatggtcactttcaagctgttattggctatttccacaattaaacaatggcccattcttcaactcgacatcaacaacgcctttctcaatagagaccttcaagaagaagtttacatgacactcccacaaggacttccaatgcctactgatgtcccttcaaatacaacacttgtttgcaaattgcacaagtccatatatggccttaaacaatcatcaaggcaatggtatcgcaaactttctgatgcgcttctagatgatggtttccaacaatccaaggctgattataccttgtttactaaaggatcacaagacactttcatcgctctccttgtttacgttgatgatatcatcatcactggacctagcctacatcttctccatcaactacaagaaaatctcaacaacaaattcagcctgaaagctctcggccccttaaaatactttcttggttttgagatagcccgttttaatgaaggactctttctatctcaacgaaagtacactattccgttacttgaagacacgggatacatcggtagtaaacctaccaaaacacccatggatcctagattaaagctcgatgatgagcaaggagaacctcttgataacccatcttcatatcgacaattgattggccgacttctctacttgacattgtctagacccgacatcacctatgctgtcaacaatcttagtcagttcatggctaagccacgtactcctcatctacaggctgttcaccatctgatccgataccttaaaggtagtcccggctagggccttctctataccacaaagtcctctttacaccttagaggtt

SEQ ID NO: 232587 - DNA, 614 bp, Cannabis indica
gcattaaactatatgagacctaatacttacttagactaataataaatattaacacgttagaaggatatttaagcactattaatgccttttaatattttttcataattttagagtaacttagcttatgttaatagcatagcataccgtaagtaactgactgtaaatcttggttgagagttgagaatgagagtagtggtggtgagtagaaaaatgagcttttaagcttataatataatataagtaatgcttcggaaagtgaggttacaaaaaataaatcttaaatgaactgtggtatttatagacttcacatataagtcgtatattcctatttcctataggaattaattaaaaatttaaatttaaatatgaaagtagtgaaaagataagttattctttttttatgttttattaatttattttagatacaaaagtgttttgaggggttataatagaattttggtatgtattaatataatatttttttcttcttcttcaaagttgttcaattttcctcatccaaaatactaataatatatattattattatatagtatattattttggatagcatatccagaaaaaaagctcaacctacccaagcaattttcagcatt

SEQ ID NO: 232588 - DNA, 1891 bp, Cannabis indica
gtaacaggaggaggaatgcctgttagcaagatatcgtcaagatcatgcccgatgactgttgggagaacctgagatttccaagataaaaaattagaacgatcaagtttgatggttaaagtggaagaaagagaatgtgagaagggattccaagaggaattctgtgaattgctgtgggcgccggctgcctgagtaaggtccggggaagccatgtgagcatgagcaggatcagtggacgtggactccattggagacgtaggtcaaggcgactgataccatgtagtagaacagaaaagcagagaaaataaaagaacagagaaacagaaaagtgaatatgaattccttgctttattgaatagactaatccagtatttatacaaagagatagacaaagaaagaagaaaacagataacagaaaaaccagaaagttagttacaagacaccaactaactgttttaacaacttgacataaccacaattagttatctgttacaccacagaacataaaagatatccttgttctgccaccaaaccaaaaaataagatctggaagaccaagaaaaagaagatttatagttgattggtatacaaaaaaacagaacaggtgcagcaaatgtggtcaacacggtcacaaccgaaagacatgcaacaatcaagcaataaaatagatacagctgaattaattgaattgtttaagtctctatgagaatttacacaggatgatatgttatatttgatagattgctactaattggcaaagtttaaatagtttgctagttgttgcataatagtttcaggacagttttgacacttgttaatgatttattacgaaaagaatttcaatataacaatttttaaaaagtcagatatgaatttagataagttgtataataacgagaagaaagaagttgcataacagtaaggaatacattgaggtaacatgacacaaattgaattacaagtatgttgaacactaaaattagtttgtatacagttgcataatagtttctctatagttggacgactttaaaaaaatataattaattgaaaaaacataacattgatgctgatacaaaaacattaaaaaaaaaacatattataatggttaatgtcaaatatcctaaaagtttataactagttcctaaattgaccttactttttcaatttagaagccttggaagacttgctttgcttctcattctcgctattaatactttcatcattttcctttgaacgtacgagaagaagagggcagtaagtcgagtacgataaacttcaatgtcaaaatcagcaggaacatcttttccatggatgaagaactcggcaaatgcagccgccacaaatgctccgcaatcactaataactagaaaggaaaacaaaacagttaaacaactataatacaacataaaataaaattataaacaacaactcactttttctgctgagatggaagaccagcaatctccacaactcttagaggagctttagggtcagaagctaaatcatgaacatgggacatattcttccaaaatccaagcagatcaaaaaacaaagggagtaaaacataataagccttcattgcattcctagctgcagaattcattttggcaatcctcaaataattataaagaaatataatcccctcattcaaatcaagacgaccaaaaccccaatgactttccttcctaagatttatgatgaataggacatgatcggcttaacaccaaggcttagaacatggaattcgcaaatctcgtatataatgcgctatttggtgagcagcatgaatgtgcgacatctttgttttcattgacttggctttgttgaacttgtggtataatgcttgaatggaatcatcaaaaaggcagtcagttgttgcgaaattaagtgtaac

SEQ ID NO: 232589 - DNA, 744 bp, Cannabis indica
gtgcaggaacatatataattgcacgagtaaacttagattcgaatcttaattagctacatattattaatgaaaagtaattgttggggacaaactaaagaaaagtcagaattaatattcctctgtttagtgcctataaatacggatgaaacaatagcacacactcatcacatatagcttaatattatctgctaagctcagtctaaaataaaaatgatgggtctgtttccatgcctctactctctaatcttcattctcttctttcttacttcttcttcttctccattgtgccatccccatgaatcctctgctttgctccactttaaaaactctttctccaacatcaatgacactacctactgttatgattattatcatcttgaaattgttaatcctaatagtacaatttcatgggatataaagagcaaggattgttgcagatggttcaccttgacctttctaactctcgtttcagtggccaagtccctctccaattgtcttacttgtccaacttgcttacacttgacttgagtggcaataatcatttgaaactagagacatctagctggaaaagaactgttgcaaatctaacaatctcagagagttgtttcttagcgaagtcaatatgtcttctacttcacctgattcctttatgaatctctcaacttctttgacatctcttgatcttagttacaatgaattgcaggggaaacttccagaaaatgttctcagtttgccaaaccttca

SEQ ID NO: 232590 - DNA, 1219 bp, Cannabis indica
tagaatttatctcagaaaaatcaatatccttattaagacagtctaaaatagcatttgtaaaatctctacctaaaacaacccaattcttttggtagaaataagcattaaaaccatctaatcccactgtcttatccccagacaattgaaaagcagcctttttaacttcttcagcagtaaaatcctgctcaagaaactccacatcaggagtttccaacccaggatccaaagcatcaaagattacagcagcagcatcaacattacaaccctgggtactaaaaaggtcagaaaagtgagagataactaagttagctatcccctcttgactattaaccacattaccctcattatctttaagatattttatggcattagttttcttcctaagagtggcttgtttatgaaaaaatttagtgtttttatctccagctttaagccacctcaccctagccctttgtttccaatagacttcttctttgtagagaagagcatccagcattgaattcaatctactcagttgaagtctatcagcttgagtaagcacatcttggttttgaagattctctatttcctgagttaattgctgaattctagatttaaaaagatgattatgagtcctattccaatcttttaaatggctaacacagtgggcttgtttatctaaaaaataactaaaatgattggaaggtgaactatgagttagaaaatcattccatttattcttcacaaggtgatagaaatcagggtcctctaaccaactattttcaaaacgaaaccgtctattaacaaaattaatgggcctactaatatcattagtaagaacaagctttaaagcacgatgatcagatccataataacctaaatgatgaagactattttcagggaaaagatcacaccaagattcagatgctactgcccaatctaagcgttcacttatagttttattagtccaagtatatttacaacctacataaggaaggggaaacatagaaaatttattaacaaaatctgagaaaaaagacataacagcctgatcagagacctgacccccaagtttatcagtactaaaaagatagctattaaaatcccccattattaaccaaggcaaatgagaagcattataataaatatcatgcaaaagtttccaagtaaaatgcttctgagaatgaacaggagaaccataaaaacaagtaaaatgccataattcattaacattaaaaca

SEQ ID NO: 232591 - DNA, 1050 bp, Cannabis indica
tttcattttacaaaaataagaaatttgaaaaaagaaagcatcttctctctcaactctctctctctctttcgaacccacctagaaccagctagggttggtgtgtttctctgcaattcaagctagattcagcaggttgttggtggtatcaagctctaggtaagctcttagtaacctcctagtaacctcctccttagtttcttgaattgtaagaaaatgggttttgcatgaagttgtgattttagctactgttgttgctgttagtgtttgatattattttttgagatttgtttatatttagatatgttgatttgagcatgttttgatagctagttttttgtttgagcaagctttgagttttagaactcatgcaagcttggctctttaatgatgtttttcgattctgagcttgggtagttattttattgcttggaatatatctttttggggtataatatgcaggtctggaaggtttggcaaaatttggaatcgatttggttaggttttggaatttttgggatttttggtataaaccggctaaccagttttacaggacttataaaacaggttacccggatttgctgctgggttccccaaaaaattcgtgttgtcgattcgtgctagtttcagagctggttaattccctgctagtttagggtatttccatgttaagttatagtagataggtttttggttaaaacctaagttcccagtcgtgatttagagtgtcacttattcgtgttgttatcgatgtgatttaggagcctgtaattcgctgagcagttgttccactcaggttggccaacacacctaaattcagaatcaaggtaagattagtataatgtcatgcatatgttattacatgtttggaatacatgttagtattgcctgttagaatacattgatagcagtaatactatacttagaattgtactgattactaatatatgtatgttggttgaaatactgatcgatgatgtcacatcaataagactagagtatgactagcatattgagtataggttgacattatggtcgatagtattgtcttat

SEQ ID NO: 232592 - DNA, 1002 bp, Cannabis indica
caacttttttgaaaattctcgccagggcctaattgtgattaaccgacttccaagcattggccaccaccagattgcttctagggtcccgagtccatccttcctcaaatttaaagaaccttttaaccttggtcgccggaccatctgatagaaggcataagggcctatggtcagaattactagtctgggttgagcaaaggatagccctagggaataagttcagccaggctccattgactaaacctttatccaaagcagatttcacatgaagcctcccagaccgatggttatcccaggtcaagttgtccccttgaattgacataataataagacctctggtgtccataagattagagatgatcgggataaaagggtcacggccagacgagccttcccttttagaggcattaagaacaaaatttgtgtcccccaagataagccaaggccccccaaatctatcaccaattttcaagaactcagaccagaattttttcttagcatgaaggtatgggggaccataaacacacgaaaggaaccaagggtgggaagcgggatccgaatacactatccccgagatatgattacaagaacacgaaatacattcaaaaataaacccaaccttccaagccaatataataccacccgcattgcctctagacgaacacaaatattataataaaaatggagggacttaagaatacgtaccagaggattagcatccaccttaagctcggtaagaaagagaaaatcaggagctcgagaccggatgagggactttaattcctgaactgtagaggtatgccctaaccctctacagttccaagcaatacctctcatggctcctatggaggagattccacattctcctccacaggggtgtgagagtaagcagacccactcgaaacagcatcatcaatcacaaatgaaccaatcaagggattcttcaaaataccagagcggcttggagagttagaactatcctcagaaggctcatcaagtaccata

SEQ ID NO: 232593 - DNA, 604 bp, Cannabis indica
actaccactttattcgagaacatgtttaacgcctgtctcatgccttcactccatcatctgaacaacttgcagattgtttaaccaaagcattagtcacctctcgttttcaggagcttcataacaaactcattgtctccccagcccagtgagtttgaggggcaatgttaaatgataattaattttgttaactaagtttgttaagcttgttttattttaactttacagctatatcttgctttttgagtcctctatttgtactctatataagaccctcctttatcgtgcttgttctttcgaggaaaatacgatacacactcttaaatcctctatcatcatcaaactgcccacatcgcacaaactgtctggactgcaccacacttcaaaaaaatacagtttaaaatcctttgcagtgtagttgtggtttgcacttttaccaaaccgcgcggtgcaatatggtttgcaattttaaatttaataattgtatttcaaaccgcactacattatatattacaaatttttttgtattgttaaaactttattaaattggtttggaatttcattataatgtttaataatgatgatagtgtaaatcgctcaaactgca

SEQ ID NO: 232594 - DNA, 816 bp, Cannabis indica
ttaatttttttttatataaatcatcttctgcttctccatctctattgccaaaaaaaagcttcaaaatgggtcataaatcatttgctaacaaggctaaagggaaacgcccagtcatcgacgatgatgactctgattttgctcccctcgtggctaaaggtggtcgtcgtccagtgaagaagaagtcgaaggtgtctttgcctgaaaataatttcaacttcaacagccagaagggaaagaagaagtcaactttaagacaactgtgatgaaactataatgcaatagttatatctgttgcgagccaactaatataatactacaaaacaattactaattccagatatttaatacaaaagaatattacaacaatcgtatttatctattcagatcgcgtatttgataattttgagccttatttttataatattgtgatattgtagcaaaaccattattcaactaacgtgcaacttaattgcaactaaaaatgttaaatgtgaatgtatatctataagaaattatttatcagtgtttttttcgtcactggtcgataattatttgtaccttaatagcaatatgtggagaaacaactgttagcaaaatatttatgcaaatataatgcaactgttatgaaacattaaaaattagaatagtgtttctacgtacgtaactctatttacatgtctattcgtgatttaatataaacaaattcaccattggaaatttaaaaaacaacaaaaatgcactgggataaacatttaactataatattaatgtaatttttttttttttggattatacttgagttgaattgtttgggaa

SEQ ID NO: 232595 - DNA, 1706 bp, Cannabis indica
cttactctattctcttggctctagaagagaagatctatacggcaacacagtcaatagtgtcgtattacaaacctcttcccttcaaagagtaagggaagagggacatgaaaaaattattgccaccacaacaattacggtcatgacactaatgagtgtaatcaattttgggacgaaatagagtttctcatcagacagaaacatgctactctttagtggtatgtatgacctgaagctccagctggaggtaatgtacctctccagcctgcgccaattgtaggcaggatagagatcatgattggtggccctcacctagctggaaattcaaggaaggccttagaaaggtatgcaagatcatttcaacatgaaccaagagccaaagtcctagaggttgcagaacgtcctccaaagtcccaaagctacagatgtgaacctattaccttcgaagaatcagattccttttatggtagatacgccacaatgaccctttagttgttgaggtgcaaatagctaatatgatggtggctagggtgatgatcaacgatggaaaattatcaaaaaccttgttcaaacaagccttaatcataatgggtttgaccttaaaagacttgaaaccatgcgagcaactgtgtatgggtttagcggagccgacattggttatgtggcaagatcaaagtgccacgcactatcggcattgccctatagcagaccaccatcatggccgcgctcatagtggtggatgtgaagtctccatactacgtgatgcctggaaggcccgctctctacgaccttcgagccatctcctcagtgtaccatttatccatcaagttctgaatggtgcctagtatcgattgtctccttggtaatcaaggaacaaccgacgagttttataacgcatcattatcacttgccaagaagaccttgtctatagctatggcttcgaaggggacaaacaagacctcctctactgccatggcaccagggggacgagcaatgcctctcccgcaaaagccgaagagatgaagaagacctctagagataaaaataaagagaagacagagacgacagctgaagccacttgaacgtgcacccaagatgaggacgaaattgacctccattttaaggaaatcaactccgaagttgatctgattgaggaactcaaagaacttcccctcaacacatcagtcccgactatggttttcaagattggatcaaacttgatagaggtcttgagcgagatgctcatggcttgcctcaaaataaatgaagacattttttagggtcgcatgaagacatgatcgggatcgacccccatgttatttatcatgccctcaacatagacaaattgaactttaagcatgtataacagaaacacaggatccttgacaaagagcgttccaaagctctcaaggaagaagtttaaagactaaggtaggaaaacttcattagggaagctttctacccagttttggtatccaaccctactctaatgcctaaatcgaatggaaagtggagaacttacgtaaacttgactcctaaaccaagtatgcgctaaagattgtttcccactaccatgaattgatcaactagtggacgtgatagtcgaccatgaactcctcacattcatgaatacttataatggctacaaacaaaatcaacaatgcacgccccatatgaagagcatattagtttccgaactgacatcaggc

SEQ ID NO: 232596 - DNA, 1659 bp, Cannabis indica
tttattgattttaccaacatatcatcgacgtaaacctccacgtttcgccctatttggtttgcaaacattttgtttaccaattgctgatacgttgcccaagcgttctttagttcgaacagcatgactttataacaatagagtcccatgttggttacgaagcttgtatgttcttgatctgggacgtacatctttatctggttatatccagaatatgcgtccataaatgacatgagctcgtgcccagcagttgcatctattaactagtcgatccggggaagtgggaaaaatcttttagacacgctttattcagatcaaagaagtcaatacaagttcttcaacttccgttagatttcgggacgagaacaggattggctatccacgagggataaaacacctcacgtataaaattattgactaacaactcgtcaacaacttgttttagtgccccttacctctcggaatccaggggcctccttttttgtctctttgtcgggtagtttggatcaacatttaagtgatggcagataatcttagggtcgatccctatcatatccccatgactccaggtaaattgatctcggttcgccttcaaaaagcttattagttgctatttgagctgctcatccaggttcttcccaatgtatacacattttaagggattttctgggtcgagaataacctcttccaattcttcgattggttttagcaagtttcattcattttgagagattaccggcgcacatcgagcaattttacaccccgtgagtatgccactttgttcataactctgcaacaaactagagaaaccttcatcacaaagaataaacagatacagtgataaaggattgccttggcgcaaccctctttgaccaacaatgggccccaactccttcccaccatgtgaaatggtataggaaacagaacatacacattgcaaaactaaattaatccaacgaccatcaaagcccatccttaccatcatagctcggagataaccccactcaagcttgtcataggctttactaacatctagtttgagtgcaatataaccatctctccctcttcatttcctctttaagtgatgcataatctcataagcaatcatgatgttgcccgagatcaaccggccttgcaaaaacactctttgagttatctctatttataaatttttatatctacatataatcctgaaacaaaaataagtgaggtgacttcatctctttctaattttctactttattttgtagtttttctataattttttcatttaataatattaagaaaaaatttgtaatatctgaattaaatatacactcaaacctcacttatacagttaactaaattaatatcctatacatattctacttccatcaaaattaatgaaaaatttattaactactatttatatttttttttatctattgagttcctacaattttttcattctcctaatttttattttttgattaattaatataattaataaatactttataattgctaatcattcaaagtgatatgtatataaatagagaaaatcatactgaatattggtcaatattattggatcaattaacaacacaaattaattttatattaagagtaagtattcttgaaatactattttttatatgttatatatgtaaatatttattatat

SEQ ID NO: 232597 - DNA, 1504 bp, Cannabis indica
tacttttattttttttttaattaaaaactgaaaataaaagtgtgttatgtaaattttatttttattttcattttttaattttatttatgtttggttcaggttcgaagttgggatcgggggccgggttcgggttcagggttggggctagggtccgggttcgggttggggctagggtccgtccgggttccaaagtttaggttagagtcagaatccaaatattgattaagaaaataataaattgtttaaaaaagtttgaaaaagtagtgatttttttttttgttttcaaaatttttaaaattttaattctcaattaaaaaattgcacaatgaaaatagatttatagaacatgattttagaaaatatttcacttttgtaattttcaaaacaaaatattaattaaaaaagtgttgccaaatgcaccataaatttgtagaaaagtggacataaatagagttattttttatcttggtgagtttgacaatgttcataagctagaattgagcaaaaggacaaaaattggaaaaattaacgagttatgggaccatggctccgaaatctgaaaccatggcactagaagagacaaaatagtatgaatggcccaagagctgcgactccactataggaagttgcactcttggagggaatgttgaaaaaaaaagggtaaaagctcgcgtgaaaaaaggattgttgggtggtggagctgcgactctagtgtagggggctggggctccgaagcacattatctatctttttttagttttaaatctcaatctttttagtatcttctagaaaactttgttagcttatataaatacattatttttagtatgttttttagtgctctaattaaactcaaaaactcttaattaacaactacttagtatttttcattaggggagttgtttaacgcccaaaaatgtgacttctactagcggtaattgtaatataaatcaagcgatcaataaaaagatgagaaaaaaagtaaagaaaaattttgctataatttttctacactaaaaattacacaccaaaacaataaaaatgagctctaatttataatctcaaaagaattaaaatgcaaaatgaaataagttaaggggtacaaagagaaaacagcaacaataatagtagtgataataataatttgatactattaagatatatgtatgtttattattgatgttgattgatcccaattaaaactattttgtatgtgatattgatatatcactctattgggagcatggggttggcgtgtggagaagcccaactgtaggcgcttatgtgggctgatattgttagaatatattttaccagaatttaggtttattaataagtatgtttttaacatcctaaatatgaatttctaaagcaatgaaacttaattaatacatataaagtatgaggaactttacattgattgaagcggaattaaatgactcatttcactcagatctctaactattgttcatttttgttgtagagtataattaagatttgagcc

SEQ ID NO: 232598 - DNA, 863 bp, Cannabis indica
aattgttacataaaaaaaaaagactaaaactcctccacatgctgaaaagattcgggctctaataaatgcaaattctattacatatatataggaaaattttatactaaaaacatatatatattttttttttaatttttgatatcattctagcctttagggttattcttattttcaatatttagaaaatttatgtattattaatttatatatgtgtatatataaattgtagtataatagacatttcacaagtttttaaatttttgtgaatataatttatagtgtgaaagacaaaatatttagttgtacatgtgcatgtcggctttcgtattctgcaaaattttgtacttttagttcgcaataaaatttgtgattaaaaagtccgtgactaaatgtattagtcataaaaattacaatttgttgtaactaaacgtataagttgtatctaaatactatgttttagtcacaaagtaatttttatttgtactaaaattcacatttagtcacacaaaatttatgttgtgacattaaaaaattgttactaaaaatagctatttaattttgtaatgacagttttatgaaaacttgtaaactgtttgatacaactgcaatgtaaattatcgtattaaaaaaattggatgtagtttcaaaaaatacctcaaaatcagagatgtttgaaatgcaccccttaatatgaatataccgatacacttattttgtgtttttgatattcaactagttttaatcttattccttttggaggaggttccaatggttacatttttattgtaaccatcatggttacattttttgtagccattggattactattaaatagttgtgattaatttgaaaattaaataaaa

SEQ ID NO: 232599 - DNA, 1137 bp, Cannabis indica
ttcctttctcaaacccactaaaatccctgacagaccatcatcctttaatcatgcgatcagaaagtttggttgtttgcatggcataaatcggaagcgataggccaacagatttaatcagggtcgcacgccctgccttggaaagtgtctttgctttccatctctgcaatttagatgtaagtctatcaaggatgcaattgaaatccgcatccttttgtcttgatctgaatagaggcatacccagatatttaatgacaccctcctgagagccaatacccaatacttccttaatgcctcttctcatcccattgggagtattcttgctgaagaagattgacgttttgagcttgttcacttgttgaacagaccaggagcaaaacttttccagacaattccaaaagcatttggcttcattcagattggcctgtccaaccagaattaagtcatcaacaaaaaataagtgcgttaggaccgaccctcccctgattaactttatgcccttaaagtcgcccttcctcaggccctcttccaatagtctagatagtatttcagcacaaatgaagaggtagggagaaagagggtcaccttggcgaagcccacaagagggcataatctttcccaccattccaccgttaaggcatacattcagtgaggtggtggagatgcactgagaaacccaattacgaaatttctgggggaaaccaaaccaatcaagagcatgatcaatggacttccagtttaacctatcataagctttaacaagatcaatttttattgcaaaatatccttcttttccttttttcccgttaaaggagtggattatctcttgcacaatcacattgttatcctgtatattctaacccaggacaaaggccgcttgtgtagggcatattatcgaaggaaggataggtttaattctatttgcaactattttggatataaccttgtacaacacattacacaaagatataggcctgaaatggttaggtcttttcggattctaaatttttgggatgagaaccacatttgtcgagttaatacctctatgcattatgccagattcaaagaagtcggatatcgcattgcagaagtcatcaccaacagactcccagtaatgtttgaaaaagaggactgacatac

SEQ ID NO: 232600 - DNA, 756 bp, Cannabis indica
tgctgtggactcggtggatgccacgaccctatgcacacatgcataagtttattttttccaagttttgccttgttttgttttgatttcttttcttttgagtttaacttttggttttcatccaaacaaagcctatgtggccatgaaagccatagttttccgttgcctgtggacttgatggatgccacaaccctatgaacacatgggcgcctacagaccatgcagaagattttttttcgaccaaatttggctttgttttgtattgttttcttattttcttgagcttaacttttggtatgaatccaaacaaatgctatgtggcaatgcaagccacgacttttcattgcccgtggactcggtggatgccacgatcctattcacacatgggcgccaacagtccatgcaaagatcttttttgaccaaattttgctttgttttgttttgttttcttattttcttgagtttaaattttttttacatcaaaaaagtcatgtgttgccatgcaattcccaattttttgtttctttggactcggtggatgccacgaccctatgcacacatgaacacctacagaccatggagaagattttttcgactaagtttgactttgttttgttttcttggatttaacttgtggtttttatccaaacaaatcctatgtggccatgcaagcaacgattttccgttgcttgtggactcgatggataccacgaccttatgcacacatgggcgccagaggtccatgcaaaagatcttttt

SEQ ID NO: 232601 - DNA, 1213 bp, Cannabis indica
tctgggacccagagagaactagactcatggtatgtccaatctatacctggaaggctactcgaagggcctatcatggacactgactgcttaaaagaagtcagacgtctaccaagaagtgagacccagatcgctctagcgatagttatacttttttgacacaggatcagatcttgtcccatgtgtcaatccatgggaatgcgtatgccccacctctaaacacgcctttttgcctgagggtttgtttaggcatctgtttttttttttaaggtgaacccttttggcgacatgtgtcttgtaccattagtggtcccctatcatccagctgcttctacacacaagcacaaaaccttcttaggggttcaacagttagatattgcatatatttcaccctaatagtgggcttattttgtaaaaaccctaggcaggtcatgggcatgtccatacccgccctttagcctataaatacctgttatctcaaattttgtccacctgacgtggcatgtcaacgtaaaccaagacacagtacatttggaatacatcctttccaatagcaagagagtctcctcacaaggtatggtaaaactgccaactagcaagcgaaaggagttaagcaagccatcaaggagttgtaccaccatgtctggccagctacgaggagtctataggccagccaggatgatcttgtatggcgggccaaggtttgagcacaagatggttggccaaaaggtgagtttcagactaagggagggttcgttcgaccaaggaagcccgacctctacaaggaaaagttgtacaaaggctggcctccacctgcaaaggatggcctctatctacagaggctgtccatcaccaaggctagccatcattaaggctggccatcacaaaggtggccatcacctactaaagtaggccaacacatgcaaagacctgaccaactcttgaaaaagctggcaggaacatgacctgccagatcctagcaagagcatggtcggccagacctcaacctacaggcattgtatggctggccagcctgcatcctacaggtgcatggccagctagcctttggcttggtaggattttgatgtgcagctctcattcgtggattgttagtcaagtaattaacgaatcgggcctttacaatccacaaaaatagagggaaattaatttttaaggggtaatttagtcatttatatttattaattaataatgtgaa

SEQ ID NO: 232602 - DNA, 826 bp, Cannabis indica
gtttgcaccatgcagcttgaacacatcttcatttttctctattatttttgtaattgacacgatgtagccagcctggccaaacactcttagtttttaaatcttgtcgttgtggtatggaaagaataaaagtttgctacggtttcttttcaactggtcctagcaataaggttttagaggctgaaacaatataacttttggaaaagtatttggggcttaggtttaggcagtatttttctctttgatttggaaactcatctacttctatgtatgctcttaaattggactgaatcttatgattgagtgattggaaatcggtttgtatatttcatgttgggtatacattccaagctactcttttttctaaaccccattgttgaaattcttttagtgagttgcctgtttgaattttatcaatgaaattttgaatggaaatttgcttcaggctgcaaccaaatactttgctcaagctgtaatgaaagtcaagtgatactttatttaagtgaccatgctttgtttcttgtgttcttgtcgcataagcatctcatccaacactgttttttttaaaggaacctaaaagaggtgaacctagatgtggaccgtttcattaaagacatggaatcagtgatgaagcaacaaggttttgaaaacattgctagtgatgatgatattgaagaaggatcctcatctgaccttgattttggtatgttttgcaacatatatattaatggaataagcagttttgtttaatgaactgtttttataggtgcaaatatctcttaaagcaccctgctattgtctccctagttgttttcagaaacaacctctt

SEQ ID NO: 232603 - DNA, 1142 bp, Cannabis indica
atttaaattttcaatttaattttattaatgcttattatatataatttatacttaatttaattatattactaataaaataatatatatagaaatactataaattatgctaaaacaagaaattgtaaagctggaaaataccaagaccctatggcatcagttttttcataacaaccgaccccaaagggtccctatggtgaacatttaggcgaatagtattgtggcccttcagttgcaaggtacagagacatgcaatgcgcttactacctcgaatacggaagtcgtacgtacggagggtatgatcgaaaccgttgagggaatttcaaaaaacatcactgggggtgagagacctggcgcgccacctggtattctaaggtcaggggacgaagatcatcctatgaatcgtttgggaaagaatccgaatgatgataggattattgtttgtatgatggcccatgtgggcccagatgcggcccaagttgttgaaagaccacaccatgagatctgccaatctcaaactccacataatcaccctgagcctttaattatctctgggcctactggaaatgtggatgagataataaatataatgaatgggcctatactcaatgagggagtgggtccaacagacaaagatgagccttggtttcatactaaggtttcaccttctatgttgggctctaaatcttagaaaagaaaagccacgggtagtgtgacccccattgtctctctgagacctaaattcttatctccatctcttaacccaaaggatcaggtctcatctctaagcaagatcacagttgctcccttcaatcttggaaaggagtcgcctaagaaggattgttctggttccaggaagtcgagaggctgaaaagcgtttaacaagaataagcttatcgaagataaggctcataccgatactgtcaataatgagttaggtattaagtttatttgcaatccttctgagaatgagaatcaacttttaaaagttagaattgagcaaaatttttaagtgggcaaggaggcggcccttatcaagccccctcaatcccaatgagagctctttcttggaatttccgcggtcttgctagaccggcggaaatccaagctctaaaggattgggtgaagaagataatgttagactg

SEQ ID NO: 232604 - DNA, 1182 bp, Cannabis indica
gggttgggtttgttgggccacaaaaagtctaaccaaattccaacccatactatgcaggttgataacttttgcacctaatacaattttggcccataaaaaaataaactgatctgcctatttatgggttggccggctcagtccaacccatgcacagccctagttacgctcacacgcctttttatgtctatgtgcatagacctacatgctatactaacacgtctatgtgtaataagaccttagaatggttcatctcggttctagctaccgagttcaacttgattatgccttgaacgcataactctaaatttcattatacacatatatttaacatggaatagcatatacacattaataattacctggataataaccctaggccattaaaccgctcatgttagggtaataacccttatcccagtttctgattactcacatatatcatttttaatataagcgccaccacgcataactctacgtgctaaccactatcttacctgatgtcccacaaacgtggagattccaaattctcaggtgctcctgaccaagtgccggtaatgctagtcacaaattctgggattcacaaatatagggttaatcctgaattccacttttacataatataaaattggcattcaaaatacagatattcacatagagctcggaacgagctttccaacaatatttagaactcccaaaacgaagtccgtatctccaagttatgaatattcgaatatcgcgttcgaatctgcacagaaacaagggggcgggtcgcagcactccccacaaggggctgcgacacttgggcttaaaacccaggatttcaacaggggcaggctacggtgcccaaaagctgggtcgcggcccctaggctccaaacccagagaaacccaaattccagcttcaaaaaaccatgcataaaacacatcaaatcatgtccaaaacttaaacaaactcccaaaacataatttagagttatccataattatacagagaatagaacatacatttaaagctcaaaattcagcatacaaacaccataaattcaaatttggtcaacattcaaagtaaagctccatactagagcgaaattcctttcaagagcttgaacaaccaagagtaatgaatttcaaaatcactcacttgcacgtaccctaaaataagaatctaaactcaaattttaat

SEQ ID NO: 232605 - DNA, 2404 bp, Cannabis indica
tgaccctgagacacaatctcccaccagaatcaggcatcttctcgcatcatgtagatagcacatctgactcgatcattattctcaatccgcatgaaattaaaaatggatgttatcatactcatccattgctccgctttgagtggatcaactccaccctcgaacactgacgggttctgcttcctgaaccgctcatacaacggctccaagcgattcttaacttcctgtggcactaccagaggtgccggaggatcaggattgggatttggagcaggttgagctccctgctccctcaactctcgaatttgctcaccttgttgttggatggtgtcctgcaacgcggtatataagtcttcccaattcggtggtggtggattctcaccctcacctctaacctcgagcccatcaagctcgcggttacctctaccagaccgccttaggtgcatatacacctgtggtaacattctaagaaatgacaatactaataagtatttccaaacatctcaaacttttcacacttttctaacaactagcttatttcaaatagacgtacaattaggtaattaacaaataatctaataattaaaacatactgaaccatgagtcaaacgaatcttcgcaaccaatgtacatatcaaaccagtcttcaggatatttaaacctttgttgctcttataccatgtgccctgtccaacagggacgccaagtgtgtacttttataagttctcttttactaatttatataattataccaaaaagtgtggttaattaaaatttggcaatttaaaacaaacacataaaatttctttttataaaagataagtactattaattacaggttcccctattttcaaaatatttataaaacagatcaacagtgcttttacaacattggtttatatttcaaaatataatctaaatggaacaccctgtcactgggttatggcactacgactgatatgtacattgctgctgtgacttcaaactcatggctgctcaaccttagccttccctttacccgcaccatttagcacccgtgagtcacagagacttagcaagaaaagtgaataaatcaataataaatataacattcattttattcaatctcatattaacatgcttaaacatttacacaatatggtaaacacacaatcttggtagttcataaagtacccttaccactcgtcaaccacgagttgtatatgtcactattgttgctcgataaagaaaacgataataataaacctatccgcaatttcaggagtaattactcataacgctaatgactgtttccaaccgtcggtcataatcgaggcatagcacacattatataagttctcgatcataatcgagactacaaccacacaattgttaatcacttaaatctaagtgatgcataacacttttttttaccttagtctagagctaaagtgcgtaggccgacatgagtggacacaaagctgggcaatcccggtcctatgtcacgacaacaaaaactcaataaataccttaaaccaaaactccggaataaaaccctaatctgaaaacaaacaagaacctaacttgtaataactccaaaataggttttacaacacttaaacaacctaaaacaaatacaaagcatcaccccaagccaaaacgaaacctgaagaaaacctgagaattccccctgcagggcaaccgatcgaccggttctagtgcagtagaaccaaccggtcgaccggttctggcaaactaaaagaccttgtgctttcttcctcaatttcaacctaaacctcctccatacctaatcaaactttccagaacagtgtactatcacaaatataacatatttcaagcaccaatttacagcaattcaaccattaaatcaaaattacatattcaagtgaattaaaacccttttaatcttcatttaatttagtcgaaactaaacaactacaaatttaggttaatagaacctaattaacctaaatatcaacacctaaaacaaaccctaaattcaatcaaaacatacagctctaaatccttaaagaaaaatcaacctttcttactgaaaacgtaagtaattcaagaataaagtttcaagatcttaccttaatgtctaaacaagcttctaccccttccaatctgatccaagtatgtacatcctaataagtatgtttagaaaaatcaacatttcttactaacaagtatgtttcattaacatcctaatatgaatttctaaaacaatgaaattaaacacatataaagtttagaaaaccttacattgggtgaaacagaataatatgtctccttccactcagatctctaacccttgtatcccgtctttcgcagagtatcaccaagatcagtgcccgaatgtccttctcttcaatttagattcttcacaatcttccacactatgatt

SEQ ID NO: 232606 - DNA, 908 bp, Cannabis indica
aaataatttccaacagatacgtcgggtttgtgtagcactcttttttagcgaaaataaagtcattactgcaatagtatgacattgggagtaaggcctgagttttgttgctaagatgataagagcccacgtcaattttttaatcatgggatatctcccttctgcgccagtgaaagtcttgctaatgtagtaaattgggagttgcattttttcttgctctcaaattagtaccgagctagctgcgtgttttgacaaggataagtagacaagcaacatttgtccttgttcaggctttgataggaccggtggtgagcttaagtattcctttaaggttttgaatgcatttgacattttgagtcccgatgaaatttttggtttcctcttagtagatcgtaaaacagtaggcttttgccggatagttttgaagtgaaatggctgagggttgtgatctttcctatcaacttttgaatatcttgtatggtctttggttgagccgttgcttggaaagcctttatttgttcttggtggacctctactcctcgtcgggttaccaagtgacccaaaaatttcccaaatttgattgcgaaggcatactttgacagattgagtttcatggagtaaactaggaggatttggaaacattctcagagatgtttgacgtggtttgagttgtccctggattttactagcatatcatcaatgaaggctttcattgttaatcctaaatgttgggagaatattctgttgatcattcgctggttataagttgctccagcatttttgagtctgaatggaataaccttgtagcagtaagttcttctttcggtgacgaaagatgtcttttctcaatcgggtgtatgcatcataatctggttgtaactcgaaaaagcatccatgaaactcatcaactc

SEQ ID NO: 232607 - DNA, 1632 bp, Cannabis indica
aaatgtcaggttttgacatgtccctaaccaaaaagggagagaatctattgcccgcatcaacccaagcacattcagggaatttcctcacacccaagtctctcatgaacaccctcacctctgcaagcttgttccgattcccagcaacaacatacatatttacaattaatatagtagcctaaattttcagttctcatttccagtagcttctcagctctccattcccttatttttacattcccatggattcgataatctttaattaaagggattcacatggaaccagttggcctgtagttgtgtggaatccttatgatggcctcctttgcttgctttattagactagccttcccataaagataaaccatgcaagcatagtgctccaaatggggacatatatataaaaaaaacactagacatcttctcaaatagcagtttaccttgcatcacaagaatagcatggctacatgctgatggaatagcaaccatagttacatgatcaggtttgatcccacatctggccatctctccatatatcttcaaagcatcttagcactctccctgcatcccataagcagacatcataatagtataggttactttgtctctcttggtcaatgaatcaaatactttttagccttgaaaatcttgcctaaccttgcatacatctccacaattacattccactaacaacaaataattcccaaattctttccacttaataatgtaacaatggaactcctttccatgttggagatttcctactcggggacagagtgggagaacttgcaattgtgatataatttggttcaaatctcgacagcatcatttctctaaataagaatgaggcttcctcaactcgatccatatgagtataattataaatcaaagaattccaagtaattatatgtttatcttctatcagttgaaatatagtatatgcatgcccaaggtcttcacacctgaaatacatagcataattagtgcattttttaaattttcaaactcataaataccattgtaaactgcaaaactacgaacttccttccccaacataacgacacccatgtgggaacaagcattcaagccaataatcaaccccactaagtccaaaaaattaccactagatctcacttgagaaagaaacctgagtgctcccatgaaatttcctgtatgcacacaccctccaccaacggtgttccaagtgatgacatttacttcattactctccatccacatgctttcaagcaattaaaatgcttcaaaccacattcccctagaggcatacacagagttcattgcattccaagatactgcatccctctcgggcattttatcaaacaaatgacgagcaatgtctataagcccaaacttcccatacatagcaaccaatgcattgtgcacaaacaagctccacttcaaagagcgatgctcaatggacatgtgtacctctcttctgaaaactatgtccatctttttgcctacaaccctttagcacaatcgagtaagtgaaattgtctggtctagtccctatatttaccatttgttgtaagcagatagagcctcaccaaatgcccattttttacgattgagatatgagcagatttcaaagacaaaggatacaatatcttagaa

SEQ ID NO: 232608 - DNA, 1049 bp, Cannabis indica
tagataataaaactttaatattagaaaagaaacttatattttctttaatgcgtattaagtactgatgtttttgtattctgtttttaccagttggtcaatagtggcgggacagaagaaccttcttcaacatagataatctactcaacttgccttagtataatggtgttattggagaagtgtttggagatcattggaacttgagtgaaagctttgcttgtcttatgattcttgtgtcactcgtcttaatataaacttttttttatcaattgaaaatagttccaatttaatgagaataatctcgattgatttccaattttgaacatggaaaaatgcttaaagtattgcctagaatataatattgtatgttatgaggcctacttggattattcttacttgatcaactaatttgagtagagattatcactaatcttcttggacaatcacaccaatgctcacattgcatggacaatcacaccaatgcccacatagcaatgattctttttgattgtgacattgttgttcattttaacttaaacccaccatgtaattgatatagagtataaatacttaatattagtaaaattataatttcagtgtcaattatcaatttaattttctacaattttagttaagtttaattttatttaatttgttactttaaataaaaaatttaaaaataaaagttattcaaagttttagtacatattaatgagaccatattacatttttattggcaatgtatttttgctcaaacaatgtgggatatcttttactggttggttggagcatattttccaacaatttgataaagatataaggtggtggaaagtggctatgctttgttgggcaatataggtagggagctcgtaattcattgatttggaagcaaaagtaaattatcatgatagcaataattactcttgaataatgggtaagtgctcaagatcaacatgttatctccatgatctcgtttgtgctagggatggtcctgagagtggatgctactaattgaagacaccttcaaagtaaaatgttgatgttgcattatt

SEQ ID NO: 232609 - DNA, 1530 bp, Cannabis indica
catgtgttgtcttttcaggtgtgttctgacaggttggcgtggtttagtcataaccgggtgtttcgggccgaactgggttcgggcccgaaatgtaatttgaattgaattatttggcatttaatttaataataagatatctgaattttatttggaattagatatgtgtgatatgacaactatgccattgtatgtgagattatgtgggaattggcccttggggcattttggtcttttgaccttattcaatttattctagtaaaagctgaatttgagttaatgagataaaaattctggtatttccttccccatacccgacccctcactctctcaaaccctctccttgttctagctttgatttttgatgggaattgcttgatttggagcttggagtttgtggattattgagcttgaaagtgatggaagttttagctaaacttgaggtagctttttcagattttaattttgacttgctgaattttcttgatgatggaacatgattttttgttgttgaaaagtatatgttgcatgaggtgttattctctttgtagtttgagtttgttatgtttgaattcttggtaagtgattgtttgagctctaggtaagaattctagggttttctcttatcttgaactcaggttattgttggtaatttatggttgaaaaattgatggagttgttgggtttgaagctcttgtttaagagcttgaatatttgcaagtttggaacttgatttttatgcttttgtgcaatctgaattttgagtttaatataggatattgatgcatgaaatatatttatttgagtatctagtaattgatttcaaccctatttgttaatttgaaagtttgtttatgttttgggttgatttggttgggttttgggagctgaaattcgtgaagcttgctggtttttctgggttttcaacccaggtgccgcggcatggtctgggcatgccgcggcccgtctcctttttggggaacttgggattttatcccaggtgccgcggcatggcttgggcatgccacgacccgccctcgatttccaggacaatttgaatgtaaactttggaaatgcatatcttttgattgtgaagttcgatttgtgagttcgttatactgttgaaaagctcgtttcgagctctgtatgattatctgaattttaaatgccataaaaatattttatgagtttgaaatcagggattaaccctacttgtggaatcacggattgtgtgactagtattatcggcacctgaacaggaacactcggggattcagaatctctgctattgcgggacaacacgtaagacagtggttagcacgtagagtatgcgtagtggcgcttatattaaaagtgatatgtatgattatttagtaatcgggattagggttattaccctaataggaacagtttggtagcctaaggttattaccctagtgatatatgtgtataaatgtcatgccatgtgaaatgtaatgagattcaaggattatgcgcttaaggcataattaggttggactcggtaatcataac

SEQ ID NO: 232610 - DNA, 676 bp, Cannabis indica
tttccgcataacgcgattcgacctcatcaatttcaagaagaatatccgcctccaacttcaaattggactccgagggcgtccgccgttgcacttccaacaagagattattgagggtcttaagtttctctttacacatcccgaaatgcgttttattccattttgccaagcaccgtcgagtattgtccaaacgggcaactagttcgaaactcctgacccccctaacataaatagcccaagcctgttgaataaccgctttacacccctcatccctgctccaggcatcaagatacctgaacggggtatgaaatctctcacgatccaaaaggaggtccaaaaccagaggggcatgatccgaatccttaatggccaaagcgcgcaccccagccttcgggtaagacaccatccactccgggtcacacaaagcacgatcaagcctctccttaatgagatcttgaaagctcctcccattagtccaagtaaaaaggttccccacgcatcccaaatccacaccccccgtggcatccaggagatcattgagatcactaccgtcactctcctccacctcgcggcctccgaacttatcctgttgacccgtgatggtattgagatcacccatcaagagccaaggatggtttaaagccagaacatccatggttctttctgttggaaaatattt

SEQ ID NO: 232611 - DNA, 1144 bp, Cannabis indica
aaggcctgcccgaaagattgcttgtcattacccaaaattgattaaatgatggatgccacctccaatttggagttattttccttcatggatgcatacactaggtataactagatcaaaatacatgtagcagatcaggaatgtaccaatttccaaaccgataaaagggtatattactatctattcatgccctttggactaaaaactgtaggagccacatatcaacacatggtgaaccgaatgttcaagaatttcttagaaaaaaatatggaggtatatgtagatgacacactagccaaatctaaaactagtaaaggtcaattagatgatctcaaaaagtgttttgaagtagtgaggaagtacgagatgaagctcaatcccaagaaatacacttttggtgtcaagtttagaaaatttcttggattcatagtaagccaacaagggatagaaacaaactcagtaaaaatacaagtcttgctagacatgcctccacctaagaaacaaaagtatgtgcaaagctcaacaagaaagatagctactttgagctgattcatctctcaatttaccaataaatgtatcccattttttaacatcctaaagaagagtcaaaagtttaagtggaccaaagaatgcaaagaagtattcaagaaattgaaagaacatatgtgcaatcgccagtcttgtccaaaccagttcacgaggaagatctgtacttatacctagccatctctgagaatgtagtcagtgtagccctagtctaagaggatggagaagttcagcacccggtaaattacatcaataagcaggtaataaaggctaaaatctgataccctttaattgaaaagttagatatttgccttttgattgcatcagggaagttgtagtcgtaattttaggcacatacaattaaagtattcacaaaccatccgctatggcaagtctttcagaaactgaaagcctctgagaggctcctcaaatgagtgatggatcttagtcagtttgatatataatatattctccacaatgtgattaaaggacaagccctcacagcctttatgtttgaatacaatgaaacagaagtgatggatgacttaccagaccctgatattcccacttgaaggtatacgttgatggtgcatcaaacgag

SEQ ID NO: 232612 - DNA, 1015 bp, Cannabis indica
aaaattattatgaaaggtgccatgagtacaatggatggaattatcgacacaatctttgtagtgcacccacttatgcctttgattggtctattaaggtcttaaggaaagtcgattatggttggagcaccaaacaagcctcttgagctaccaatttttccattattgttgggtatgtgtatttctcacctttattgtatataggtaaatttaatataccataaaagatgatgtactgtgattattttagtttaattttgttaaagaatgtgattttatgatgatggaggaaggaaaatagtagctggaagttgcactggaggagtgaaagagacacaagcgatgattaattttgcagccaaacaaaacattacatctcatattgaacttattcccattcattatgtcaacactgcgccatagaacgtcttctcaaatctttctttagcttcttcgatttctctattcaaaatctcaatcgtggtctatctttgattttagtatgtttatatcttcctttgaatattgttgcagatacaagtctttgttttggataattaatctatatcttctttattatgctttctagggttgagaattcgcacttcaaaagatattgagtttgcattttatataaaagatagaagaaggaagaaagtattggctccgatgatctccgcaagataggtaatttcaaatgaccttgataagtagaataatgccgaggatttctctaacttgtgtttttttaaattgagtaggttttagctttataacattaaatttgttttcattcacacaatcgttatgaaactaataattttgttgtatttttttcagtttcttgaaattgaatttgtaacaacattcaattatgcattatgtgtaaatattaatttattttggtttcaattctcatttttaattttcctttctgatttgcttgcagatttggtggagctactaaatagaaaaaatgaaaatttttttttttccaatttgtatttgcattaatatt

SEQ ID NO: 232613 - DNA, 933 bp, Cannabis indica
cctttccatctttggagtcactacgccttagtgggttaagaagcttggaaagcattatatgtcatggtggtaataataaactcccaataggctccttcaatcaattgagagaggtgtatgtgaggtttgtggtagattaaagaatttgttccttttgagtgtggccaaactacttcatcagattaagtacaagaatgtgagatgatagaagagatcatagtgagagaagatggtgatgaagttggccataacattgatggtgatgatgatcactcttcttctttgcaattacgttccttgcatttagagtatttaccaaagttggtccaattctattgctccaaccacagggcagttggggagtcagatcattcaaagcctttgttcagtgaaacggtacaacattaattcatctctttatatatatttggtagtacacttcttttcatattaccaataattagtgaaaggaataaatgtcactagctattactaccatatcgaacattttttgttcttttcatgaaaatatatacaaacaatgatatatatagcagtttaatggaatcaatagattaatttattaatttgtataatacagtttttgttgatatgtaaatcatgggtagatttattattgtcatcttatttatactctttttattcaattattacaattcatatatttgcaggtttgttttcctaacttggaggatttaaccattaagaaaatggacatagaaatgttatggccagaacagcttatgttatcatcaacatcaagtttttacatgcaaaacttaacaagcttaaaagtgggaagctgccataatttaaagtatctattcttttcctctgttgctcaaaagtttgtaaacctcaagaaaataaaagtcgaagattgtgagggaatggaagacataataagagtag

SEQ ID NO: 232614 - DNA, 2883 bp, Cannabis indica
taatttatattaattatatgtgctcaaataaaggcttagaatgtatcaattttagcctttatcaaggacctaggcgagtgcttcaaaatcctttgtagccacaacatgaagctcaatccccttaaatattcttttgacgtaagctccagaaaattccttggatttataatcaacaccaggggaatagaagaaaatccaaagaagatccaagcccttttggacatgaagttgcccacaattatcaaggaagtacaaagcctaactggatgcattgctgcactaagcagatttgtgtctctctctacagacaaatgtggacccttctttaacattctcaaaggcaacaaaaaatttgagtggacaaaggaaagtgaaaatgcattccaagagctgaagaagctattggcccaaccactggtgttgtctaaacctctagacaatgtcttagcaaggcgtgtacctagcactcatagagcacgatgtgagagctgtcctcacaagagaagaaggcgatgtacaacatcctgtgtactacatcaacaaaaaggtattcgatgccaacagtcgatacctactcatggagaagctgacctacaacttgctcttagcttccagaaagatgaggccctacttccaagcacacccaataaaggtgtacaccaatcaaccactgcgacaagttttgcagaaacctaaagcttcaggccaactagtcaaatgagccatacagcttggtcagttcgagatcacatactagccaagaacagccataaagggccaagcccttgcaaactttgtggctgagtgcaccaactcaactcttgacactgctcaagactcaggagaacagcaaaagccagagtagacgcaagagtaagagcagcagcaaaatcccgaagatctatcatggaaactccttgttgattgaagatgcactaaccaattgtccactgtaggcattacacttacaacacctggggcaacaactgcacggactaatcaaattcagctttaaagcctcaaaaaatgtggttgagtatgaggacttgatagttggcctcatgctagcgcatgaagtacgtgttgaccagctagacatattcaacgattctcaactagttatgaatgaagtcctaggtgaatacacagctcgaggtgacaaaatggtggcctacttgagcaaaatcaaagagttgttaagttagctcaaaggctacacaatcaagctaaactccagtgaacagaatgccatagtagatggacttgcccgcctagcgagtagtaccacagttgacaaagaaaacctagtgcccatccagttcctagaagaacccagcattgttgtcctagaagaggtggatatgctggatgacacaccaacatagatgacacctattgcagcttacctccaaactggagcctcgttagaaaacaaaaacaaggcatgcaaactaagaagaaaagctacaaggtacctgatcctagacgagataatgtacagaagaagtttctccatgcctcttctgtggtgtatcaccaaagccaaagatgatcggcttatgatagaagtgcatgaaggcttctacgacaatcatgtagtgggcaaagcttgtccaaaaagatacttcgaccggggtacttttggcaaacaatgatcgaagactcaatggactacgttagaaaatgtgacaagtgccaaagattttagaagataccaagagctctatccaatgagctcgcgatgatgcagtctccttggcccttcgtagtgtggggggtagatctaattggtcaactcttgaagggaaaaggaggggtacagtttgctgtcatcgtagtagactacttcactaaatggatagaagttgaacccctaacaacaaaatcctccaagaagttacttgactttgttgtcaagaacatcatatgccagttcggccttccccagaagattatgtcaaacaatagcaaatagttcaacaatgaaatgttcactgatttctgcaatagacatgacatcatcaaaagcttctctgtcgtggcccatccataagaaaataggcaggtagaagctgtcaacaaaatcctcaaggacaccttgaagaagcaccttgaggaaacaaaaggcaactagcctgaactgctcccaaaggtcctatggtcgcataggacaaccaagaagactgccactctggaaactctattcactctagcttatggcaacgatgtgatgtttcctatagagctagtgacaccgtctcaaaaaagaaaacttatgacaaacaaatagcaccctactggaagagtccctagatgaagtagaagaaagaagagaacaagccaacttacagttgtaggcctaccagcaaaaggtagcacgacacttcaaaaaacacgtcaagagaaaaaaattctttataagagacatggtgctccgaagagtgttcttaaacactaaagactcagcagcaggagtgtttggacctaattgggaaggcccttatcatgttacagaaataattagaaagggagcctacgagctgggaaggtacaacaagaacatggagctagttctcctaccaagatactggaatggagagcaccatcacaagaactaccaataacaagcttacagaactctactccaatgtagcgattctatctactcaaattagagtatagtaagcactagcacccatgacccttcttgattggggtctcccactgttcttcaatagtggcctctatttcaataggtgagcaggaatagccatttgatatctagaagctaaatttatgtaatataggcttgtagattcagtttatgtaagttgcacacagcaaagaccaattaatggacattataactgttggaaattattt

SEQ ID NO: 232615 - DNA, 1458 bp, Cannabis indica
aagcaatcaattcaactctcttcgcacttgcgatcctgttggagactattttgaaggaaatagccactacaatgttccagacgaccgctcctgcaatgctttgtcccaagacgatttggcctttatgcccgagaagtctctggtgtcgccttcacgaccccgtggtcaggagacaacaaccagacccaaatggactggtgcctttgatcgacttggaagacaaagagacttgcgtgataccctaaccaaaagacggttggtggaagcgagagcttctaaaggtgacacttatcagtcaatagaagttctaaatgggacgtaaaccaccacccacgatgttaataggaaacactttgatgatctagtggccttggtaaaaggaatcatggctacaaagttgttagaattagaactaaatagagagtgatgctcggatctcgcaaaccgaatcaaagctttgtcaaccgtctaaatatcaagaatctttcctggcatcagtacaccgaataaaaaggcccattgtcccacattcattactttgaagtggaaactgatctacaaggagtaaggaataatgtttggtgtagaattttccctgccaagctgacgggcttagcttagcaatgatacctcaagcttccccctagatctattaactcatggaaagatctagttgacgcattcgacaatcaatttgttccttcacgacagcaccaaattgaacccaataatttggtagatgtgaagcaactagaagatgaattccttaaggactacattcaacagttcttagaggcaacatctaagactaaaatgcttagtgaggatgcaagggtaatggcacttgtagctggactcaaggagattagtcctctgtggtttgacctttgtctaaagtcagtttataccatgaacattttccttcatacggcagatggctttatcaagcttgaggaagttgttactcgagccaagagctcaaataacaagaagaagaaatcgttagactcctcaacctctgacactgtaacgtgggccaatagggaaaaaagaggatcgaatgggggtaagagagttaacaatagagggaaacaaggtaactcccctggcggaaagaaagccaaaactaggaacagcctgagagtacgaactttgtttcaccacctactcaattctcaaagccctaagagaggaaatatatatcgcaactcagtcaacaatgtcataccacaaacctcttcccttcaaagagttagggaaaagagacatgaataaattatgttactctcacagctattacagtcatcacatgaatgaatgtaattagttgcgagatgagatagaattttcgtttaggcaaaagcacactgctcttcagtggtatatgcaacctgaagctccagctggggcaatgcacatttgcagcctgctattaggatttataccctaaaagcaagt

SEQ ID NO: 232616 - DNA, 1262 bp, Cannabis indica
  modified_base (224)..(224): a, c, t, g, unknown or other
cgtgttagcgagtggtgtggtggtggttggtggtagtgagtacgaattacgtgttctagtttagggtaaacgacgaactccgaggttagagtgtgtagttgagtgtccgtggcgtaaggaagcgtttggaggtaagtttcagtggtggtagggatcgagttggtggggtcgggtcgttgggtgcggtcggacacgtggggtggcgtcggttgggttccgggggngggaggggctccggtggcatggggcggttgagacgggagggtggagggatggtaaggccacggtggtgtgtgcctggggtgggtgaatttgtgttgtctgtggatgcagcggtgactccgggtaggggctttgcgggatttgggggtgttatccgcggtgctgacggggtggtgtgggcgtcttgggctgtgggcgccgtgggggaccttcaggttgcggtggccgagctcctagctctccgagtgggcctcgtgtgggctaagagtttggggttttctttggtgcgtgtggagtcggattctactgtggtgacttcatgggttaattttccggataatattcttatgtttaaacctattgttgaggagattatttctcttttagctgctgttggtggtgtttcttgttgtgccatttcgcgtgatgcgaatggtgtagcccacgcactagctaagtctgttactagtcctataggggttcatttgtggactgatgcttgtcctagattcattactgctcctgtaacagctgatttgatttgaataacatactttttttcaaaaaaaataaaataaaataatcttactattaaaaacctaaaattatacatttttttccacaccaatcaatcacatgccgtcattctaacattatgtgaagacaacaaaattacaaatgagttaataattgttgatatgttttggacccattcaacttcgaaggatgcaacctctataattttgatgttttattatttttttttttcataaaatatcagaaatttgaataaaaaaatagttattttatagttatcgcggggttattgtcttgttatttttagttgtgtttttatttttattaagaaaatcatatttttgtaatttaaaaaatgtatttttataaataaaaattttatatcgtaaaattatatataaaatatataataaaaaattgaaaattgccttatattttagtcctatctagtttataatattttctctagttgtcacaaatactaatggagcattatttttttt

SEQ ID NO: 232617 - DNA, 881 bp, Cannabis indica
tgtaaatccccagccaagtagagtggattttaacttgtcattccatgctctaggggcttgctttaagccatatagagccttattgagtttgcacacatgagtaggataatttggatcctcaaaaccttgtggttggctcatatacacggtttcttgaagatgaccattcaagaatgcatttgccacatcaagttgtcgaatttcccactgtgatgagatagcaagattaagaacaagtcttattgtaacaggcttcacaaccggactaaatgtatcttcaaaatcaatgctaggtttttgaagatactttttagcaacaagatgagattttaatctattaagagtgccatttgcattaagcttaacccgatgaacccacctattcccaatcaagtgcatgtttggttcatatggaacaagagtccaagttccttgggaaataagagctttaaattctgtattcatagaagcaaaccagccaggatggttgagggcagctttaagagacctatgttaaattgagaaaagagattcaggtagcttatgtcgagttgccaaataagccttgggtttatatattcctctttgagaccaagtaaccatagtgtgagttctcaggggcatagatgaaccagaaataccagatgcaacacctgaagcagcagcagcaattgtatcattatgctggcaagatgtaggagtaacccttggggaatttgagacaataccagagaccgcaggcacactggtgtcactctcattgtgaacaacaggaatagtgtcaagagctcctccagaatgtgcttcagaattagcaattagtgcagaagcatcaatgataattggtgcagcatcaggtgttggtgctggtgcaagaggat

SEQ ID NO: 232618 - DNA, 1315 bp, Cannabis indica
gactcggagaagcttaggctcttgcaaaattcaaatcaataaatcaaacaaatacacatatgaatacaatataattgtgtcattccatggaaaaaaaataagcctttgatttaatcaaatcactcatatctgatgaaagctagggcgatgtaaattgctttgtagacacaatactggcaagaaattagttaattgctcgaggcacatatagaggaataaagaggcttggtgtcgaggtaactcaaagaacgatctgggatgtacttggaaaaaaaatcaatagaactcagagtgcgcttcgctggtggagcaagaatgtgtttgggaaatgtgagaataagattaaggaattagaatttgagctccaaactcttcaatccaaagaagtccatgaagttgatgagttggctgaggaagctatcttaaaaacattgggtgaaatgtggagacgtaaagaatctatgtggaagcaacgatctagggagctacggctctcaaaaggcgacagaaactcttatttctttcatgcttctaccatggttagaaggaagaggaatcacatatggaacctgaaaaactgcaatggatctctgtgttcgaatgccaaggagattggcatgattttgaatgactatttcattaacctattctcttccaaaggagctgtgtcttacgaaggtttggatgatttgattagtgattctatttctccaatggagaatagctttcttactgcggtacccgataaggaagaaattatttcccatgtgtttcttatgcaccccttcaaggctcctggcccggatggtttgtcggggtgcttctatcgcaaatgttggcagatggtgggagatgacgttgttaatttcatccaacggttcttcacctctggaattttggaccctggtcttaatcactctttcatatgccttattcctaaaggatttaatccaaatagcgtggatcggtttcgacctattgctctatgtaactttttctacaagattattgcccgtatcattacgcatcgattgaaagttgttcttgatcatatcattgccccaacacaattggcgttccttacgggaaggtggattgcggagtcaactcttctcactcaggagattgtgaatgttatcaagaaaaagaaaggaaaagggggtctcttagccatcaaaatggatatgaacaaagcgtatgatcgcttggagtggggtttcttgaaggctgtcatggaaagattcgggttttctcctcattttatcaacttggtgatgtgtagtgtgtcaactgtttcttattccatccttctcaa

SEQ ID NO: 232619 - DNA, 1671 bp, Cannabis indica
  modified_base (1001)..(1001): a, c, t, g, unknown or other
tttaaccaatagttggtaaggcctgaagactctgtgtaaataaacaggtgaaaactcaaaattcactgtgctattgtaaattttgatgtgttagtgcttaaagtactataaatcgtagcagcagctaaattatgacactaactcacccaagctgaagaaaacagggcagagaaatatgacactgcttattttgaaacctccacaaagaagcaacggaaccatacatgctctaaacaccagctcttctgtaagtggagcctgttcataaagtaataacaagatttgatacaaaggaagctactacttaaaggttcaatctttacaaaaacaaaatatgaatataatcatagaacattcaaggtagactcataaattcattgattggctactatttcaaagaataagtcaagtaaaaactgatgaaatttaggattttcactttcagaaaaagaagacaggcaagactcttcatcttattttataaaacatcagaaaatgtataaaattacaggtgattctacaatgcacccccttaaaagggatgtactgatgcaccctctacttgtttcagcatccaaaaaatttttttaatctaatttttttttcatattcatgtacgttatagctatttaagatatcttactaaattttaaaaaatttggaataattaccaatatagaaaacaatgttcaaacagtctattttacacgcgtataaaataaaataatcacgcgtgcaacacactgcttgaacacaatttttgacgtgttaaactcttccgaatttcttaaaattttacaggatgtcttaaataagtataatttacatgaccatgagaaaaaatttgactaaaaaattatttcgaatactaaaacagatagagatgtatcgatatatcctttttaagggggtgtcataatagaatttctctaaaattactgagtttctcatgcatatgctattatagtaaatcatacttgaataaccaggtgtatctatcnccttaagataatcccatgaaattgatttcaatcacccaaaagatcaacaatacagctctagagttttaacctaaaattacatttattatttgaagtgaagaaatatatttatgcatacaaatatacataattttttttttttttaaaaaaaaaataacaataaaataagcagctttagaatatctatatgtgatatcaaagtaattgaaaatctccgcgcttaaaaacttaaccattatagtttagctacttaaaatgatatactacatacatacacttaccacaacataatcgcgccaagccaaaatatgggaagtaatcgagagtccccaatcaagaagacttttcagggcatatttgatacatccaaaggaagtatccccactagaattcgcgtatatactaaaggaatctatcaataacagagtcttgaggaccaatgatccagcatacattaaacaagtcaatgagagaggaaacaccaaagcttgccactgtttcacaaacacaaaatttcaattttagcaagcaattacactcttcaagtgacataatactacaataacaagactacccctatcacgaaaaagagtgttccaatttgaaaattccttgaatcgtaaagaatgataaaaatgggcaatgagatactcacaatatgatccattcg

SEQ ID NO: 232620 - DNA, 647 bp, Cannabis indica
tgtcaccttctaaaagtagcagcgaggaagaaattttttgaacatttatccccctcttcaatccacgagactcgggcccattatttccaataaagagttttcctctctagggccctatttaacaccaactagatctcgtattccgcttcccagtctttggtccccatagggagattttgcaacttttctagattatcttcaagatctttaatattcatatcaatatttccatactggagcttattccactggatgagggcaacccgggtggctcctatttttttaaacaatcaagtcggggcccaaggaaagacaaccgagtcccacgcatgagcaaccaccaggttacttctttcatcccgagtccaagcctcttcaaatttgaaactcctcttgaatttagcttcaatccctccaaaataaaggcagagaggtctatgatttgagtcactagtatggaaagacccaaggatagctttggggaagagtgagttccatccatcatttacaaggcccctatcaagggcagatttaacacgggcaagaccagactgatgattatcccacgttaatttattcccttggattgacaaattaataagtcccctagaattaaccaactttaaaataatagggataaaaaagtc

SEQ ID NO: 232621 - DNA, 606 bp, Cannabis indica
gcctagctcttctttgtttaggggtttgggtaacataggtggctgagtcaattgtttcttcagctcctggaatgcggtttcaaattcctttgtccacttgaattttttgttgcctctgagaatgttgaagaagggtacacatttgtctgtagacttggacacaaatctgcttagtgcaacaatgcgtcctattttgtacttccttgatggttgtgggccacttcacgtccaaaaggtcttagatcttgtctgggtttaagcttcatgttaaagttgcgaagaattttgaagcattcgtctaggtcctccatgtcaccagcgcttttagacttgacaagcatgttgtccacatacacctccatgttgcagccgataggatcattgaacattctgttcacaagcctctgatatgtggcccctacattctttaaccctgaagggcatgactttgtagctatacaggcctgagtatatcatgaagcttgtatactcctaatttaggggatgcatcttctttttcttagcttttgacaaggaaaagttgtaacagtaacattcagattgttggtctcctctcaacatcctactgttgggttttatacccta

SEQ ID NO: 232622 - DNA, 949 bp, Cannabis indica
aaagcagcggtacttcaaagatggagctttcttagatgcaggacttgggtcttatccttctatgacatggagaggaattgtatggggtaaatagcttcttcaacatggccttaggtggaaggtaggaaatggattgcagattaagtgtgcgactgatccgtggctgcctagccatacatccttcaagccattgttttttaaagggtcagattttaatcttactgttagtgagcttattgattgtgatcgacagtggcatatgccgagtctcaaatcaaattttctagatattgatattgacaagattcttagtgttcctttgtccactttctctcacgatgataaaatcatttggcatcatgaaacaactgggatctacactgtcaagtcaggttatatattggcttccaagttcgcagaccaagaagctccctctgtttcatctcattcgactcagttatggaaacatttttggaagctaaatattccttctaaggtcagaatctttttatggaaagctgttcaggaatgccttccagtggctgccattctgcaaaaacgccatattgcagcctcagctatctgttcactctgccgtggcaacaatgaatccattgtccatgctcttttcctttgtaaaagagctaagaaagtttggagaggatcctccttttcgttggatagaataattcatgaatcctccactttcaaggacattttcttcaaagcttcggaaacatggcctcaacaagaattggaacaatttgcttgtcttctatggagtatatggacatagagaaataaggaatatcatggaaccaagcctaagcctcatgaagtgctacttgtatatgctctttcatatttaggcgagtatcaagcatctcgacaggcttctcccactaatctcaggaatgaggttcaccgaaacaatgaacctacagtagcg

SEQ ID NO: 232623 - DNA, 1681 bp, Cannabis indica
atgaacctctgattatcttcttgaatgaagatacaaaacatgtgcagtacccgcatgttgatcctctcgttgaaacattttagctcgccaacaagagagtgaagagagtattagtggacaatgggagctcagtcaacatcctgtacaaggatacattgaagaaaatgacgttagagaatgcgaagttgaagccttgcatggtaagcttgtgtggattcacaggtgatagtgtcgacagccaaggcatcatcaaacttccattgattgtaggagagccaccattatcagcgacactgatgcaagaagtcttagttgttgatctttcatctgtttacaatgtattgatgggtcgtcctacattaattggacaaggggcagtaagctctatcaaacacttgtgcctaaagtttccaatgcaaacgggagtaggagtagtctgaggcgaccaattattgtttcgggagtgtgatagaacttcaaaataggagagcttatcatcaattgatggtaatcataacggaagaaggcgagaaggaagatgatgatctagatcccaaaatccaagacgaaaataaccagctcaaaccttttgaagagctggaagaggttattttagatccatataatcccgcaaaatgtgtatacattgggaagaatttggatgaaaaactaaaatagcaattaattgattttttaaaggtaaaccaggatcacttttcctggagcaactcagatatgatagggataaaccctaatatcatttgtcatcatttaaacatcgaccccagctacctagcaaaaagataaaaatgacggtcgttagattccgagagacaaggggcacttaaagaagaggttgataaattgttgactaatgactttatacgtgaggccttttatcccatgtggatttcaaacccaattcttatcccaaaaccaaacgacacttgaaggacttgtattgatttttcaaacttgaataaagcatgtcctaaagattgtttcccactacccaggattgaccagttagtggatgcaacagcaggatacaaccgaattacttttatggatgcatattatggatataaccaaattaaaatgcatattcctgaccaggaacatacaagttttgtaacaaacatgagattttattgtaataaagtcatgccatttggtttaaaaaaattctagagcgacgtatcaatgactcgtgaatggcatgtttgagaaccagattggatgaaatatggaagtatacgtcgatgatatgctggtaaagtcgataaagggtaaagatcacacgaaggatctcgcggaatgctttgatatacttagaaagtataatatgaagcttaatccaaagaaatgttcttttggggtttcttcgggaaaatttctcggcttcatagtaaatgcgagaggaattgaagccaacctagaaaaaattaaggcccttatcgagatgccctcaccaacaaaaccaaaagaagttcaagctttgacggggagaatggcagcattaaataagtcaacgaacaaatgccttccattttttaatattttgcgaggcaataaaagatttgaatggatagaagaatgagaggaagctttgaaaggcataaagaagtatttatcaacgcctccaattttatccaaaacaataactggagaaactttatat

SEQ ID NO: 232624 - DNA, 915 bp, Cannabis indica
ttagctgaccaactatcaagttatcacccaagaaactaagtaacctcctgtagatcggcgatcatcaatgcacgatgcccagtcagcatcataataagcataaagatgtaaaccagatgcaggccgcagatgaataccctctttgattgtgcctttgagatacctgagaagctttttgcaagcatcccagtgaacggatgttggagcttgtaaaaactggctcagcttatttactataaaagcaacatcaggacgagttaatgccaaatattgcaaggcaccgattgtactcctgtacaacgtaatatccgaaaaaggttccccctctcgtaatgacagttttgttgttgcactggctggatttggacaggctttggctccttccatatttatcttcactaaaaggtcagtaatgtacttagtttgggacaagtacattcttgtataatctcgataaatctccacccctaaaaaatagtggacctgcccaagatctttcaaagcaaaactcttgttcaagtcagcaataagcttctgtataagctttgagttaggccctgtgacaagaatgtcatctacgtagaccagaaaaaatgactatgttggcccctgatccataaacaaataaagagctatcagctcttgatccttgaaatccccatgagacaagagtttgccttaatttgtcattccaggcgcgaggcgcttgtttaaaacccgtaaaatagccttctgcagcttacatacataggtaggatgctctttatcttcaaagccaaggggctggctcatgtacactgtcttagtgagagggaccattttaacgaaagcattttgtgagatcaagttgggaaaccattccaattattacgagacaaccaatgatagaacagttcgaacagttgtggtttaaca

SEQ ID NO: 232625 - DNA, 952 bp, Cannabis indica
actatcttcatacatcctaatataattttttagtgcgcagtggatgctagagatcgttgcgtcaggaaaaattatccatttagactctatatgtggctacaaagtttccccacaaattaatgcaatgttggaaaggtaataatttaattactctttatgtagcaaatcatttaattaattaagttatatatatttatgttaatgaattgaaatattgatataatttttaaaacatatgagattataggggcatctaatgcgtatcttgcgatgtggccagaaatttcagtagcaaattatccaagataacctaaaaactaagaatgtgatttttatgttttgaaatacatgactgacatcgtcgcacgtgtaaaccctaaccgttatatacatgattaaaaaactctaagttttaattattaattatcgtatttattatactaacaaataataatatatatatataaactaatataatttttacttcttcatacagtttggggaaaagaagacatataattaatgaaggcttggacgattgatgctgaaatgtataagaatttttcttccctagcttatttcttaggttaacttgtaattagatttattaactcgttaactcttagaattattttaaatatttgtgtaatataattgtagtttttttaaattgcttctatgaaattaatttaagtatattggctaatcataaaattaatttaaataatatttaatttaactttcaaaaaataaatatttaatttaaatgaagtaatatttatatataattaataaatatataatttgaataaattaaatttcaaaatttataataagttttgaactaaaaaattaattattaaggatttgacatcgtgtgacagtcactagtcccgtgatccataaggggaaacaccgggtaagctgtgcaatcccacaccgcctggggaag

SEQ ID NO: 232626 - DNA, 1233 bp, Cannabis indica
  modified_base (1129)..(1129): a, c, t, g, unknown or other
atctcaatgtcgaattcttgaagtagaggcacccactgtatcaatcttagctttgcatccttcttggtcataaggtactttattggagagtgatccgtataaacaatcactttattcccaatcaggtatggccagaacacgtcacacgcgaacacaattgctagcatttctttttctgtggcggcatagtttagctgagcatgattcagtgttctactagcatagtagatggcatgaaacaccctgtcaactccttatcccaagacaactccgatggcgtagtcacttgtatcacacatcaattcaaacgacaactcccaatttggtgaagtcactataggtgccgacatccatttttccttaagagcttggaaggccttcaagcattcctctccaaactcaaaaggtaccccgttaacaagcatattggagagtggtttggagatctttgagaattccttgataaatctttggtaaaacccatggcccagaaagctccttactccttttacagaaactagagggggtagagtctaaattgtagacactttggctctatccacctcgatgcctaccttcgaaatcttgtgcccctaaacaattccctctgttaccatgaaatggcacttttcccagttgagtaccaagtttgactcctcacatttgattagcactttctccaagttcttgaaacaattgttaaatgaggaaccaaaaattgagaaatcatccataaagatctctaaacaagtctcaatcaagtctgaaaaagatcgccatcatacacctctgaaatgttgctggagcagtacatagtccaaatggcattctcctgaaagcgaaagttccatatggacatgtaattgttgtcttctcttgatcttccaatgctatggctatttgatggtaaccagagtagccatctaggaaacactagtgctcatgtccagctaaccgatctagcatctgctcaatgaatggcaaaggaaaatgatctttctagttgccttattaagcttcctgtagtcaatgcagatttgccaaccagtaatcattcttgtagggatcaactcattttttttttcatttttttatcactgtgatccctcctttctttggcactcttgcnctgggcaaacccacttactgtctgaaattgggtaagccaccccagcattatcacttgaccacttccttttttgagaaccctcattcattggtggattaagtctt

SEQ ID NO: 232627 - DNA, 678 bp, Cannabis indica
ttgataagtactaaatcatgcccttttaactttcatcgatgttagaattgtttttctaaaattagacaaaagttcttaaatttaacaatctcaataattcgaggggaatttttaaacggcaaaaaaaatttaaggggcacaatttagtacatgtcaaagttcaggagaaaaaattattaattaacttattttttaatactgtgtcatgctcgtgccatctaaacttgtacatgcggctaaaaactcaactcaaatgtatagctctaaaacaccatcaacaaagtttgtggaatatataactgaaaatatctatagagttttgttggaaatgagacaaaattcattcttccacaaatgtaagtatacatttccaatgtttgaagttaattccaaggattaattgggccatacatgtattcattttctttctttctctaatcccaatccaacatccttttaagttttttctttacaaatcgaattgtttagcaccactgatatctaatagtcttttttaaatgtcatatcaatattagtgtaattaagtattaaatccaatataatttaatataataatttttaaaaaatatcattaattaattataaaacactacatctatttaaaaggtgttactaatatctaataagaaaactattttcttttatgtattttctaac

SEQ ID NO: 232628 - DNA, 1176 bp, Cannabis indica
ggtccaggtttgggtctggggtctggtcccgtatcccgatccaagctctgaggcccaagtcccgggtttgggtcccccatctatgttcaagtcctaggtattggtctaggtccaagttcgtgtttcggttcgggttcaagtctcgagtcccggtctgagtccaggtcccagtttaggtttttgtccgagttctggtcctagtcccaatgtgggtccgagttttgggtcccaggtccgagtctggttcttaggtcttaggtgcggccccagttttcgggtttgggtctaggtctgggtccgagtcccggtcttggtttagatcgcaagtcacaagtccaggtttgggtccaagtcccggtatcgcttctggtctgagtttgggtttaggtttgggtgttattactgtctcaggtctgggttctagttgcacacctggtccgattccgattccaggtcttagatcgtgtctggatcccagtctggctctaggtctaggtctgggtacggatttgggttcgggtcctggtggtcttagtttggtttttggtttgggtcctgttatggtcccatgtctgggttctagtccatgtccggatctgattctagttccgggtccgggattaggtcggactttaacatgggagacgatcttagacccagactctgacccagacatggattttgatactgacctagactcgaacccaaacccatgcctagaccgggattgaaacttgggacctggattcagaccgaaacctatacccaaacccagacccagaccgagatccggacttggaccgagacctgaccctggacttggagcaggactttgaccccgacccagaccaggacccaaacccgaacccagacacggaatcgaaataacaactagactaggacccaaacccaaacatggacccggactaagacctaggacccaaacttggatgggggacctaaacctgggcctcagaacccagacccggatcgaaacccaagactaggactcgaacttggatgtggactcaaactctgtactcgaacccagatctagacccggaccggatcgaaaactcaaacccaaactcggactaggacttgaaccccaaccgggacctaggactcggacctagatggggacttggacctaggacctggacttcagaactggca

SEQ ID NO: 232629 - DNA, 1193 bp, Cannabis indica
agcatttaaagagtttgagattactttaaaaataagcttaaactaacatctacttaatcacgtcttccactaaaatcatatcgaagtaaaagtttagttttacattcttaatcccaaaaactttaatctctcgtaataaactctcaattaaagtttgactttttgtacctaaatactgtgcaaagtctcttagaacaattcaatgttttaaattttatgtgagagatttaggagataagttgtattgggcatcttttgagtaattaataagcatcaacttttctctgtatgagatgtttgtttcccaactttaactccttggtcattccttctaaatatgtctcctctccctgcttaaatggagaacaccaactctaatactaaaatggaaaatgatattacccaaaacgacgatatggaagaacttcggctacagttcctccaaaattcttccttagaatttgaaccagactttggagttagtgatgacattgctgctaaaggtgttttggcaaatgttttggaaagagatgccttcctcgaaacagggtcaagaaaatccttgaaggcatttagaacttgtgtggacaatagaaaataaagacgatggagcctggtctttgggtaatcttctatgattcctcgaaggataagaatgaggtcttggaaggatgcccatggctgatgggaggtcaaattctcaacttacaggagtggccaaatgatggaaactggcagaaggtggacgtgattgcaacaagactctaggtttaggtccatgggttaccaaccccttatctttcttggcaaaatgccctggccattggtgctaaactaggaaaacacatcaagtttgacaaaacagaataaaaggcagtgatgagaagagggttttaaaattcttggtagtagtttatttgctagaaaggatcctagtgaggtttcgcttgagtatagaaagaggccaaaaggagtggattcaatttaaatattataagctcccttctattttctttaactgtggttacttatttcacgatgttggtttttttttcatagcccaaggcctttgcctttcctccggtgttcaatctatggctctagtataaaagttattagctcccctgttcgtagctgcttagatactaagaagccataaatgcacagaatacaactccttttacctgctgcca

SEQ ID NO: 232630 - DNA, 947 bp, Cannabis indica
tggtaaaatattcccaacaggttaaaccatggtaccatcacaatcaacgataaggagggcgcggggagataaaagaatttctgagctcgcatgcatgtgagtgtttttcgattgtctaatggtttcgggttacaagaattagaatactgagctcacatgctatgaacattatatcataaaatgttcacataaaaataattccataaaataagattacataaaaattcctatgctccaatattggcttacattattttctagaagaaataataacgaagcctacactcaatttcactatataattaacgattcatcacctctcatacattcaaaataatagaatcatccattcacatacatatcacatatatataaatacataaaacctatataatatttattgtatatacattcatgaaactgcacttgcactacaaaaaaaaggctttttcgttcggttttcaagtgacatataaagaatttgcttcggttggggcaaccgatgctatagacatagatgcaaatagtgatatttttttctttagttatgaaccgacattaattgatttttttcttcagttatgaaccgaagcaaaaaaaaaaaggtttttgcatcggttcataaccaaagcaaaaaaccagtgcaccgacgctattttttttttcttctgttatggaccgaagaaaaaaaatgtgaaccatagcaccacctctgccatcaccaccatatttatactagttacggattcctccaccagcacaacatcataaatcacaaaaaataccaaaatcaccacagtccttttttcaaccaccaccatagttatatctgaaccaccgtgcacgcttccttgcaacaagaaaaaaaactttagaatctaaaactatttagaacagagaccaccaaagagaaagggaaagtgtgagagagagagggagcacgcaag

SEQ ID NO: 232631 - DNA, 1380 bp, Cannabis indica
aagcgaaacattagacaaactcttaaagatcttcttgcaatcttccaccacggatccgaatgaagaaacaaacacatctgaactccgaatggcttctgcacacacaagactatctgtctcaacgatggcttgagtgtaagaatgatttttcagccaactcaagacttcccttatgcccattatttctgccatttccggggaaactcttcctggtttcacaccagcaaaggcagcgaccaaacagccctcagcatctcggacaacacacccgaaaccatgctttgaagaacgctcgaaaatggctgcatcgacattgagtttgatgcctacactcggttttaaccaaagctccgaaccatctccctctttaagaggagacaacgagggaatattaccctttccttgagctttcaaccattgatcaagactcgaattagcaaatgaaaccacgtccttcacactacgggatcgctgctgccatatgaggtcgtttctagcacaccaaagagcccaacacaacgtcacggctctgctatgaagatcaacttgcagacggctgaacagatccacgaaccactgcccgagagaaggtgcttcacgacttgcagcagccaagccagcaaattcccagcaagcccaggcaaaattgcaggaaaccagtatgtgtagttcggtttcagcatacactccacacatgggacagatattttcaaccaacacctttttaatacaaagattgactttagtggcaagacaattagaaatccccctccaaacaagatctttaactttgggaggcacttttagtgaccataaagtcttccaacattcagtattttctgacatggccgaagggtgcttcaagctttgaatgagattgtaggcacttcgtacagagtagaaaccgtttttctctgcaacccaataccaagaatcagcatcatctaaacttaaagggatgccgagaataatggctgcatcttcaggagagaaaaagtcccttactatatcaacatcccagcttctagaatgcatttgaaagagacaattaagagagaaattctcaaggccctgcacaactggaattggagttgctcgatcagcaatgggaagccacgggtctgttgtgatttgcacagacaaacccccaccaattcttttcctcaaaccagcttgaacaacgtccttagcagcaaaaatactgctccaaacgaagcttggatttgacccaagctcagccgaaaggtagtcaccttgtggatagtatcttgctttaaaaactttaccaacttatggagtcatgccgaaacattaatctccaaccttgcttaccaagcatggcaagattgaaatcccgcaagcatcgaaagcccataccac

SEQ ID NO: 232632 - DNA, 715 bp, Cannabis indica
agcacctgcctttgtcatcccagtatccactcaaaccatccctgccacacctgtccagtttggctctatagacagctctgcagcctcctctcatatgtcgttacccacttctcaaccatcttctagttccaccacttcccaaactcttcccctaccaaacacattgtccaccactactggtgatccaaccaaagtcaccacaccagctgttgaaatgccacatgctcctccacccattccccaaggtcaccacatgcaaacaaggtcaaaatcagggatatataaaccaaaagtctaccttgttactgcctcccaaaacccagacttttccattccgaaaactgttaaacaggccttacaatctcctaagtggagaccagctatggatcacgagttttatgccttaaaacggaagaaaacttggacccttgttcttcctacacctgacatgaatattctcactaataaatgggtttatcgggtaaaatttaacaaagatggcagtgtgcagaaactcaaggcacagcttgtcgctcggggttttcaacaaaatcctggtttggattttaaagacaccttcagtccagtcatcaagccgtgcacaataagagtgatgtttgctttagctgttacctttggttgggaaatacaacaaattgatgtaaacaatacctttctcaatggcgatttgcaggaggatgtctatatgatgcaa

SEQ ID NO: 232633 - DNA, 732 bp, Cannabis indica
ataaaacataaaagaaaggtattattgaaaatttcctttaaaataaactataaaagctcgttgggtaggtcgtataagggtcgtaatgtattaaataataaataacactttgtttggataaagtaatgtattgtattaactattacaataaataatctgaagtcaaccccaatctctgacccggacctggacctagacctaagttcgagacctgggactcggacccgagactaggaccctgacccagacctaggattcagacccggaccttgaaccccggacctcgaacctcgaacccagacccagacctagaccccatacccagatcccaaactaggactcaacctgggactcaggccatacccgaatgacggaaccagaccgaaccctaaccttggacccatatcagatctgaaccccaagccaggacccagaccacggacccggacctcaaaccccaaacccaaacctgggactcggacccaaatccttgatcccaaacgtggacccgaactaaaatcctggacccggacctgaaccctacttggagttggtgttgaggtcaagtttattgaaaatatattataactttacacaatctattaatacaagtcaataccaaacatagtattatattaaataatactaatacaatacaatacaataaaacacaatacaatacaatatgacataccaaacaaaaatgccctaaatgtataattatattatact

SEQ ID NO: 232634 - DNA, 931 bp, Cannabis indica
ataaaacccaacagacacatcatttgaatcatcatcaatagcattatcagcaagtatgtcatcctctgcatctaagattttttattcttcatcttcatcgtcatcgatagaactatcgacatcaggaactgttagtagactttgagggacatccattgatgttggtggatgattagttcattgcacatttaacacccccaaatctacaaatagtgaagaatttgatgaatttgtttcacgtaccatatcgatgtcaatatcacttatgtcatcggtgtcattagtaattttgtcccaaagttggcgatgattaacatcttggacaactctccaattatgacctctaataaaatcatttataaagaaaacttgattggccagaatgtacggctcatctttgtaccattgactacttatactagtggtgttattttcagtgattactttttttcttcttagatctttgttgaaccgtttctacttaaataatacaaccgaataagcaccactagaagacaaatgaaaaatttctaaaagttcatcgtaatagtcaaaaccttctgtccccttaacagacacaccactattttgagttaagggtttttttatctctttcgagtgtaacaaatcgaatcccattcactatacacgctggataagagtaaaccacaatatcagacccagatgctaaagctagaagttcatcaccatgctctaaagactcgagacgatttagttcatatatctgcatatagtaaaatattgtaatataaatttgagaataaaccaaaatattctaatagatatcttcaaagtccaaatgtgcaaggcaatataccttcttatgaaaccaattgggaaattctttctcatgtaaaagattatggccgttagaaacttcatccctatgtcgaatctcattaaagtgttc

SEQ ID NO: 232635 - DNA, 821 bp, Cannabis indica
ttttcggccaaggaagaccagcacaatttcattgcaatatctttggttttcaaggattatctagctgaaatctaggagcttaacctcaaggtaacaccttaatttaattctatcaagttctactaagttatttgaggattttttttttgggtttttaggttcaaattgggggattaggttctatatattttggttttagttagaagctattctataggttgaatttcggttgtagtagctggttttggatttcttttgcagctgaagcaagtctagagaaagtttgaatttatgaactcaagctttgctctcaaatggtggattttgattcatgtggtttttgttgtgtttaagctatggtatatattctttatgtggtatatagatgctctggaaagtttggtggtgattggggaagatttgagtaggtttcgggggcttaaagtttgagaatttttgtgttaaatctgcccaaacaaccgcaatccgattggttcagggctgttccaaccggaattccagttgacagtatcggggaaggccaattttcgtattttggccataacttttcactagggtatccgttttagacgttctatataccgttttaaagcttatcgcgagctctacaatatggtacataaactagagccaaattatgtattctattttagggtgtcttcaccacaaagttcagtagaaaaaccataggttcttttcaggcattagagaagtgttctagggtaaacacttatgaattttatgttgtgacatagggtgtaacgccctaatgctaaggcacgctacagtgctttttcaat

SEQ ID NO: 232636 - DNA, 989 bp, Cannabis indica
aaaagtattggttagcttatattatatgattctataaacattggagtgttcacggattcgtaattagtacgaatttttaattttttcaaaccaaaccaatattacagttaatttttcgaaattcaaaaccaaaccaaaacgtgtttcgggtcaattaaataatcaaaccgaaccaaaccaatccactcaagaacggattgatttggctcaaaatcatggattgtatttcgttattgttctaattgttttaaagcaatcttgcatttttttttttgtaatttttttacttttaatagtaagattataatacataaataataatagcaaaatattttcaaaagttatatattaagtatgcataataaaattatacggattggtttgtttggaattgctactaagaattttaaacctgtgaccaaatcaaagaattctaaacggtcgggattgaccaaaccatttactctagattcatttggtccagtctcaaatgatttagtccgaattgattgaagtttagaaccacgaattacaaattatttgaacaaccctatagtacaaaagcagatcatcatcagaagagcattattagttaattaattataatttaatctgtacacaccacgaagactgattctgcagacaagaattaatcaaacttaccgaaacatatggtctttttttgtggattaattattaattattgtattacattgcatttatagttttaaatgttttcaaattaggtgattattcatgatggtgaagttaaatgcattttaatttattcaaatgtagattaatagtttatgattaggtgtagacgtttatgcagaaaattcatgtagtgatattaaatgtggaatttaaaaaccaattaattaatttgctattgcataataactaaatatatgtataagaactaatatattaattttacctttgttataggagctatcttgattagtggtttcttttttttttttttt

SEQ ID NO: 232637 - DNA, 1354 bp, Cannabis indica
ggatatgtcaaaattcagaggaaaaaattactaattagcctttttttgtgatcgaatccattttagccaatcttgaaagtggagaggccaaagaatgtattcaagccaatattgtacaccgcagcactttttgagaaaaactacaggcaaccaataaataagaatgactctaaaaaaacttgttcacaaacaagacataacgtcgaattcaattggatgttgcatatcgcaagtttatctctagatagtaaatgttcattcagagcttgccacagaataaacttatgtttaagtacattgagtctacaccaaataaactttatgtaattcacctgctcataaatgaagctttgataaagcttgaagcttgttagccttgagcttgccactaatcccagcattgaagatatagtcagctgaaaagatcttcttaagattaactactttcctcgcaccaactcacatcaaccttcaaagaataaaactaaaattcatgatcgtttaagtaaatatcgcgcatcaatttcacccaaagaagatcttatttcataaaaaggtcccaaataaatttagctaagatatcattttctatttagtactctctctaaagcttttgataaacaaacctccctcccaaaaagtaaaatggagcttgttgcgattctctttaacccccaaaaaaataacaaagttcatcaacttctttcacaatactttgaggaagcaagaaaatactcatttagtagcttcgtaatcccaacaacacacaatgattcagttgagctccatctaaaaataaaagatggtgacttgcccaagtgtgtaatctcaacttaatcttaaccccacaattagcaacttttcatttattattatttttatgaatggaaaaagttccttccattaattaaaggtctttcaaaagtaagcacaataaattagcacgaacagactccttactaatcatgtaatcagctttagaataaaagtccctagctaagaagtgggccattttattcgcaaatcgctctataaaatgaactgaaacattaaacaattctaataaaaatgagttttgattcgtggattacaatgtcgtatagagaatacatacgaactttactcttgatagcatgcaccatattgacacagtcagtttccaccaacacatttgaccatccatgagattttatccaacttagggcatcttagaaataaaattagaatatcaaaatataatgtaaatttggagggttttacctaaaatttaacttgtggggttaagtattgtattgtatattttaagtagtattgccgcaaattaggggtgtttgcggtgcgggtggtgcgagtt

SEQ ID NO: 232638 - DNA, 1385 bp, Cannabis indica
attgattggatgcaattgggtgataaaaataccaagttctttcattcaaaagcctcggctagaaggtcaaacaatagaattacctcactcaaaactgaagatggaagcacttatacatccaaggctgatatgagtaatgttattcagaattattttgccactctatttcagacttctcacattgatcgcactgcccttgatgcaactctctctacaatacctaaatcggttacagtaaacatgaatgtcgtgcttctcaaacctttttctaaggaagatgttcagttggctctacactctatggggcctgataaaagcccaggaatcgatggaatgtcggcaatgttttaccaaaaaaactgggatatagttggtaatatggtcactgaagctgtattgagtgtattaaatgatggagctgacccttcacccttgaattccaccatcatcacactcatcccgaagatcaaaaaagcaaagtttatgaaagatttcagaccaatcagcttgtgcaatgttgtttccaagctcatcaccaaaatcctagttgttcgcttcaaggaaatactcccccatgtcatctctgagactcaaagtgctttccttccaagtcgcctcatcacggacaacatcttggttgcttttgaactaatccatggtattaaacataaaacttcgtgtaggaaaggagtggctgctatgaagttggatatgagtaaagcgtttgatcgggttgaatggagtttcatcaaagctgtgatggatcgaatggggtttgctaatggatggacgtctcttattatgacttgcttgacaacgaacaaatttacttttctcttaaatggagaactaacaggctcagtcacaccatcccgagggcttaggcaaggctgtcctttgtctccatatctgtttctaatttgttccgagggtctctcatgtttattgaagcatgaagaacgcttaggaaatctccatggttactcactcacccgaagggctcctccaatttcacacctcttttttgcagatgatagcttactattttgtaatgctacagagagctcttgttttgctatcaaacgttgtctggatacataccatcaagcttctggccaagttttgaatcctgataaatctgtcctctctttctctccaaacaccactttggcggctcaagttcagtttcatagagtgctttccatgcccatcagtgagtgccatgaaaaataccttgggttaccagcatatacagatcgagacaagcagcagttgttcagcgaagtcaaggaaaaaatatggcgccttatgagaacctggaatgacaaactcttttccattggaggtaagaaaatccgacttaaagttgtggtgcaatctatccc

SEQ ID NO: 232639 - DNA, 890 bp, Cannabis indica
cttatcatcttcatccaccacagcttgcttgaccttcttacgacgttggctaggagacaaggatatggaattgggtaggattgttcttcacaaaaaaaaaaaaagcaaaatagcccccttgaatttgtcatctcaaatccaatatagaggaacctcatgcttgacacataaatcaagaatcaaggaagggtgccccaacccacttacattgcgtaaacgcgaaatgtcacacaaactctcgaacattttctggccaatattgagtgggattcccttcataatgagacaaacaatgagaagtctatcttttctaatattagacaatgagtattggggtaaatgggagcactaacaaagtgagccaagattagattcagctagcacttccacaaccctttaatctcataacctgccatgatccactcagctccctcataggccacaagatcagcctctttttcccaagtgagctccctgttattaaacaatttagtaacatcattattaagggtaagagaaatgtgaggaatatcatacacatcattaacagttgcaacagagactggagcatcaaatacctcttagtttgatcatttggttggcatccctttaagtgaaatttgcataaaactcttacatcaaggataagttagattgagagggtttcacagcaacaaatttttccctatgtttcttgataatttccacctgaacaacatccatggattcatcttcaaaaggttcttccctgaattcaaaacaccattcaagaataacagactgttggactttgtgccctaaataaaactctatttcaatgtaattttttatatgttgagaatattttactaggatctagatttactaacaagtatgttgaattaacatcc

SEQ ID NO: 232640 - DNA, 517 bp, Cannabis indica
tttttttttttttgttaggaaaacaagtaactatctcattcagagcattgtgtgttgttgtctgtactggtttcacttttctcgatgagagatactcttcaattggagcaccattccttgggatcggacccatatcagtttttcttatatcattttttttttcttatttcgtccatcaaattcaaattgtttagggactgtttattctacatgctaattagaattttttttaccgaacttttattgttacatgtacaaattatgtttctcaacttttagcattgttacaagttttatttaaaattttagaattattagatttaacaactttgtttaattttattaatggatatacataaaagtttagaaaatataatttaatacatattaaagtttaggaacacagttttgtagatataaaaatttgagagcatgatttgacacaataacaattactgtattagtaaaattgaacagaagtctttgaatctaataatttcataatttagaagaaatt

SEQ ID NO: 232641 - DNA, 1143 bp, Cannabis indica
ttttaatgatgaataaaatttgagtttttttttttattataatcattattgactaaaattgattatgaataaatgactccaatattttataatgtggctacatatttcaattactgacttagtagaaaaatcagtagatttaatgatatttttttttgttttgaaatttcggattaaattacaagatctaccgttgttttgggcgttttaccccaaattaaatccataggtagattagatttttagacctgatcaaaacccctcattttcccaatgatttggcgttgtattggttcgtttttgtcttcgacccgactagagaaagtcgggtcacgtgaccttctttcaaacctggtccatggtaggagattaccccctccctagcgaagccaactctacacagcggcgcgtgggggcacgtctgctaccgtatgatgtcatttttcgaagattattttcttaacatgattaaaatttaatttctaatttttttaagatttttaattaattttttgaccctgtttaataattattattaatttaataataattacacagaataaaattattaaataatttttttgataacttttagaaatctataaatcatagaaaatattttgaatttcttctcattatgtttgacatagtcactctcttattttaatttatcttgaatatgaaatttccatcaatattcttattttcacatctttccattagttctaaatttataaaatttgattgtttgatgcaaaaataatgtgttatggtgtagactttactttttattatcaacatattacaagcaatttatatatatcttttttgaaatttggcttaaaattattaatttttcaatgattgttttatcacaaaattttatgttttgtaaaaaaatattatttatcttagttggctacatgtgtaattacttgtccataagtagtactatacatattacttcacattccatgaagtgagttgatattaaatgtgtatatttaaattatttgctcaaaggtaataatttaaatatacatatttattattattttctggcttgaattagtatatattctttaagaaatttatttgcacaaaggtaataaattcataattgatatgtattttttctttatt

SEQ ID NO: 232642 - DNA, 1623 bp, Cannabis indica
atttagtgtattattcatcaataaaataatatttttagaaagtgagaaaaaaaaatatttttgctgtgaacctctcttggccgaaccccctctctccccttaacctcttcattttgttgaattctttggagttgaaagaaagctttgagtttggagtggattttgggtgaattctcccttgaacttatgaagattgtggtaaagctctgtaatttctcgtgtatgaattaaattctaattttaccagccatgaaacttgttcttgttgtcttagattttttgaatgcatatgtattagaattgaatgatttgtgttgttttatgcatgattatgtgggtaggattgtaaggtatgcatgtaggttgttttatttgtttttagggctgaaataaagaatgtttgatttctgggtatggccatgaaaattttgggtttctatggcagctttgagcatggatttttaagcttgtgagttatgtgtatccatattatttgtggtatatgttaagttagttgttgttaattttgatgtgggcctttgttttaagtttctaatcataattgttgatgcatatgtttggtatgtattgaaatatgaggttatgtttggttttgggtgagttttggcaaggttggtattgattttcaaaggttttaaaaatgaaaaaattttgcgttacagggcctttcatcgcggccaaggctgggctcgccgcagcgaggccctatttttctcgaaattttttggtttttatttccgccataacttttgactcgggactcagtttgagatgttctttatatcattagaaagatttttttgagcactttgtgcttatttataattggaatgcaaattatgtgactatgtgaaattgaataattaggattaaccctatatgttaaatctcaggaattatgactaggattaccggtgcttgctcaagaacacccagaggtttggaatatccacatacttgggatacaaggtaagagagtagttagcacgtcgaattaatcacggtggtgctcatatttgatattatgattcgaattaaatgagaaatcgggattagggttattaccctatagcgaacggttatatgatctaggattattactctagtgattaaataatttttaatgcaatgccatgctatatatgtgtaaataaagaattatgtgggtacagaataattatcttagacccagtaattagaaccgagataaacctttcgaaggccttaatgtaaatagacgtgtgagagtaacacgtaggtctatgttaagtagacagtaggtgcggtggcatcaatatttatctcaattgtgaatatattgcatattgttattcatactgtcttgctgggcttggctcacaggtgatctattgtgcggaaaaggataaatcagtttgcgatcaaccatgagttcgagggcttagcggtggattgtacatgttcgggccacactagaccacgcaagttggtgttgggttttgtgccctaaataaaactcatttcaaaataatcagatttactagttaataaagatcagaaataacattttatgtagcatggttcacatgatttatttcatgattatatttaatgtataaattc

SEQ ID NO: 232643 - DNA, 1055 bp, Cannabis indica
aatacccctagagtttaataaaatcttcggaattcagaaattataactctaatgcccatttataataatgtggcctacagataattaaattcataaataattataaaaatatcaaaaattagtgctaattgcctttactaatccaaattactaaagcgatcattacactcagggacatgattcaaggcctagctagttcgaagactttagatcttgaactagactggtcaaggggatcaccattcgtggcatacataaatgccttgcccttgctcaaattcaaggtgccgatatggaagatgtataccggacgagaagacccattgtcgcacatcaaatacttagagatgcaacttgatctctagaaggttactggtgatgtgcgatgttgtacattcccagccactttgttagaaatagctccataatggtacttcaatttcaccccaggaagattcaactcttgggctgagttctctcaagaattttacagacaattcttgtcctcaagcttgtacaatcacaactagaatatcttgtcaaagtaaagcatagataaggagaacctttgaaggattacatccagaggttcatggctagcgctacaaaagtcaaaggccttactaaagaaggctgatataggaccatactggggggcatactcccattgagtaacttctagaaggatatccaaatgatctcgaccaaaaacaagaaagagttccatgatagagctgatggctttatcaaactcaaagaagccatacgacaggcctagacggggcatgtcaacaataggcagtcatgagacatccaacagtctcattacctaccaggcgcggaggcaaacatcaataactctgcccaaatctctagtggcaagaacactagaaacaaccgtaacaccaataactctaggaggaatagtggcaaaaagggaagtttaacacttctcctatgccacaaaaaaataaggaggtgaagtatacctacttcaccctcctcatggagaaaattgaggctatcttcatagccactcagggaacagtccccta

SEQ ID NO: 232644 - DNA, 1133 bp, Cannabis indica
tttttgagcttcaatcccatacgagctttggatgtggaaaaaaaaactaattagtgtgtgtaatcaggcttccaagctctctccactctctttagatggatttactctgtttaacagaatgagtagtgagctcggggaccgaaaccctacatttatgtaggtgaaacctttcatcaaagtctctcccacaattaattgttagaatattttgacaattaatacaggaatttaaatcaagaaattaaatatttggtaaatcgtaatctgaccatatatagaatacaatctaattaattgagtcaagattttgtgaatataaaatattcattgtttctcatacaagttaaaatcaataaatttattgtatacctaaattaaagcctttttcgtgatggatttgcaaagaaataatagtagtaaaaggaaaagaaataacacaaagcttttttacgtggttctgcagttaaaattttacatagtccacgagtctatcttattagatttctgatatagaactaaggctcattttgtaaaggatttttcgtccctttttcagtgtatcttgcccctatttatagttacataggagagaagttaattacattcagattgatttcccacaacaataatcccttgaaattgtgggatttgattatgttccacataaattaaatgcggttattaatcaaaaatcacacagctgtgatttatccacttttactggatcaatgttgacgtggatttaaacacgctccaaagtgtatctcgcaaagttaccttgctgggattgcaataatagccccgacagcgagctgaagcttttccatgtctttccgaggttgataatataaataccgtcgtttcagctattgaagacataaccgtcgtttcagcaatcaacatcatttgaatgtcatctcctatctgagagagctgactcgacagagcaatggatcccattgaaagatgtctgaagctaattagtgaaggtaccgtgagtatgccttcctatagcgagatggatgccttgttattcgttgttcagattcatccaactgttatacttagtttgtataatgtatattatacgctaagtgttttaacagtcatcatgtctcgtctatgtctcttca

SEQ ID NO: 232645 - DNA, 237 bp, Cannabis indica
agatttctgatggtttttaagggcctttattgtatgattttttccgtccccttttagatctaacttgccactatttataatcacatagtaggtagttaattttgaatgtttagcttctgactcgtcaatattgcaagtctcactgaaaaagatgtctgaagttaactggtggatgttacaggaatgagccttcctatagcgagatagacacatcacttattgaatccacttgactat

SEQ ID NO: 232646 - DNA, 918 bp, Cannabis indica
cacactatataaacattaatgtcattctcatatgcctgcatgacacagaccttcatgttacgctcacatgcctatttatatttatgtaatatagacctacatagccttagaacggttcatctcagttctaattacatagtccaacccggttatgacttggacacataaccctgaatctcaatatactcatatatttatcccttgattccacatttataaaatatatacatggacattcaaaataaaaataatcacatagagctcggaatgagctttccaacgatatattgaactcctgaaacggagttcagatcacaaagttatgcattttctaagtttgtattcaaatttgcccaaaaacacgagggcgggccgcgacactcaaaagctatgccgcggcatttgggttcaattcccaggtcaccaaaataggggcgggtcgcggcatgcaaaagcagtgccgcgacacctgggttcaaaaccaagaaaaccaacattaagaacttcgaatttcagcccctaaactcatccaattcaacccaatttacaaccaaaacctaaaaccatcaaatagattttctactaattaaacatagattttagaatgcaatttcatgccttaaaatccaataatataactctcaaagttcaacttaaacaccataaagcataagctccaacattgagctataaaccaaccaatttcatcttcaaatattcacatgatcaagtcaagaactcatgtattagacaattaatttcagagccaataaaaagaatataaacactacaaaaattcctaaaattctctctaatctcaatctaaaacaaaacccaaaaagctccaacacaaatcatgctcccaacaactagaacaactcaattatcaaccacatgcatttcaagagtattcaatat

SEQ ID NO: 232647 - DNA, 648 bp, Cannabis indica
tttttttttatattgacttttggatatttgcacccgatgttttcctaggagaatctttggatttcttatctttggcaaacatccggagggggcctcccaacggttaggggacccccattcccctattttgttttagcgtttggtttgggggctaactgctggatttctttttcagatgagtgaggttctccgacaccttcacgatcaaagtttctttagctttgaccaagagattttagaacttcatcaaacccagaccatgtctacccctacttcaaccagagcaaaatcttcagacaaggtgcccaagaaattggccaccttagagaaagttatgaaaggcctgggggtccatgcaaaatacacctactggtccattggctgggaggcaaacgagttacactcgaccttgacctgtgcccatcaactggagaagatagttaccgttgctgggatcaagccttccacggccaaggtttttcattgcctcccgagggacgaagaaacgcccaactgcagctacgacagttttagggcatggagtcaaacccatttgatgtccggagccatgctaccgcttcaagactactttatagattttttagtttttattggcctcgcgtcgtatcaacttattccccaagctta

SEQ ID NO: 232648 - DNA, 1034 bp, Cannabis indica
tttttttttaactaatatggtcaatattaattattatttaagatgtacttattatttttcatcagatcatttaaatggatttaatttggattaatttttcttaacaagtgatcagattaaatacctccacattcataatacatattgtataagtcagacattgaaagattacattgatcatgtcgacagtaattacagtttgcttagaccctcttgttagattacactttgattttgtttaaaattttaaagactttccaatgttttgggagtttattatgagaatgaactgaaatctgaatcatattagaatattataccataatatattaataattcaactttcatgtgcaaattttcattttattatgagattttctctctttggtatttgaattctaaaaaataatcattttgttaatattgttcaatttgtacaaaaacgagttgttattattttatttttgcatatactttcttgtatgaccacttgatatttattaactattagctataaattcattttcttttatatacttaattttaaatacttagtcgcattcttttttataaatgaaaaataggtattcatgatagtattgtttaatacttgaatactaatactactgttaaggtggctctagctacaaatataatgttgtactgaattttcttataacttagtttcattttaggttcaccattgtatttatgacttggtaattttgatttcgtgatatataatcatatttttgcagtttaattctcaaaatctatatgttccttttcaagctaatctaatccatctaccttaattttttaatgctatatgttattaaccaggcaatttgctttaagtttagagattatgtatgtttatttatttttgcttactaatttattgggaaagtaatattataattgttaatttatctaatgcttaataaaaaaaaaattgatctatgtgctatactcgttctctttatatgtatatattatatgcatgtataattataattaatattttttatttt

SEQ ID NO: 232649 - DNA, 2145 bp, Cannabis indica
catctctacttctagctctttcattctcttgctcatcctttctcaagagttggtgaatggaacttgggttttccctacggttcgcacgaagcgtgtgagtagtactcttctcatccaatcattgtgcggctctccaccatagtttaagggtgacgcattttgctttctttgctcttaaaaaaggggtgcaagcgcgatgtctcctagcatgagattcaatggctaaagtcctttcataagactacatgatgtttccctcattgtggtcttaccccgacaggtagattcatgctactttgagcaacctcttcggttcttgtttcgcgataggccctttccgctctcattctttggggtgacatccgttgatgacatggagttctctccgtcatcatgtacgattggaatcttgcacccttgttggtgaattttgtactgaaagtgtgaaccttgagttttgcctttgagaatggtgctcactactttttgcatgtcggccactgtagtttccagctttcggtttttccatcagagattatttatttcatcgtcatagtgacaagtttgatattttggcctcatagagttggctcacttctcctttctggggcgatgtcacgaggtaccaagatctcgtagcattggtggttgtaaagaccgcttaattgtagtttagaaattagtagataattagggtttaattatgaagttagaataatagttataatttatcattttatggagatttatttgaattcaagatgcattttatatgccatatatgaaattttacgtttttgcatttttgtgcctgacaacatcagaacgcggcgtttggccattaggatcacattttagtatttttagtagtaacagggaaatttagttagacattgagaatgtcgagaatagtcaagattttagaatggaccaaaatacccctaggtgacaggtgtagttttggtagttatggggggcaaaatggtctttttaccaaggattttttttcttttagtgagtttaattggatttaataatctaatttttaacccttaccttagttagattagatcaagaatgtcctttaattaattattttgtattaaatagaaaagtcaagaactaaacctttctcttcctctctctcgagctccttagaaaaaccagctagggtttatgctttttttgctcaattcagggagtttccagcaagtctttagtgttcccatccaaggtaagcatcatagctctctcctctctttgattttcaaagctttatgttagtttatgcaccttagttgggagtaggggttctgtgttgttgagtggtgtttgtttatgttttctaagttgaattgaggttaattatcttgaattgagctaggtttatggactgttgtgatgttggcagttaggcctggagcgtacgatctttgggatagctgggcatattttgtagagtcgctgggcgacaaacttttgtattttgcattgtaaaacttttgtaaatattttataacgggatcccagtttaataatagtatgttattttagtatttataattagttaaataaagttttaaattattcacaattttcaataaatttgttgattagcaacgagctacacaattaagttaaaaatcacgttaacacgcctaatctagtagggtgttacaatttggtatcagagccgccaggttgtcttctaaagattgtcacgacatgtacaatcattattagctatcagctcgactcacagttcagtaagtcttagttgctttagtagtttattttaatagtatgttttaagaaagcctgatagtagcctaatagttgaataagcgcatgttttaaatttccaaaataagcggtaattagtaagtttttcttaatcgtgatctgaccagactagcgcttggttacgcaagttgttataatagtatggacgtcaagcaaaacaccaagagtcagggtaattcggtcgggtctagtggcggtcaggaagctcaaattcccccgaatgttcgtggttgagacagaggccctagaggtagggcacgcggtcgagtgatgttaacacaccgcaagctacccaagaatggcaaaataggtttgcggcaatgcaagccagaattaacgagc

SEQ ID NO: 232650 - DNA, 1205 bp, Cannabis indica
agacaaccttgacaagctctccacaccagatttttcatttttggagggagtttcaatgcccaaaatttcttccaaaaagcttcaagtactgttgtattctgagtattctccccattcatctcttggatcattctatatgcacttttcaccgtatagaaacccgatatctcaccaatcaaagtgattttgtcttgatcgtgaccaagtttcataggaatttgtaagatgagtctttgatcccgctattcaaataagtcaaccacaacttcttcatcccatcccgacccatccaatgccaacaaattgcacagttttgcaccaacaagagttggatgttgagatgaaacaaacggatcatagccaaggttcgcctaaaaccgagatagaagttccatctcccacagtccaacgaactcctttaagcactaattgacgagcttcaagaacactacaccagacataattgtggttagtaccaatatcagttgtgaaaaacgaaccccgagaataataccttgcctttaaaattcttgaaacaagcgtatcgagttttgtaagaagcctccaacctttctttcccaatagagccaagttaaaacttcttaagttacgaaaacccatacctcctttagatttatgtttgcaaagttttttccaagacatccaatggatacctttaggagagttgctcgaggattgccacaaatattgtgacatcaagccttcaatatctcttgtgaccacttgtggaatcaagaatacactcatagcatagcttggaagtgctttcgcgaccgtttttattaatatctccttgcccgcccttgatagaaactttgtaccatagccaagagtctattcttcacttaatttttcaagaaacccaaagcaaccgatttatttctccccattaaactaggtagtcccaaatataaactaccttcgacagctgtgaccatacccaaaatagaattgattctatctttcatggagctcaaggtattagtactaaaaaagatagaagatttggagaaatttacttttcgacctgaggcaagttcaaatttgagtaatacttcctggatcttccgagcctcatcttctgtagccttacagtaaagataactatcatcagcgaataacatatgagagactctaggagcaccattggctactttacatccatgaagccaccctctttgttc

SEQ ID NO: 232651 - DNA, 1113 bp, Cannabis indica
taatagaaacttttaaaaggggaagatgttaaaaaagccctgctgaaataacactcttaaggtaaagagttgttatgatatacagcttttgtttgcctaaatccctctgtaggacatattgaaaccaactaaatcattccgttactatatacaaatttccatcagtagtcaaacaatttcaatacaacacaccaagttcattaaatcacaaacatgttggcttcttacttgaatttgaattgattcctcaggagttagaagcattggctttccatcaactggggactgcaataacaaaattgttagctacgggaaaactctctttttcataaaggaaagaacacgtttgtagaacattgaaacgaaatagataggtagattttggtagcgaactcatacgggtatattttttcatattatagttattcttcaaagtaagaattttcggagccagcttgcttgaaattaaaatacatcaataactttttagtcttaattaaagtgtacctgaaatgttacacccttctcggtgatgtcagctaaatgcaataatgatacctgcaaacaacaaacatataatcttcaaaacattgaatgagtacaaaaagcgatacaagataaaactagacttctagaaaggatcaaagaccaatgatttaaagctgcagcataacaacaaaatgcatcagatatcgaaggataaccatttgaaagccaccagagtcagtaagcaatgctctcggccagttcataaatttgtgtagacctcctagttcatcaatgagctcagaagtagggcgaagtgccaagtgatatgtattccctagtattatctggcaaccaatgtcctcaagctgattagttgccaaaccttttatagttcctgtaaggaaaaaaaattgtcaaaatgtcaaatgcaacaaatgtagatgaacaagagttaaaggtatacgggaggcttacataaacacgttatagttactttaatgctgagcacaatttctaaattctaaccaaacattgacaactaacatgtataatacaaatccaattttcttgtgaactaaataatttcaaatgataatgttatcacattcacattgcctaaatttg

SEQ ID NO: 232652 - DNA, 1503 bp, Cannabis indica
aaggaccaataatatccactaaaattcctacagtctgtaatcttgaatatatcaaagggctcgattggttctaaatcccagctcgcatctatgtgacctgccctatcttccatagtaccgtattgctcagctataccataaaatgactcgtgacagttaacctggacgtggaatctagggtaccagctgtcaaacttatgagcaatgcggtccacgagaagagaattccaaatataaaaattaaggcgggagtcttcaaaggtgactaatgtactacgctcagccctaagtacagtaggagaccaaccacattgattacctcgggatgctccttcattggattcttgaggggcagtgctttgaaggtattgtgcttgagccaagcgatcccaggcctggtcttcggtcggaacagtgatttgttgccaagaagaatgcttgggaatcttgtaatcacaagtatattcctaatcaacaagaaggcccactgatcgtaggttagcctcgctcaaaaggaaatcgcatgaccgaagaccataaggaagagttaacaggtgcttgtgcctactaaccatctcgggggtaggagtaggcctcgtcaagagagctgtcaaaataaacaaaacattggtcagaaacatgaaaaacaaagattgatgtaaatgagcaggaagagaacaatcacttacggagttttcgaaacgtggttgtgccgatggggaaggaccagatgttcagaagaagttgttcttgaaggaaactttatttgacaagtctataataatcttaggctcgctagaatgagtaccgagatagaaaaagtcccctccggcgttcttcctcgacaaaacgaccttaactgagtaaagatactcaatctctactggtatgggacacccctagttcagaagtttgtacaagactttcagactagtgagaatcctgtaggagatgggagtcagctagaacggggcaactccaatgcggtttatgtagtctttgaagtacacccaaaagggaagggtggcccctgcactgatgtgctcaaggctccaggcgcccatactagtcgaaccactagtactagtctcaccactggtccccgggttattgcttgcaaaatgcgtaggtgggtagcaattgaaatcaccctctcgtactgatctaacttggcatgattgcccaagttcaatcccacaagtcttcagcatctcgcccgtatagcctgagatagattgcacctttgattctatcaactcagcctcgaaggtgacattgggatcctgaggagtctttgatgtacgtggcttgggaggcataatttcaaaatccaagtcacctggttcaaaagcaattgtgacgttgggtaaaaacaaaggctttgccacaggaataaaggacacgctgggaggttcaggctaggctgcttcttgcaagaatcggcgtttgccttcagagatttcttgcaagaaatgcctgttgggaattattttaccaggatct

SEQ ID NO: 232653 - DNA, 2462 bp, Cannabis indica
tccttgttttcataaaaattaccaagctctatcacccaagcttccttactttgcaaacaagtagttagctcttgattttccattgtatcttcctttgtccacatatgagctttgaacttggtacaaacttcaaaagacgagaacgttgagaaggttgcatgacaaggaggagcatgttcttcggttctgccttgtcgactactgctagttctaggtgtattgcaatttttattacggggttgtcgttctcgctgtgtaccatggttgctcggtacacactctaacatcaaggaaggtaccgctacggcttcatcgactgccaaatcatgttcatcattcatattcaaatctacaataggatcgttattgtagaaggtagtatcgaactcctcaaactgatcaaatccagtcgcttcttgttgttgatctacattggtcggaacctcctcattcacaccaatcccaacatcaatttcaggaatgaaagaccctaccacactccgagggagaggattagtaggtggtgtcggctccgaattcccaacttttctcacattagtcacgaataatggcataaaatctgtgtttgacattgtttccctcatctctaagaacgttctcagttggcgttatttcttaataacatctggcggaaccatttatcctttcatgtacaaggaacaaatctccaattttaaatcatacaccaaaggatcaacctccaactcttcatataaattttggcacatttgctgtatggttgtgtcagttctaattgtcaacgtcaaattgccttcggctttataaatccaattaaaaccctcaactcaccaaacaccatcgtacgatacaacaagaaacacagtcgatcctgcaatttcaaacaaaaaaagttaagttagggaaaaataccaaaaaatactaaaaaaaataaagaaaataaaacaacaaccatttaaatatcgacattctatcgatatcccatcgatattctatcgataaaaaaaatctacaattcgggtgacagtccaatcgatgaaatgttgacatatcgtcgataccatattgacaaaattaagttgggaaattttgtagtcctatcaacaaactattgatacactatcgatataaactcgacaatgcacattgcatgtcagacacatgtacaattagacatttattgctaattaatttttcccacctttccagctatcgacataacatcgatatcgtatcgataatgtgtagactgaaattcttttcttcgagttttatcgacaaactatcgacactgtatcgatattctatcgataaatacacattccatgcgtttcacttgtacaattacacatttaatgttaattaatttttcctatattcccaacaagtattctgctctataaaagcaaactgcatgccagacacgtgtacaattagacatttaatgctaattattttttcccactttccaactaccactctatctgttgagactatcgataagctatcgacataacatcgaaatcgtatcgataatgtgtagactgaatttcttttgttcgagttttatcgacaaaatatcgacattgtatcgataaatacacattgcacgcgttacacttgtataattacacatttaatgttaattaatttttcctacattcccaacaagtatttagctctataaaagcaaacctctttctaattcataagtgctcttctcttatacttcaatattgttattctcttatagttctaaatgtctactaaaaagaacaaataccaaattctaactcttgaagagatcaagaaggagcctagttatgccaaaattacacctcaaatgcaaaaatctctatatgactataaccattttgaaaaagaatggctggcgaacgagtgcaggtacctacaacttcaacaagaatttcacaaaacaaatgtatggccggctccaccaccagggttccccgaagggtgttgtcgttgcaaattaggctattttaatggtaaaccggtgaagcctggatctttatgcaagtattgcaagtctcaccaacacggtaaagaattttaatttgttatgttatgattgtttactagtcagttttaatgtttgaatgaactttatttagtttaaaaattttcacttgtttcctgtcaactgcttctttacattttttttatcttaaagtcgacaatatatcgacattgcatcgatatattgtcgacaaacatggtcgacttaatatcgacatactatcgacaaattgtcaaataaattatgttatttaatttacttttttatcgacacgttatcaaaaaattatcgaaatcatgtcgataatggtcatccctgaccttccttcgcataatatcgacatattctatcgacaaactgtcgatgatatctagaaaacccagatttcgacaaaaaatagatctaccagatctctaccatt

SEQ ID NO: 232654 - DNA, 2569 bp, Cannabis indica
aatgcatactccatacatccaaaacaagcttactttaaccaatgtcttggaaaggacatagcacttatccaaggtgcaagtaaactacatcgtagattatcatatcagttaaaccctgtgtactgataaattataggaatacatttaataacacaatcttgattactttccattgtgttgacaacacaataaacaagaatattagtgtgataaggatttggatgaatttataaatcaaataagtaaataaatgatcacatgaaccaaataacacattaaagaaataatgaaattaaatttgtttctttatgataattgaatagaaaagattacattgaaatatagttgtatttagggcacaaagcccaacataaattacctaagtaaacctgctattgcatagattttggtaataggaattgaatcatgttaaacaataatcaataggtgcaattgaaattgaaagccctaatttttaattattgttaatttccttattgatttacttgcttattattttcattgtttatttatttgttttctaattttaatttctcttaatctcgatataaccaaataaaagtaaggatttagttttaaagtacttaactacaatccttgtgagattgacctcactctttgtgagtctacaacttgctaaggatacgtatcattatgtgttaaaaaaataccacaacatcagaatatgtttacccaattgcatttggcgcgtcactataagccaatgtttttttaaaataatataaattacggacgttactctttagcgacccgtcatatttttagtgacccgcattataggatactaacactaaatttttagagtcattttgtgcaggtcactaaaactcacccttaaccttttagcaactcgcactattgtgtgggtcactaaagagtgtcactaaaacccaattttgtagtagtgcaaccagtcaaaaagctaaaccaaaaatttggacaatgtgtacagtcttatacaaaaaatgaaagtacttaatctcaccctagatgataaaattactcgctactggaataggcaacaagatagatagtagagccatgtactatggtaacatcaccatctggagcagaagactgagaagcattggatggctcccccataggcaccagctgtaaagaccgcttagtttaatttggaaattagcagttaattatgatttaattatggaaaattatttatagatatttaaataattatttatgctattatttgaattcttaaatgcattttatgtcatatagcgaatttcataatattgcatttccggtgaccggtaacatggaactcggtgtttggctcagtaaaatcacaacttagtatgttagtattgtgggacgattatttagacattgggaatgtcgggagtggtcgggaatttagaatttcccaaaataccctttagtactctttatattattttagtgtggaggggcaaaatggtcattttgccccaattatgttttgtcctttagttgacttagtaattggaaatttatgttgtgttatgtttcttttggctgaaataaaggtttaatatatgcattttttctctcatttcattcaaagtagaaaaaaattagaaaagttaagaaattcaagctcttttcctctcaaaactctctctctattttcggccctccttgagcagcaaggaagtggatgttttcttggtgattcaagctctttttagcaagatttagtgttcacaagttgttggtatgatttctatagctttcctttaagtttcttggaatttttttggaagaaaatgatgatttgcatgcttgattgggttgtgttgctgctgttagtttttgatgatgtttgcagaagtttattcatgattatttgagtataattcagctacttgtgctgcatgttagtggtgttatttaaagtatgggaatttttggttcaaaaactatagttttcaaagaaaattgaagaatcttgttgctgtggttgttgttgctgtgtaaatgtattttctgaggttatattatgttgaattaggttgagatatgcatgatttagtggctgtttggagggttagtcaagttttcagtttttgaactcaatcttgaacctccaatggtgaaatgtgtttctgtgattgaagctttgtccttttgctttggatttgttcttaggggtatttagaacaggtctggaaggtttggtatgcattaggtttgatttgaaagagttgtggaattttgagtgtttcctgcgaggcaccggaattccagttgtgcaaccggaatttcggatggggttcaggaattcccagaaccggaattccggttgcagaaccggtctgccagttgggggatttttaggaaccctagtttttctcattttatgttttttagggtattgccattggaaagcccgcttagttaatttggaaattatcagttgtttatgatttttatgaaattatttatagctatttaaataatatatactgttagttatgtattcactagcttgcctattttgtaattccggtgcccggtattt

SEQ ID NO: 232655 - DNA, 778 bp, Cannabis indica
taaatagaaaaatttcaataaagttttcgaagaataataaatagaataataaacacaaaatatttatatgattttgtagttaaatctacataattcacggatcattcttatttccggtattttgtttacagagtaaaaaaaaaagaaatacaattgataaaagatgaatttctttcaaggtgattacctgattgaaaattagcctccgtcgcacagtgattaatccccctatttataaggtttctcctatgacaattatttcttttggacttatcttaataactattcatgaaacgtaatcaccacgttttatacgtatgataaaaatgcataaacgcctagtaaccgtcacttggttttatccaataaatagtttatttcaccgagaagccttcctaattatgctgctcgcaaataacttttagcagttcttcatgtaagtttcttaagttcatctcgcattctaaatgtttttatgtggtgactcatctcgcctttgtatatcttgtattttcttttgttatgtgtagattctgtacttagttatctccgaaatgattgtaatatatgttattttgttctcactgactcttccatttaacaattaatatctttggactcacctttaattattttttaaggtaagacttaaatataatattgctaatagtcatttccgaagcatttttaaataccatatttattctcttaaatacattctctattattttcgaatcttgttcacgtgtcgtggccatatttgttgcttgaaatatgg

SEQ ID NO: 232656 - DNA, 1273 bp, Cannabis indica
tttctttctttgggtcggatcatcgtgctttaaagttgattcttaatgatagtggtcctaattctcatcttaattatagaaagagatttcattttgaaaatatttggcttgagaaccctgattttttctctgttgttaagactgcttgggatagccgtcctttcaataacaatgctttgtcctcttttcattcgtttttgtctactcaggacttgtgcatttcagcacttaagtcttggaataaagagtccagtttctccattaagtctcgcatctctgatcttcaaaaggaaattgcctgcattcaggatactccttttgctgatcctgagtgtcgttttcgacttaaatgcctttaatctgagcttgatagtcttctctataaagaagaagtttattggaagcaaagggctcgaacccagtggcttaaggctggtcatagaaatactaagttctttcatcgttttgcttctaaacgtaagaggaataatactatcaaatttctcaaagatgatcatgaaaatattttctctgatcatagggatatgggaaatttagtagtttcttatttctctgatctgtttagttctgatggtagtgatgccgatgccattagccttattcttgattgcctaggtcctcctttggatgacttggattttgctttcttggataaacctttcacctttaaggaagttaggaaagccctgtttcatctctctggggacaaggcccctggtcttgatggccttaatgcctacttttaccaaaagaattggtcaactttaggggttgattttgccaaggctgttctgtcttgccttaatgagggggttgatttctcggcagttaatactacccttatctctcttattcctaagaaacagaatgctcatactcttaaggattttaggcccattagtctttgttctactctttataaagttatatctaaggttttagctaatcgattaaaggttgttttagataagattatatctccatttcaaagtgcttttgtctctggtcgagtcatatttgataatattcttattgcccaagaaatagttcatgccattagttcaagaaaaaaggggaaactaggttgggctgctctaaagttagatatggcaaaggcttttgatagggttaactggcattatttagagagtctcatgtttcactttaactttccttctagatttgtttctcttattatgaaatgcatctcaactacctctctttcttttctgattaatggttctgttcatgg

SEQ ID NO: 232657 - DNA, 1677 bp, Cannabis indica
aaaccaaaaaatgccgttaaatagacacttttaatatataaagatatgtcacatatatacctataaaaaatggatatgtataatatataaccctatataacaataattctattcaaagtaaacaaaagcatgtcactaaagcaaaagacttgactaaatagcagaaattgtacataagctagtttttaatggtggtgggtgaattatatcatctagaagtaaataaagttcttttcatgcaaatatataataataagaataatttgcggtgaaattatcttatgttttaatttttatacttaatctctttatttttttttgtagcaaaacccctttatattttttttttttataaatttgacacgccagttaaatattaccgttaaatattaacaagatgaccactgtatacacttgtgtatatgtaatagtaaaactttaaagtcaatacagtagtaattcagttggtatttaacagtaatatctaactgaaaccttaaatttacaaatataagtaaacttaaggggattttgctaccaaagaaaaatataaaagagtttaaatgtataaaaattaaaacataaaagaattttgccgcaaatttctctaataataactataataaatgtgcgtagttgcacaaaccttagccgcaacttcacgatcttttttgatatttgtttcttctctcaattaggatggcccgttcccattttgaccgagaggggatggtgtgttcgtatcctttttcgtgtgcaatcgatgtttctcgagactagtgaggcacctagctacctcttggtatggctctcaatcggctcttccttcaatttttaaatgaagaggtaaatggttgtgttttggtttttcgaaaactttgttggaggaagaggatgcgcttgatgccaaatctagggtgcgcggggtggccctcatcttctatgaattcgagaatgttaaacctttgattcatagctaactgatgtcataaaccagaaagagagagttgcagaataaaagctaaagaaagaaaatgaagaacagagaaaagtcagagaaagaatggagaagaaaagaagatctcattgaactgaaagcagattacatgtttatatacaatgctgagtaaaaagcatgaacactcagctgtaaccgaaagtgtaacaaccaaccaaaacagaataactaactgtaacaaacagcaacagtagctaacaactgtataacagaattaactgtcaaaggctaactgtcatgagccttaacaccgcccctcaaactcagaattggatgatcagtaattctgagtttgtccctgaaagaagagaacctttgactagaaatagctttagtgagaccatcggcaatctgatcaaaggttgctacatgtttgatttgaaccatcttgttcaaaaccttctctctcacaaagtagagatccaattctatgtgcttagtccgagcatgtaaaactggattctgtgtgagcatgatggtactgaggttgtcacaccatattgtaggaggttgagacatatgaatgtgaagctccgagaacaagtaatgtaaccaggtcaattcagcagtcacatttgcaacactcctatattctgcttcagtactagaacgtgaaatggtttgttgctttttgcttttccaagcaatgagattcgaac

SEQ ID NO: 232658 - DNA, 1251 bp, Cannabis indica
acctttggaatccaccactacctatactgggtctgaaactctcactgtaggagatggtaagcaactctttatttctcacatagggttttaccttcttatcattctcctgatattcatcttaattttgttcttaaagtccttgccatcaaaaagaagctagttagtgtgtcaaaactcactaatgataatgatatatttcttgagtttcacaagaattgttgttttgtcaaggacaagtcaactggggcagttcttctgaaaggacctgttaaacatggcttgtatgtgcttggtgaatctaggacctctccaaacattctgcagtgtcatcttacaaccacatcctctctgtctgtatgtagtaatactcctagtgaatttcccaattttaataatgtcactgctcaaacagtgcctcattgtaattcaaatttagacatcaataaagagttttcttcttcttatcatcctattttcactgactatgctcttgtgtctactgttaataatgatgtcaatgtttggcatcaaaaattaggccatcctaatgctgttgttcttggcagaatgctaaaaacaattccccatacaggtaccttaaaatacttgcaattttgtgttgcttgtcaaaaagggaaaagtcacaaactaccatacacagtgtcttctcgtcatgctacacagccccttgaactcattcatactgacttatggggtccatctcatgagtcatctaaggatggtttcaagtactatgttcactttatggatgatcacactagatacacttggatctttcccttaaccctcaaatcccaagcctttgatgttttcctaaagtataaaagtatggtggaaaaacaactcaatctccctattaaatctgttcaagctgactggggtggggaatatagaccttttgctaggttcttaagggatcaaggcataagcttccaacatccatgtcctcatgaccatgaacaaaatagaagagtgaaagaaaacaacggcatataattgaaacaggcttaacttttcttgctcagtctagtttatctttgtctcattggtggtatgcatttcaaagtgctgtgtttacaattaataggatgcctactgttgttcttgactataaaacaccttatgagtgcctgtttggttcactccctgattacaaactattaaaacctttcggttgtgcttgctatcctcacttgagaccatacataagtcacaaacttgactacagat

SEQ ID NO: 232659 - DNA, 1146 bp, Cannabis indica
ttcacatggtaaactcggtcattgtttgaaactctcctgtcctttctcccttcatgtttctctacattctatgattctcccatttatgtttctcactgtctctggttttgatcaaaacatgtttcatttcattttctctttcttcatggtgaaagttgtctgaaacctttgatagttggtgttcaatttcagtgtgtttgtatctatgactttgctttcttgcttagtatgccaactgtctgacaatctgaaattcttgcagctggcacgacaaagccatgttgtttgaacaatatcactggaagaaagcaatgaagaaagggcagccttacaagtttaaggtaagactcgacattaacaactgctatcctttcataaaatggagactggtttgccaattttgtagtcctttttcttgtgctgaatttaatagtgtttaggaaaaataattcttttcacattgcaaaaccgccccttaaaaaatttcaaactgccagaaacctctttgtgttacctttcattccaaaaaaaaaagagttttatgttatacactcttggattgttcatttcttctctaaccccttctacctttgatcctgaatttacattatgtttcatgcatcctaatagtttcatgtcaataactattgcaatatcaaatcatgtgacctatgattttgatataataaattgtcctctttctgttctcctatgggagttgatacatgttgacattgttgttgttgcagtggaacgagtacatggataaggaccacagagattcttattatgccaactggcctgtttatttcccctagttttctttgtctctatatatataggcatgaacttccatcttttggtcgtgaacttttagaccaatgagattcttatggcttttgttatgactatatatgttaactttcttgcgaaagcattgaactttaatagcataatctttactttgtcccttaataatatgcttcttttaatcataaataagcattttgaaaatgacatagcaattcacttgctttagcatgaattacatatacaaaagtatattttttttagtgtctattattacaaatattatgttttacatggaataatagtgaagaatatttgcaacaataatattaaatc

SEQ ID NO: 232660 - DNA, 1173 bp, Cannabis indica
gagtctgctaatttggttgtgacaagtcaagaaattggatgtgattggattcttgactctgggtgttcattccataggacaccgagaaaggaactgcttagtgaattcaagaagattgagggtggatcagttatgttgggggacaacaaagcctgcaaaatctcaggaacgggaagtgcgttgatcagaatgcatgatggtcaagtcagactcatacaagaagtcaggtatgtccctaaactcaagaaaaatttactttcatttggtgaacttgtatctagaggttgcactataaatatagatggttcaatgaaagtaatgaagggtactaggatagtaatgaaaggagacatcaagaatgggatttactgtctgcaaaggaagactgttgttggaaaaacaaacttagttgttaagaacagtgatagagacaatacaagactatggcacatgaggttaggtcatgttagtgagagaggtctttatgaattggagaaacagggcactctcaaaggcaaacttggaaacaaattggggttctgtgaagagtgtgtgtatggtaagtgcagcggagtgaaattcactccaggattacacacaaccaagggcaagttggattatgtgcactcagatctctggggtgcttcaaggactaagaccattgggggtgctagttattcatgagtattatttatgactacaccagaagggtttgggtatttctactcaagacaaaagatgaagccttcaaaacttttcttaactggaagaaattgatagaaagtcaaattgctaggaggattaagaagctaagaacagacaatggactagagtttttctcagatcagttcacaaagttttgccaagacaatggcatagaaaaacacaagacagtgatcaaaacaccacaacaaaatggaatagcagaaagaatgaatagaactttgcttaaaagggtgagatgtatgctgagaggtgctggcctagacaagaaattttggggagaagctttgcaaactgcaagctatctcatcaatagatttccatcaacaaccctctaatttaaaactccttaagagttttggacaggtgaagtgccaaggtatgaccatctgaaagtttttagctacacaaattttgcacacattagacaagataaattggagcctagag

SEQ ID NO: 232661 - DNA, 696 bp, Cannabis indica
aaaaattatatattttcttcggagctagttaaaacaatatttgcaatagaatttgtattttttaaaatatttaataaaaatctaatctaaatctgttactacaaaattaattatattttatatatttattaaaatatgttggaattaattatattaaaattgagctaagttgagatttatattattttaaaaaatacataattaattttgttatttgataaaataaatgtttcaattgataatttttataaaacataaagtataaattagtattaacttattatgttcataattagtcaaataagacaaaataaatttatgagtaattattaagataaataatggtataaatttaagtattcaagttttaagtttgtaagtgacataaatttatgcagctaaatttaagtctgtactgacaaagttgagaaaaaattacagttttacaaatattaggtacttatgcagctaaaaataaacattaaatttatgccgcttataaacataaaaatttaggtacttacagtagtatttaccccaattattattttacatcaaacatacactgtgttttaaaatgtagtgtgttattatgaaattcttacttttcaaaaatatatatatttttgtaaataaaagttttaaaattcggtgaaactgtatttttgttattttttttttttgttgtttttttgt

SEQ ID NO: 232662 - DNA, 534 bp, Cannabis indica
atccacaatctcaatagttcaggagacagttttaacgaccttaaaagttcagaggaaaaattcctaattagcctatatcttaaagtgaaaagggaaaagctagaaagggcagcaatatgcaccaaaatccaaatacatgtttacagaatacagaacattataaacataaaataagaatcagtttacagtttagctatgaatatataacaagaaaagttggggttgataaagcaaaagaactaccttatcaaaaaatcaaagacccatacaggtgagactgcaaagaataatgattgtaatcatatatacaaacccatttgaatgagactcttgggagaaaaagagacctgagaatgtggtggcggtgagtgaggtttgattataaccacaaaatgttggaaatcccatagattgagggagttaacagcggacattagaagctggggtggtcctttggctgctcttagaggaaatgcagccacataaacatgggctcttccactctcccttattccacaatttgtcagctgtgaa

SEQ ID NO: 232663 - DNA, 1349 bp, Cannabis indica
gccattttgatggcaatgttgaagccgaaggagggagaaccacaacccacccaagcaatagatgacaaagcaaattaccgacttgtggagagcgataatgaagatgtgttcccaaaagattaggtaccaaatgataatgaggcaccgtgtactccaacggaagcaattattacgaccattggtgatacacaatcacagggcgatattctactcctgactggacccccagaagatgtaccatttgtgaggaagaggaagtcaccttgctacttgaaggactacacttagaaaaagaaaaagaagtgagtttttccaaagaacgtagatccaaaaatgccagcagaccgtagattgctacgtacgttcaagaggtggttgattggggacattcccaatacccgtgctaggaatgtgcacattagcgtcggtgatgtgaagttcttcacgaagttgttactgatgggggattggttggacgatgatgtaagtatttaattatggtactcttttataatgtttttattgttttttgtttcctgtaaaaaaaattatattttgcgacataaaatgccatccattttatgattgctttttgctctctgttaccttttttgacatttcacgacattgtcgcgacatgaaatgttatccatattctgattgttttttgtttcatgttatctatatatcaatatgttcgtgacattttgtgacctttggcgacatatacactcctcaatatagttttttagcttgtggttagtatagtactttcacaacatgtggcgacatatcgcgatttaagttgcaatgaaatacgacttgatttgtaacatctcgcgatttagattgcgatatgatgtatttgatgcaatatttgtcctttaatttaaacttattggttttttctctcattttcatgcagcatatagatgtcatattacacatgctgaggaggagacacttttattttctagaattgtacccttagtcgggtgtgattttgacacaacactcccacaattcctcaagggcatttgggggtatcaccagggtgacagaagcatcttccaatggccaagtgatagaatactacaagggtatggagggtcattacctaccatgttagaaggaccaagccttcttatacttcgtcctgcactttgatagacaacaacattgtgtggctattggggtagacattgaaaagtggcatcttcgggtgtacgataatgatttctcgtgtaccaacgaagacaattttaaagcccatatgctaccttggcgctttttgatggttattagcatgtctagaatctaggccacatgtgtgttcgttgtggaataca

SEQ ID NO: 232664 - DNA, 1019 bp, Cannabis indica
tcacctagcactagtgaggtaagcggtaaggagcggtgtcaagcaattacattgagaagtgggaagaagtgtgaaagggcctagtgagaaacaaccagtggtagaaggggtcaggatcaacaggcaccgtaactaaaagaagactattgaaggtcttacatcaaaagaagcttcaccacctatccacattgagcaccatgtcaaaattccttatctacagaggctccgcaagaacaacattgacaagcagttttttaaactcttagaagtattcaagaagctgcacatcaatattccatttgcagaagccttggagcagatgtcgacttatcttaaattcatgaaagagattttagcaaagaaaagaaagtcggaggagtatgagacagtggcacttactgaggagtggagtgcaatattatagaagaaactaccgcctaagcttaaagacctgggtagtttcaatattccttgctctatagggggttcagtggagacaagggccctatgtgacttggggaaagtataaatctaatgcccctatcaatttttcaaaggctgaaactaggagaagctcgtcctacgatagtatgtttacaaatggctgacctatccattgcccaccctcggggtacaattgaacacatcttagtgaaggttggtaaattcattcttcctactaatttcttaattcttaacatggaggaagatgacaacattcctatcattttgggaagaccattcatagccacggggagagctttaattaattttcaaaagggggagttaaggttgcgagttcaaaatgagaaaatgaccttctaatgtctttgccacaactgaaagttcctacttgttgtagtaatgaaagttgtaaaagattgtcaagaataagtaagttgtcaaaaagaagaatgggaaactcgaagaacggttttgcactattcgacgacgtataaaaagattaatgtgtggaaactgtgaaggtgagtcccatcttttggatagcattttaattt

SEQ ID NO: 232665 - DNA, 2218 bp, Cannabis indica
ttcgactatgcgatcaaagatgaacgcaaacattcagacaataggcccaaaggccatatcgtgcgagtacaaacaccatagagcctgcgagctcgtgtgttggaatatgaacgagcaactcacgtcttgtcaagtcacatatgttgttgtacttaatttaaaaaacggatgaaactatttttatttattctttaaacgtttattctaattaaatactatcatttattataaaaacagttctaaacgataagttatataatcttaaaggacacttgctttctatataaaggagtgatccaaataaaataaacgaagttaaaaatattaccaaaagtggactaagcagaccaagctatagctgaaccactagaattctcttatcttatcttattttttgctttcgtttttgtttcatttagtagcctatattttgagtactcgctatttttactgagtactcttatatcagcttttgagtattataattttatttaaatactcgcattaaattagtgttatctaattttctccgataacaattcgtttttcaattgaatattgaattgtattaatagtaatgacatttatgtaggcgctcacaatgtttatagaatcacgtgcagtgagtgcgagaatatcaacataagaaactataccagagcatgcaacttcgagtttttgcttagagtcgccacgacagtgtagctggttattccattgttaggtggagcagtcttctcgttggctgcaccctcgatgaggattgaactgtcacagccatgaacaaaacagtcgtagaaatgcactctcgggattcgtagagctatgggaagattggatttgcaatgagactccacagttgatctaacaatgactccgctttggggcaccttcttgagtagaatccaactctggtgccctgcccattcacaagtgtgccaactaagccaagtgacattataaacaaaaacactttgtaatagccctccatgtagccatatttattagtgaacaaagagagaaacaaagagaaacatgggagaagagaaagaaaatgtattattgaaattaattgataacagatacaagggtttatatatagctgagatacaagagagctttggtggtaacaaactaaccaaccaagaataataataacggtaataactaacaaatgaaacagtaaaaacctaacaacctctaatacgccccttcaagctggtgtgtaaaagtcttttacatccagcttggacatgaggctgtgaaattgttgtggaaacagaggcttggttaatatatcagcgagattgttttgggaagagacatgattcatctgaagtgtaccgttgttaatcttttcacgaagagtgtgacaatcgatttccacatgctttgtccattcatggaagacgggattttcagcaatgtggatagttgcagtattatcacaatacaagataaaaggagttttgatgggaactgcaaagtcttgaagaattgatgtgagccatgtcagttcgcaagtggcatgtgccattgatctatattcggcttcagcagaggatcttgaggtagtttgctgcttcttagacttccaagacagtagagaatgctccaacaaaacacaatatcctgaggtagatctgaatctgggcaggccccccaatcggcatcagcaaaggcttgaagttggagagggtgaggtgtttgagcatggtagaataggccctgccctggagattgtttgagatagttgacaactcgtattgcagcttgaaaatgaggttggcgaggttgttgaatgtattgacttagtttgttgacagcaacactgatgtcaggcctagttatggtgaggtagatgagcttgcctatgagactttggtattgttttggatctggcaaaagagcactcgattcattgcttattttgagattgggttccattagtgtggagacaggctttgagccaaggtgacccgtgtcttaaagaagttgcaatgtgaatggtctttgggaaactaaaattcctttgttcgattgtgcaactttgagtcccaagaagaatcgtaggctgccaagatctttcagtttgaaagtggaatcaagtgtagcaataaaatgattgagagctaaaatgttgtttatagctacaattatgtcatctacgtatataagaaaatctatgaaagcattagatgtatttttaatgaacaag

SEQ ID NO: 232666 - DNA, 675 bp, Cannabis indica
aatttgatacttaattacactaataacgatattaacacgtaaggaggtgttaagcaccagtagtacctaatatcacttagagttaataacttacgattaattagcaatatttcttaaaaattgctatcttaagttatatgagactttatacttaattacacttataatgatatgacatcgaatagggtgttaggcaccactagaaccttttaacttttctcgaatagtctctaatgatggtgataatgttattttcatcctctcttatcgtacagagattcaatacttcaactttgttctgagagtattcttatgagttgtgtcgagttgagaaattataaatatagataggtatatttgagctaaattaatatagggaaaatactagctagtttagacctcatgttttgcaaaagttatcaattggactatctgttttgttaaatgataaaatagactctatattttataaaatagtaaaaataggaccctgagctcagtttttaacaattttattttttaatataaccaactttaagacaatttttaatacaaacagatacaaaaaatttaaccaattttgtcataacatctctagattacattattattaagttttattttgataaaaaattagttcagtattttattgaacagaatgtgcaattattaact

SEQ ID NO: 232667 - DNA, 799 bp, Cannabis indica
tgtcatcttccagtagaattagagcacaaggaattttaggctatgagaactttgaatatggacttggcagcagcaggagaaaagaggctattgcaactcaatgagatggatgaatttcgcaatgaggcttaaatgccaagatctataaagaaaagactaaaaaatggcatcataaaaacttggttagaaaagagtttcaacctggacaacaagttctactatttaattcaaggtaaaagctttttcctggaaaattaaaatcaagatagtctggaccgttcacagtggttcaactattcccatatggagcgatggaaatcaaaggagacaaaccagagactttcaaggtcaatggtcaaagattgaagctttacttggaaggtcacattgatgaagccaagtccatcatccaattggttccattatgagtagagaaatacagtccacctaaatgacgtaaatgacagcgcattcgggtttattttaccgccgtggtacccataccagccaccaccaccaccaccgccatactgatgtggcgctcaagtaagttccttttttctctctttttaatgtcacattggggacaatgtcactttagtttgggggtgaacttaatttctattagttgttagttttaacattttttttgtttatgtctttaaatttttagttctattattttgaagtccatttgcttgctatgagttaatttgaaagtaggtagataacatgatttaaaaagttcatttatttttttcaaaaaaatctgtgtgctttgtgatgttatactcttgac

SEQ ID NO: 232668 - DNA, 1260 bp, Cannabis indica
ctccgagcattctctcaaaaatgctcaaaaatcgagtaggagaactcgtcctcgatttcaagaaccttggaagaatcaaaataacatctcgaaaactccgaaaagagcaactaatgcccaggttgacatatggcatggtgcactaggtcttgcttatctaattctgattctatctcgactgttcatctattttttcatagtaactgagtgtttacatggacatcaatgtttgacatgtgataagaaagatgacatctcgaagttgagtagtcctaagttatagcaagtcgacctaggaggagtccctagcccagtgcctaggttaacttcgagaactctagaatggaagtttagacttcgacaacttgtttccaactcagtatcttttagtattctgtaccatgaagacatggagcaactaaatctaggccccgagagttaaaattacatgaaacctgacgtccaagttgacattcctaactaggttttagtttttacgactgtcttagtgtaaatgggtcaaactttgtattggcacatcaaatatacataccacatatatatttgaggcatcagaattagattcggagcaagttcattttaaagcatctggagcacctggtgcccaggcaccccagcgcctaggttgataatttgtcaatctaggtgccttccaagtatcagatcgacgatctgacttttgcatcatctttgtcttcaccaaaaatggggaaataggtactttcagggaagaaataacacttcttgggtgctagaagcatggcatagcgcccaggttgacattttgtcaacttgggctgattccgatgatgtccgaaaactcttctaagcatcttctctatttttagaaaagattaaggtttaactacttctggggaccaaacagatgttctgaatggccataattgggaccctgcgcccaagttgacacctcgcattgggcccagcgcccaagttgacatattgtcaacctggctgtttccaatcaagttctcgaaaaagtgttctgggcatttgttttgtcatcagaaataatgaagattcaagcaaactcagggagaaaaccacagactcgagcccctagaaatagggcccagcgcccatgttgacctagtgctaggcccaacgcccaggttgataattaacctggtgcgctggttttgattgctcaattgtcaaatatgaatagaccattgaatctagaatggtcaaaaatagggtaagagacattgtcctcaa

SEQ ID NO: 232669 - DNA, 1221 bp, Cannabis indica
attacaccatacatcaacttcttcaaaatatattacaaatatctcactttttttcaaattttaatacattttatttatttcaaatatataatattgatctatacacatatccccatataaaaatatgttaaattttgtgccctataattaaaatcttatttcaatgtaatcttaaatttcattatcaataaaagagcggggattattttattacttgtttagtataatatttagttcacatatttatttcatgattatatgtttgatatataaattctattaaatacttatcacattgttattcatgattattgtctacacaatagaaaataatcaagattatgtgattaaactaattagtcccataatttatcagtatactgaatttacactgatatgataatcaacaatttgatttacttatacttgtatagtgaaatgtcttttctaagacattagcaaagtaagcttgtattagatgtatagttatacattggacttgaccgatattcacagtggaaaaaatatcataaacttgccataatatatttctaagtaaatattacttagttgatcttagatcaacgatctcaatcttaagatggttaggttctggtttaagtatattacatgtgttctttgacttgttcgttaaagctagccaattagattggcccaacacttacatcttgggaacacggtagtgcaatgagtgagaacactaatcatagatatgaaatttatagcttctataaatacatagaagtgaaacgatagtttttttaaaacttggctaaattagtttaaatggtggagtactcatttcagtaattatattagtttattgaaatatcatttacaagtaactaattattttaaggataaaatacagtgaagggtaaaacgataaattttcccctactcgatgttaatcatcaatagaggatcattgattatttagattgaaacaatgaataatttataacgtatctatacttgatatatagcgttcgatatattcatgagtacaattctaaatctatagtagagttaggaggaattaataagatagagaatttatttagtaaattttagaattacttattgggagtttaattatacaattctatgaatttcacactaattgagataatattgtgatgtagattaacaataaaacttcatggactcatatatttatcaagattaacaatggaaatt

SEQ ID NO: 232670 - DNA, 712 bp, Cannabis indica
atatgacatgaatgaaatatatgcgagtactgtgatttttgtctccttttaccgccttaattgtgtgtgaattcatgttcattatattattattttatgtaggtgacatgattaactttcttatctaaaattgcatgctgttttctatctgaaactatgtaatggtatttgcagacctttacagggaatatattgatagcggctaaccttttgagaagactacctcatttatatgataatcacatgatgcataacaatataaaaaggctccttttggtgagctaagcccacatccttttgccattacaaattatgcatatgtgtattgctatgttgttgtctgtttcattttacttattagagtgacttaattttttactgtccttactggttaaaaaacaatttagattgatgattaatgagagagtcagctaatcaattttggcaagtgaagaaagtggagcaggtaaaacagagagtacaaaagatgcttatgcggtatcttgcttatatgggtggaagagctgcaacttatgggcgttccgtggagcagcaattgctaaaggtaacagtgtaattatttggttctaatgggtaattttatttcatgatgatgggtcaatcaggtttgtcttttaaatacaatgtacttttataaaactaatggtttaaataattataccacttagttactaaaattgaaaaaaaaaaa

SEQ ID NO: 232671 - DNA, 2210 bp, Cannabis indica
aaatcaattcagggtcctatttgtactattttagaaaatacagggtctattttgtcatttaacaaaatacagggtccaattagtaacttttgtaaaacagagggtccaaaatggtatttaccttttttttttaaaataaattatatttttatattgaaagatttttttttgtatttttatagaatctaaatacttaatagcagcgataataatgaagaacaatgaatgaacagaaaaaaattattggaaatagtaaaagaattaagatgaatttgaaatggtttattgaatattaaaggagataaaatctcatacaaaaggagagagaactctccatgatgctgagaattatctcaattcttgcatgacaaactatcgctccccacgacactagaaagcctgaacaatacccaaattgcccttcaataaacctacaaccaactcacctcacaaatgatatcctacccttggctcgtgtgtctcaccccttttctagtgtaaataaatctgatattaggcttaactaccccctccccaatttttttaaccttgttctcaaagttggaagttggaaattgatctcgaatgacgttaaacttttcccaagtaccttcaaacaaaagaagatctttccaacgaatcaacacatctacaacttggtcataagaagatggttgctgcctcacattaagcaacttagcaggctccataatgagctctaaatctgatgtcaaagtgggaggaagagtgaacgaagagtgagcattacagacaacaacacgaagttgtgagacatggaagacgtgatgaatgccaaaagaaagaggcaagtccaaacgataagccaccttaccaatgtgtttcacaatcgagaaatgaccataatatcttgcactgagtttctcattcttacaaatagtcaaagacttttggtagtaaggtctcaatttgacaaaaaccttattactaacatcaaactccacagcctgacgagaactatcagcaacaaccttcatcttttgttgcgctcgcagcaagtgcatcttcaaatcatccaaaaaagagtcttttttgtccaaccattgatcaacgaccaacaaagcagtggggcctgaagaatactgaaccaaggaaggtggatccctcccataaagcaccttcaaaggagtacaccccaacgaagattggtaagtggtattgtaccaatactctgcccatgctaaccacttagccctttgcttatgacgattgaaagcaaagcaccaaaggtaggtcttaaggcaacgattgacaagtttagattaaccatctgtttgggggtgagaagatgtgctgtggcaaagcttggtcttaagacaaatgctcgatccttcgtttctctgtctaaccttggtctctcaatactgttaggatttttcttttctctaggcgctactggccgtttcttagcagatggcacacaaggagatcgctacatgtgtgcttcgatgttgtgacttgtcaaaatctgatatgttttggcatggggaaggtggggcgagatctggttttcccattccagtgatagcgattttggcgtcactttgtttcgaggccatatctctggtcgtgctgtaaggtgtctctaatgagaattttagaagttggccctcgtggttgtcgccgaatgtttgtatcaagagagcgagatggtctttttgggtcttgtggtggagggtttgggggtcgttgcttctcctccttgtggtgtttggtggggtttctcccttgtggttgttggttgggtgtattttggtggtggctttgctttctcttacattctcgtttttggacagtagaagatgtcttttggttctatgttaaggtttgccatccttgggatttttgtgaaggttgcaataaaaaaggattggatgtggatgttaacagccccaaggccaatgcacccttctgttgttttgattctagtaccgggtgatttctatttggtgatttgctttgtctaactaattttgtttggatgttagaagtttctcgagttgcattgcattttcctttatttaagtttttcttttcgatataataatggtgtttatcatcctagtcttttgtggtgttggcattaggtgcttgtcaatcctattttgttcacatttttgtttttgcctaaccttctgatctttgtccatttaaaccaatgaatgatattt

SEQ ID NO: 232672 - DNA, 1241 bp, Cannabis indica
aactttttgggtatttataaaaatatcccaaatttttatactaagaatatctttttgtttttattagtataaagaaattatatttttttaatatttataattgtgtcattatagttatagttcatatttcatcaattttatttagaaatttttaaaaagaaaaattaaggcgtatttgaaagtaactgtgtaattattgagcagtgtaattactagagtggtaattacacagtctaacatttatgtaacaatcagtagttttgtggtcctttaagaaaaataccgagtgagttgtggaatcctacattttttgggaaaggtcaagtgtgacgattctaagattgtgtaggtatggtactacatagttgaagatgacttaaatagattgatgggtactacttatatcaacaaggttcatcttgtttttggtgatccatcacttgagaattccaaagttaggtgtatttcaattgggataatattgggatgggtgatctcttagaaagttttctcaagaagtgtctaagtgagaataaagctcgctagataatctcatattggtttgcagggccagttgtcattccaagaagcaacaagagtgacatacttgtttataagagtcataagtctgttgaaggatgtccaatagagacttgaagcggaagcattacaatttacattgtatttaatatataaggtgtgtttggtgtcaagtggtaattatatataaattcttattttcacgtttggcaaatgaatagtagttacataaagaaataacattacttatttaaaaatagtaatattttataatcacacagtgtaattacactcaattctcatgggaagcccatgagaattagagagtgtaattgagatattttaatcatctcaggttacatggttactgtgtaattatgtggttaaacaaacacactaaatctcatatgttgaaaaactgcaactttccaacacctcaaagacacaattaatacaaggcaaaaaaagtggtaattttcaatttttagcaccaattctatgcgtccatagaaaagatggtatttttgaaaaaaattacacaatagttcagtcaaacctaaactctctcaaataagcccagcaacaaagtctctctctttctacaaaacactcaaggaggatatctctcacaacaagcctactgatttgaataatagcttttgaaataaagcttgtgtttcctttcataaaataggttctat

SEQ ID NO: 232673 - DNA, 939 bp, Cannabis indica
agactcctttcatagtgatttcgtaccccttctattgttcttcatcaattctaagcctttagggatagagtatcatgcccactcatagcaagttaagtactcaatcataatgcggaagacggtggttaaccaaactgaagaagaaggagatccaggcttagatcttgttattactctacaacagaaaggaacaagggttatagatctgagcggaaggagtcatattattcctttgccatcaatataaggttttctaaactttatatgtgtttatttcattgtataaggaaattcatacttagggttagattatagattataatcaacatacatgttagtaaatctagatcttggcaaaataaattccaacaactgacctcagagccatggtaataatttacttttataaaatatagatttacaacgatgattgtgatgattttaatgtgttcatgttggtttatgtgcttaattgatgaatgtatgttcattacaaattttcgacaaaacatatttttactgtcgtacttaaagtattgtttttagaaagtagataaaaaaataataaatttaggattttacagaacttaattttggatatttattgaattagttatgatttattgaagtttgaaaaaaaaatatcgaggtagggttactagcctcagcgcgcatggaggggacacgaggtgccttgctcggacaaaatccttttagagaagggcatatccgaagttcacccacctctgaccaagtttccacgctcatggaggttgcgtgcagcccctttctcagccaaaagtcccacatctgcatgcagtagtttcaccattttggcaatttttcaactttttaaaaatcgtttttcaatgaaataaaattcaaaattttggtaaaaattttgagtagaatcttattttttcaaaattaaaaaatctt

SEQ ID NO: 232674 - DNA, 1514 bp, Cannabis indica
tgataagccccgagatcttcggatcaagaactcaataaaacagtagccaaacagtagcaaaacagtaggaattgtatattaaagtattgagaaattcaattacaaaagataggagcccttaggctcctttggtgcaattagagtatttactcaaaacattgcataaccaccaatcctcctaagtattctatatatactattgtaatctcactcaaacactccccttaatacaatgacccaattacccttttatttaatatatgttagaacaccacactaatcctaggtcctaacatttccacattcaaacctcacttttgactctggattttgcctgttaatgatcttgtgaatagcgagttcatccaaaattgtaccaagtggtgcagaaagttcaatgaatttatttcagtactctctcatcattacttcttattgcaagacaagaagttgttggctaagtgttccatattgaatgagtcgaaattgtcaacaacaatatcttgaactcctaccaaattgttgcattgataccaaagaagagcttctccttccaagcttatgattgatgcctccattttttcctcgttgtatttgtgaaagaaaaatcaggtttagttccatcaaaaattggctcaattttctaagatagaaattgactcttcctttgtgctgatgcctttgtctcatgttgattacttccatcggactggacatgacaacttcagaaggcttgccttttgatgaaaagtgctggttcttgaatgtttcttcgggatttttggatgtttcttcagatttcttggatgaatctccatgggttttggctattgaacctgtgtttggaaggatttttgaagctgggcttgaaatatttgttgaaaagtgttgccgaattctttcttgatctctctataaacaaaatttctgaagcagctcatttcctcgctcaaatgcaatctcaactttgtgacttcttcctcaaatgcagccattgtgaaaccttgttccgataccgatttgattggaattttccctatatgaaccttgaataaagtctgaaagtggccctagttggttcgacttttaaaagttgcttttgggcttttgaagctccgaaaacacttgtgttgctggttgggtaaccagtgagtttcagtttttagtcctaaaaagttcttttaaaaaaagccgactttaatagctttctcaagaagggtgttctgagaagctaaaaatcagaagtagaagttcatccaaacaggaccgttcttttcttattgcatatgaaaaatctgagattacaaataaagctccaaaccttcgagaggtttggatctttcccagctatagcttcttctctcccacagtggaaacaataatttgactaagttagagccttactttgctaattatagattaattaaaggggagttctatttgcactccataaaatgataaatacacaccattatttaaaaaaactataaacttaaataattattaaaaattac

SEQ ID NO: 232675 - DNA, 564 bp, Cannabis indica
aaatctaatttatccgtatttatcaaattttgaaagagcctatatatattgtgcataatttcgtcaatattccgagatgggctaatagggagggcctcaagactcaatatagaaatctctattctcttcaccaaaggaacctcgtggctcgaagttaatgcgaccaggaggtgctacggagtgatttatagttcttaccttcttcttatatttttttttattatgttatttttgcattttttttggcgtaatttattatttttttttttttttggagaagttttggctttgcttctatgttgaaaagctgtgcttttgcttaatattattggcctctttggaggctttccattaaaatgaataaataaataatttctttaaaagttgcgggacttaaataaggaccgttttgaatcaaaggatgatgtttgctccaagatttggaggatgagaatccatgaacgttttaagttgtttctctgcctttcggttctaaattgcagaatatcttcgggaattctcatgatgcttgtgttctttgtgtgatgatgcatctcattttgt

SEQ ID NO: 232676 - DNA, 871 bp, Cannabis indica
aaaacacaagaacaacactacaaatacagtaccaagcaaaagataggatacctccgattaaaatattcaacgttgtgagcctcttcttttacttgcaattaaagatcaaagaaacaaattcaccacatatccattatgcgtcaacaaacagaacaacaacacaatacctactgaaattccaaaaatcacatccataacaacaccatatcaagaaaatttggcaatgcttgaaaacaacggaacaacaatagaatcatacacactcaaacactaattaaattaaggaggagagtcagaaataagagaatttaagaacttcaaatttgaaatagttgactatccgaatctagttgctaaagaaatggtagaaaaactggaaaacaacagtaaaaaactagatccataaatcgaagtcaacaacgcgaagctaataaaagacaaacaccacctagaagttgaaaaaggtcaggcatacaaggacaagaaaacactgaagaatgtccttagtagttactacgcaatcaaaaacaacttccaatacaaagctggaagtcatgctctcaagaatatagtttaaaatgtgtttacgaaagctgtaattgctctctaagagcatccaaaaaggggccgacaaatatattcataatcaagaggttctcaaaaatctacacatggcaaataaatattaggtatgaagaccaaaggaaaacaacgtcaaaattgataggagaatgcatcaaaccgaagtttctgaacaaaaagacaaaagtaacaccgctgaacataaaaagagagttgaaatataggtttggcatcaagatgaactacatgaaagcttggagaagtaaggagcatgcagtaaatgacttaa

SEQ ID NO: 232677 - DNA, 970 bp, Cannabis indica
aaattgtaagtaatccccattatatgtatcaatcagctccaacgactcgaggcttaaactttcaagtcggtgcttatcaccactgaacctctggtttgtggggcaattacaacagcagcccacagtgatttcaaaaatgtggcctttcaaagtgattagaatatgaaaatatgataatcttaatcagagtgagtacctacaaaaatgtactttacaatatttatcaattaagatgttatgctacaaagtacaaacctttgagtcaataaatttctacttgctcaatccaaaaaaccaataattttgctgttataagctatgatttagaccaaatataaattaaacataaaaaccatacagtaaaattacaaacttcaaaattaatgtcagaacaagaagcgaagcaaatggtagcactaatattttaaagcaactaaaatataagaacactcacattagttcacaataaattttaagaaaaaaaaataatacctcattcttatgcaagtagtaaattaaaaacaatctcaaaaaggactaaaaaaaagtcatcccaaacttatattcataagtaactataatttaaagcaactaaaatatctgcttattgtcaatagacaatgtttctaaagaaggtgaaatccacattaacgagttcttcaaatctgatatcttttcgggattactatcattagtaataactctgagatgcttccaattaagcaatggagattggcataccctcttcaacttttttggccaaatgagagccttcatacaaaacatataaacatatcatttagcataatgtaaatagatcaactatacaatattgaaatataaggccacatgatcaaataaaaacataatacaagtacctcatattctgtaatatgtaggctaagagtattccaagagcaattgagattcaaaagaaaattcaacaaatcaatataccaagttgtatcat

SEQ ID NO: 232678 - DNA, 1229 bp, Cannabis indica
gttttttttattaagatttggccctacatgtcatcttgctaagtttggtattttaatttaggcatatctctgatcggatgatttctatcgcttttggcattctaatttgtctacgtttttttttttttttaagaaaaaaaaaatacttcggataacgaagaagtggtggtaggcgaggtctttgccaacaaactgcagaaggtctttgatcttgacgctaaatttattgtggaagttttgtatatatttttttattatagactatgatctcgtggaagttacattcacaaataaagacacttttgcaagcgaatgaaacgatgctaggtgtgtgaaagtacttattagtgaaagagaaatttgtatatatttgtatgaactcatatatagaagtgtatagtgctccattaacaaccgcaaataaaattggactaattcacgaagatatatctatttctcattagatgagagaaagaaaattaatgtaatatataatacattcatatttcgtagtctctaaattaatcttcccattagggtaaaaaaaacaaggagagatgcacttaattaactttgattagctagtacttttcatgattaaaatattaataaatcaataaaagtgtattgatatataaaaaaattctagaactaactagttagacaatatcttaagaggaaagtaatatttaaaaaaagttcccttataaaatttactagaataaaactatatattatatcctgaagctaagatatacaattcaaatagcttagttaattaataataaatacacatacttaaaaaaaagtgataaaagagtgaaacaagatttctgttattacggtatttcgagcaatcggggtcaccacttgacacatatattaaatatttagcaatataatttaactcgtaaatcaaatgacctgatatttaacatgaatacctcagaaagagaaggagttataccttccaacaatacaatagtaagtaggatgaaggaaagagtaatgactcgataaatcaacaacaaataacatgtcaccagaaattatatgacatggatatattaagaacgagaagaggaaaagtcaagctagttgtgagatcgaatgtcttctgcattcataaagcacaagagatacaatgtaagattgtgcaaaaattatccaaaacctcattacaaggttagaggtaatttgtcctacgccccaagccatctttcatacta

SEQ ID NO: 232679 - DNA, 1736 bp, Cannabis indica
tgttttattgttcctatctgacatgtgcgttcatccacttgaaccaagacaagaggatatcatccacttgcaacttctatcgattttataataataattaaaaaagaataactaaaactatttaaaggtacgtacgtaaaaagtttatgtagctcatttattttatcagcatatatatatttaagcactttacatatgtatatgatcacttgacacaaatacatatagtaaggtgacattacatgatctctcaatctcctatatgaaaatggggagaaccattccactttatttcttttcttgagctacgtagtacagggtcttctcatacatattgtcatatgagctttccataactcacttctaacatatcacaatatcttttatagtacccaatgctattagaaactctgctactttcgcccagctcagtttggactatttgagaattgccgtttactattttatctatggcaacgtagcttgaggagacttgatcattagttttagaattagcattgatcaaaatatcatggcaagaagctggtttactgtcatgcttagtcatccaaaaccacaaggctgttctgaatgaaacaacagggtctatggccaccaaatctggattttttatcaaatctactccaagagccttaccggcaagtccgtagttgtagttgctgaaacatgaataatattaatatgaaattataaaattaaatatcgataagatttaatttaattaattcattaatttactatagctggctattgagatttatatatatatcacatactgagtgagttggataggtcctctgctaatatattttttgcctggagcacaaggccacttagaggaagtgcaataatcattcccagctgttgtgtgaacagtcccattgatactacaatatccccacgcatgtggatcactaggaccatagcctgtacaagcatagcatgaaattacaaattataatacgtaatcaaagtagtattctgtttatgcattttattgaactttctatataaatacaatcattctttatagctgagtaacagtttttactcaagctcactttctctcaaataatttctcaacttgtatcagagccatattacttgcgggcaagtgatcatatccgatccatatctatacagatagtgatcatgtccaatataatacggttcaaaattgatgagcaaaaagtagccatcatcttgagggggtatattatgaacattgtcccacgtagaataaatggtagaaaattgagtcatatataagaacatgggctactccactcattgctaattgattctcaatcctggttaccaatttagtgtgaacaataaaacatggttagatgattaattttcacaatataaatgatgtcgtaatctttatgtacgtgtaacttaccagtggttagttgagaggtttgagcaaagaaagcagcgagctccctcttacgagttgagacatctccagtagtagcaaagccaggaaaggattgagtggcagtgatgaaagcctcgtagctatagaagccctggctttgacaatcacttctatgtttaaacatttcgttgtagagtgatttggtgactattttggttacagaattatcacgagggagaccagtaccagtcgtcggtgctgctgcgaaccagcactggtatcggcagtttccgcctctgcagtaactagatccgctaccacaaaagttatg

SEQ ID NO: 232680 - DNA, 1387 bp, Cannabis indica
gttggatttaaagacttttgtctaatttcattaaattttactatttcattaattttttatgtaacgaaccatgctccccaaactttaatatctaccaaatcatgcccatcgaactttaaaatgtactaaattatggcccctaaacttttatccatgttagacttttttactaaaattagaaaaaaatccttaaatccaacaatctcaatagttcatggggcatttttaatgaccctaaaagttcaagaggcatgatttggcaaatatcaaaattcaagggacaaaaatcataattagccttatttatattattcaaggattatatttgaaaattaaaattgcttcaccacatagttgatacaagcactttaattagtatttactgggataaaaatattagacaagagaattgaaaacatacttaataaatttatgtatgtttaaatgttatttcaaaactagctttatactgaggagaataaccataaaacaacatgtcatcaattataaagtaattatttttagaaaacccaatattacattttataactcatttatgagctaaatatttctacaatgtcttaatacctatttaaataatataaatgagtattgtaacaatttctaataattaaaatcttatcttattaatttcataatctctatatataataactcactcaattagttatgtttcttttatataaataatcctctaattacgtatatatatttttaaaaaatctcttttttataataggatgattacataaaatactaatttttgtgaaatttttacatttttacgtttaagtcttttattattattttttttttttactatttttagttttacgacattttataaaaatacaagaaaataacaaaaaaaaaaaaacaacatgaaagtaacacaaaaataacataataaataatatacaaataacaaaaatcaacaacaaaataacaagagtacaatataaaattttttattatttttgtatttttgttgaaattatccctaattacattaaagcaccttttttttttgtaaatttttgtaaatttttatgttcaaagatatttttttttacatttttacggtgttctataaaaaataacacaaaaacaacaagaaaactacataaaaataacaggaaaataacatcaaaacaacaataaaaaataacatacaaataataaaaaaaatcaacaacaaattaataaaagtacaatataataatacatcaaaagactgtattttctatcaataaaatcataaaattagtaaaaatatttaaaattccgtacaaaacgtatttttataatttttttttgagataagttgaaaaatacctattttttatattcattaatcaaaaatacc

SEQ ID NO: 232681 - DNA, 859 bp, Cannabis indica
tttgtttctacaatataaatacaaatttctattgacataatattccacatcgaaagagggaggtatggacaatttagaagaaataactccattaatctcaacaaaaaaagatgtggaacaaatcctaagacagctagaggatacaaagtatgacatggatacatgtatgttggatattagtgcagataagaagaaattacaaatattgcattcaagaagcatccatcctctaattaatatttcccccgtatgtgagttgcaaaagcttcaaaatgaatcatgcggaagacttctttttgcgttggaaaaagaagaatactacatccgatttgaactcatcaagcttgaacgagatatcatgttctacaaatggtacaagaagtactttgctaagaaagtataaattagaagtttgtatccatcagtgggtgtgagtatataattatgtatgttttgtttgcagtgaaaaccattatcactgtatttttttccttttttttttgaaacatcgctgtatttttttttcttgaatgacaattaatatattattgggaaaaactaacattttgagttagtattttaaattttggtgtgcgatactatgcattgacaaaatatcatgatattaataaaatcattatatcatctccaaaaaaaaataggtgtaaaaaaactgaaaaattttataatagcctttttcggccgacttcaatgaaatattgaaaagaatcatcttcatgattaaattactttttaaaaacaaggaaagaaaaacttttgggttttttattattttttatgcttccaataggtgatatgatagaaaatcgtgttgatcccactacatgtcattgacatt

SEQ ID NO: 232682 - DNA, 709 bp, Cannabis indica
aaatttggggttctgaaacctcacctaagcggtgcacattaacaatcagtggtagtaaaaacttgtgtaccagaaacgtcgccgaaaataggggtagtgtatatcaaaattaccacctcgatgagtagatcacacccatgccaaccgtttgtcaaaacggtacacgatatcgccgaaaagttgccgaaaaggggcggagctataaaaatatcaccgtgaaaagtagcaaaccaagaaaaatggtttagtgtaggttattctcctcgacgagctgagtttagtggtgaaaacgtcttgtcaaacggacaccggaggtgaccagaaaatccgttcaaagtttgaacccccaaactttgacttgcgatcctcagctaacaacggcgaaagaagcggcgtcgcttggggggtgaggttgccgacacttgtgctttcgatttgtctgacgcgtagggcggtggctggaggtgggtcgccggagtgtggtggtgatggtggtttgtgggttttttttttttgtagttagtaagagagagaaaaggatagagatggatagagagagaggggacggacatggggtacgtgttattgtatatatttaattttcttatacatatatattatattatttattatatataaatacttgttgacccggtcaaaccgaggttttacattctcccctccttaaaaaaatttcgtcccgaaattt

SEQ ID NO: 232683 - DNA, 1184 bp, Cannabis indica
ttaaaaaataagtgacacctcacctcccagcccaactcggatcgatcagacggtagtgcgcgtgtgtggtgatccagtgtgtgagtcatcacccatgcgcacaaaactgggtaccccttggggcccaaaacccaaatctcaaacttgcacattaaatacatttctaatgaagtgtttctatcccatgtgggactccattactcactcatttcactttttattttttttacacaatttcacaaagttccaaaaatcccccacttgaaatttttaaaattattttctctagcaatatcagacaactataagacaatgcttagacaaagatatctttcgatttgaatcttgcgtagtgaatacgatttggattttactagagtgacttgaagtcttgaactctatctccaacatcataccatgcactaatctttcaaggatgtattcaaaccagctcgtgcgttaatggcaatgcaagtctatcctggtatagtgaacgctctagaaattttttccccaaattccataagaagcggccccactcccacattcacatagatgagtctatcaagtgtactcatgtatagctcggtattccactcaacgtagagtataaatctcattaagagtttgtattaactcatcctcttatcgcttcaggacttcatgcttctcatattacaatagcatggtcacatatcacctcataacttgttattacccgttgaacctaagtcttgggatctccagtcattaggttgggttaccattatgagtgagtcatctttctaagggcaatagtcccatccctttcgaagttttatggactttctctctagctagtcctttcgtcaaaggatctgctaaattgtcatcagtgcgtacataatccactctaacagctcttgttgagagaaactctgtaacagtgttgtgcttacgacaaatttggcctttcctaccgttgtagtaacagttctacactttggcaatagtcgcggtactatttgcaatggatcaacacagctagtatcggattttcccataaagggatctcagctagcaggcttcttacccaacatgcttcttcactagcagaggctagtgctatcatttcaaactccatggtggattgtgctaagatagttgctttctttgacttccaagaaacagcgtcaccagctatg

SEQ ID NO: 232684 - DNA, 844 bp, Cannabis indica
acatgtggcattaagtgagattagagttgaataagaagaatacataggcttgacacatggtttgttgagatacacttgagtaatagttagagaattaatagcataaacatttgaatctatagtcgccaaagtgaagtccaagaatattaccatttgaactgcccttagcttttctctcaacttttgactaaatccaaacaatattcaacatgaaacgtgtatgggactttcaaatggaattagacaagtattatggtgattagttaaatagttttattatagcttaactcaagggtggagtagggttacactaactagagttaagtccaatcaaagtctataaataagaggccttttcccttttaatctcacaaacacatccaagcatacattgtatctcgtggctcacttcatcactctctctaagtttcaaaaccaatatcactaatccatcactctcaaagaataataattctaaaccctttactcatcctaagccgaagcccaccatcaccaacatctccaagttcttaccttcaacaaaattttcctctttctctcattgttgtgtttctcttcaaaacaatatagccatagtcccatagctacacgatagcaccatcactacatcaccaccatccccatatacatatacacatctccttcatcatatcgacatcagtatcaccactatttttacattcaagttttagtgctcaactagatctcattggaagctaattaaggtatagcattatatgatttggattgtagattcaagattaagattttgtatatataccattgtaatatgttctaattaataaatatgaaatttaggttt

SEQ ID NO: 232685 - DNA, 1246 bp, Cannabis indica
tcttaggcgaggaatcgatgtaccaactgggacttaatgtattagcgagaaattatatgtcgctgaatatgaatagcgaggcactagagaaagtgacacataccaactataaaagaccttagcttgcaatgaacaaactaagtgtaaaagtcagatcggctcgaagaacaagtaagcgagatgacaatctcgctataggaagacttcctataacttcatccgactaacaggagcgagccctacagccctggcgagtcagaagacttctttataaataactgggatcgacacaagacatacattgtcgacctaggaaggaagaatggcccctgctcacaattgagatcactataatcgggtttttgtcgagacatctccagattcaacagttaaagacgtgtttaatacacaatagtattgacccagtaaaagcgagaaaatcacagctatatggttttcaaatcataaaccacatttacactacttaatatgtaatcaaatcccacgattttagggatgattgttgtacaattatttcagtcaactttgtaattaactgcaaactatgtaattataaatagcggcagacaagttcaaaaaagggacaaaaaaactcatatgaatgaggccctgaaaactactcaaaaatctgaataagattgactcgtggactatgcagaattttaacggcaaaaccacgtaaaaaccttatgttcatattctttattttgatagctttaatttcttgtgtgtgaaatcaatattgtgaggctcaaatttggttaacgaaaatttgcgttaacaactataatctaacaccctaaatatgaatattctaatacgatgaaataaacacatataaagtttagaaaacttgcagtgatggcagtggaatattatgactccttccgttcagatctctagcccttgttcctttctgtcacaaagcattatcaagagctgaacatggatctgatccccttcaattcggttaaccaccgtcttccacactatgattgagtacttgacttactatgagtgggcatggtactccatctctaaaggctcgaaatttatgaagaaaaattgaagagaggattcaaaattttaaggaaggaactctcatttactagtttttttgacaaagaatgaaaactaggttcaaataggttaaaggttggatgagaatgaaagtgtcatgttccttttatagtatttcaactaaagtttaggatttaattatatg

SEQ ID NO: 232686 - DNA, 945 bp, Cannabis indica
ctatcgacattccaacaaatgatcacacttattcaaaaaaacaaaattgtcgacatcatgtcgatattatcccacttagcaatcacagaaaactattaactcacattgtcggcaacatatcgacatcctgtcaacaaattatcaacattccaacaatattatcacacttatttgaaaaaaacaaaattgtcaacaaaatatcgatataattctgtcgatattatcacacttagcaattacagaaaacaattaaattacattttcaacaacatatcgatatcctgtcgacaaattctcgataaattaggtcttaaaattattatacttattatatcaacatcctatcgatacacctacgacatcctatcgatataacaactaaattctttcaaaaatatatcttaatcaaaaatatgtcgataacctatcgatatacagtaataacacacaaaattctaatgctcaaactactttcaattttggtcgacattatatcgataacctatcgatatctcatcgataacattgttaaaataaacaagcaccactgatgaacatgtagaaaaatacacattatccaaaatctaaaacaattcaactattttgaagaacatacacaaattcgcatccaaatctatgaaaattataatttttaataaaaaaaacttactcttttactgagcttggtggtggcgacgatttgactccgggttctcttggtggttcgtggtcgtgatggtggtggttgtggtggttgtgggtcgtcgtgggtcaacgtcgttctctgtggatcgtcgtgggtcgtcttcgtcgtcgtgggtcgccagcaggaaatggagagagagagagagagatagagagggagaaacagatggtggttggatggagtgggtttaggcgtttggggtgggtttctatcacatcggttgtgattcttggtgtggt

SEQ ID NO: 232687 - DNA, 1922 bp, Cannabis indica
atccagattaaagagtgaaatattcatcacccatcttagtaatggattggcagtggtgtatgcagccaacaaacacaacaaataattgaagtaatttgacctcaaacgaaacctttgtgcttttgaattgttcatgatcaaccatattcgataaaaacagaggcccaaaagaaccaaatgagaaaaggaaaccaccagagagtcaattgcacaaggtgtatacgaaccaaaagcactgtctactagtcttccccaaaatccataagcttttggctgacaataccaacttagtggcttaaaccccatatttgtttctcttggaaacttcacttatgcttgctaatcacaatgtgttcttccacacataatgcacttcctacaacataaatttgacaccatactctcagacccatttccactaataacatatagaaaccaatcaaagtaaatatattcagctccaaaaacactttcaaatttgtttacattttcccatcataattctcagtatctaaacagtgaaaactacaaaaacagaatcagtgttatgataactgtacctttgtgtttgtagatgtggattccttcagttcaaatgaaaaaatttgcctgagcaactcacatgcatcatatgcatggatagtgtataataataatctatacattaatatagagacaactagaccaaactttgcatacaaacaaattaaacagataaaataaattctaaaagtagaaacaaaataatgcagcaatatcactttttataatttacatcaaacttttacacttcatcattaataaaaaaaaattacataatattaaaataaaatttccttaatatagagaatataactacatcatttgtattaaggaaatttacattttgattcttaaaaatttttgagtgctctgaaaagaagaaaaattatataatgtcacagcttaagtagactaaacatgaattaatataatactattaacatttaaaattatttgttcataaaaaacatttaaaatgatatctagaaaaatctttacaaaaaaaaaagacaccaattatataaatgaaataatgtatatggggtgattacaggctatttttctaacttctaacagtggatttggtagtatctgccactatataacaaagttttgtatcttcaatcattcataattttgagattgcatctagaaaaaaaaaaaagacaaagattgacgtgtaaataaataatgaattagaaaagacaaagtacttaatatggggatatactcctcatggatcatgatgatggtggtggttactccaaaacaatctttggctagctttttatttttttaattttattgaaaagggaccctatggtttctttgattggaaccctccaaggatacctattatttatttgtaatcatatataggtaaattctattaaataattgatgttttagtatcatgtgatatgcatgttaatggggtcaatcaataatggattagctcaaaattttgtaagccaagtttgaggacatatatgctacttaatacccttcttttcttatttttacgatgtagatatccgcaaaccgcgcaggaacctcttcaaaccagaataactcatcgtctaactgaaaggtatgcttgtcaaaaaccatgaactgttaaacgaaagagaccacttattttagaaatgtatcataaaaatgaatttaccattgaggaaaagatcaatttttttttttttttatgttttaatagtttaaaatctaatccaaaacttaaagggttcgtttagtatgttatattatataccgtattgtattatatagtattatattaatttgcattttatgaaatatttttatgtaaaattatatgttgtattaatttttatggacatataaatatataacattttaatata

SEQ ID NO: 232688 - DNA, 812 bp, Cannabis indica
attactcgacaaacactaaaaacatgatgattctctaagctccttgaagagttacatgtggagcataaaatccaagactgacaatgtcacaaaaaaaaaaataacagtgatcaataattaatcaacttcaacatgcttctgtcaacaaaaccttgttttttttttttttttttttttcaaaaaacatattcaagtaactttttttgtgactataaaagccataatgtgactaaaaaattgtcactaaaaataattatcttttatagtaaactaaatgccacatttaatcacatttaatgattgtaagtgatgataggcatttgcttgtagcattcttccactgcttgaactattgaatttttgtaagctaaactcatgaataactacactttaccaatagtgctctaaaaagtgtattaaatttgttctaaaagttgggctaaagttggtacaagataataccactaattattgtgctaaatttagcccaaaataataatgtatttcatgaatctatatcaataaaaaaatgattcatattcatacgattaggatcgatctaaattatgaaaaaaataacttatctctaatttttctatcttaaccctatccctccaataaataatttccacctatttttatttttccaccttatttattaatcctttgatatttttttttttctaatttattaccttatactaatataaatgtgtcacccatataagagtgtacacataagtaagttgacatttaattgtgaaaaataaagggcaacataaatttgctaacagttcaatagtttggatgat

SEQ ID NO: 232689 - DNA, 1885 bp, Cannabis indica
tctgaattcaaataaatcaacataaataattatttaaatatccataaataattttcataattaaaccctaattatctgctaattttcaaatttaaactaagcggtctttacatggttcctacaggatgagatcgaagaactaattaggaaagggaaatttagtaagtataagaagaatggagaaagtcatccccaagcagatgaaactgagacacaaacaatgcgagtggttcacaaactcctcgcaatattttaaatattattggaggaccacatattggtggagattctaagaagtcgcaagagcgatatgccaaagaggcaagagaaaaactgctcacaaatgtaaataatataagtgaacgacctaaaaagtttttcaggaaggagtgagatgacgtaacatttatggagagtgatgctaggtgggtgcaccatccccacactgacgcactcttgatagttcaaatattggaggagataatgtcaatcgagtcttagtggacaatgggagttcagtcaatctcctaaatttccaagcttttaaggaaatggggttgcaagagaaggacttgagacccgtaacctcgagcatttacgggttcactggagatacaatcacattaaaaggaatgatcaagctaccaattaccctgggaaccgcccctgttactgccaagtcaatggctgactttgtagtaatcgatcaatattcggcatacaacgcagtgataggtcgcctaattttgaaagaaatgaagatagtgacctcgatctatcatctcacttgaaattccctacccccgtaggcgtgggatccgtacgaggagtccaatcagattcaagggaaggttataacatagcactgaaacttgcagaaaataagaaatcagtgaatgttatatatttacttgaagcacatcctcctcgaccgtaaattttcagaattgaggaaatactgcatgttgaaaaaccaaacttggattcgagaatcctcgactatacaaatgttgcacagtctgtagaagaaacaattgaggtaccaatcgatcccttcgatcatagtaaagttttaaaaattttattctaaactaacctttcaacaacgagaaaagctcgtcacttttctcaagcagaatctggatgttttcacatggaaacattcagacatggtgggaatatcaccgcaggtcatgtgtcactgattgaacattgacccaaaagtgcgaggagtccgacaaaagcgccgcaaaatggaccccgcgaggtaccaagcaattaatgaagaggtagattgcctcttggcatgtggcttcataagagagtcattctacctaaacaggttagcgaaccctgttcttgtactaaagccaaatggctcatggcgcacaatgcgttgatttcacaaatttaaataaggcatgtcctaaggacaacttccctttaccaagcattgaccaacttgttgatgctaccacaggttatgaactccttagtttcatgaatgcatactcaggatgcaaccaaattctgatgtatgaaccagactaggagcatacatctttcattgcagattgaggtttgtactattataaggtaatgccctttggtttgataaacgcaggagctacatatcaaaggttggttaacatgatgttctcatatctaataggagagacaatagaggtgtatgttgacgatatgctcgtaaaatctcaacatgcaaaagaccatgtcgctcgtttagaagtcatgtttagaatcctgctgcattataaaatggcaactcaaacccctaaaatgtgtctttggagtaggcttaggaaaattccttgacttcatggtgaatcagcgaggaatcgaagccaaccctgcaaagataaaa

SEQ ID NO: 232690 - DNA, 1572 bp, Cannabis indica
attggtacatgtctgatgtcaacatctctcgcacaaatacagatcaagttcaatatgcttagttcgtgcatgtagaacatgattgatagttaggagcgcaatgctgagattatcacaccagacaactggagttctaggtggataagcatgaagttaagagagaagagatttaagccatgtgatctcagcaacaacattggcaagagacctaaactctgcttcagtattggacctagaaacagtgtgctgcttcttggaagaccaagcaacaagatttgtgccaaagtaaatggcataacctgaggtagaccttctgtcatcaacatctgctgcccagtcatcatcacagaaggaactaacttcagtgtgtgggggtttcttcaaatgcaaaccatgattcattgtgccactgagatacctcagtattctcttgacaacaacccagtgaacttgcaaaggattgtgcataaattgacacactttgctgacactaaaggaaatctctggcctggttatggtcagatattgaagagctccaaaagtgtatctatacaattgaatattcttaacaagatcactgccatagactgacagtctgagtccactggtcataggtccagcatccactagtcataggtctagatgctggtttgactccttgcatttgtgttttaatcaacaaatctctaatatactttcccttgagaaagatgcaagccatctatagtgtacttgtagtgtactgaacttctataaagtcttcttggtctaagaagattaaaaacttgtattttgattatggcatgttttggcttttgagctttaaaacagcggggttgaaaaatgaaaaagaaaaaggtgggagtgaagatttattattagaacctatgtcatgttttgacttttgagttctagaaaacatgttttgagttcttaaaaacaaaccaacagtatccgtttggtttggtatatagtgacgctttatttatttatttattaaaatttataagaattttatctatttgtatgtttggtcccgcaatggatcttataaaggaatcgaagtattagtataattgttgtaatcttttttcaacgtagtaatcctttttacactaaatttcaatgtttttatattttttatgtaaaacccaataaaataattttgattggtaagccattgaagttacctaagtggcttaggtaggggtgagagaaagggggagtgcaagggttataacccaaaacccagtaataccattccaaatgccattttaatacgctcaattaaaattgaatattagatattttatgctacaaggatataatataaaacaaaattttaaaattatacttattagaaaaataataattttaaattaaattttgtatccattttaaagctacattgatataataattactatttcgcggaactttttataatgtctctttttatcgtgtaataataatgtctttttttgcaatcaactctctaaaaattttttatcatgtaatttttagtttgtttcgcggtgttgtaattttgctgcccataatgtgactagatgg

SEQ ID NO: 232691 - DNA, 902 bp, Cannabis indica
ttggcctccactactggtggtcttatacagttatgtactcccgtcaaagtagggagtacatagtctctcaggctcctttcaacattagggtgagtctggtctccttgcataactctaggaattagatcattccctccattatgtgccattttctatgattttttttgcttctctcttgttcttttggttttgcttgcaggatttctcaatctcaggatccaaaggaacagggctctttgcacctcttctactgcgcatagaataaatccacctgagataggcaaaaatctcaacaaaataggttagaaacaagagaaaaaaaactaaattagaataaaaattaactaaacttatattgataaattcaatcccccacaacaacgccaaaaactttgttcggtaaaatttgacacccaagtatatgcaatcgaaataagtaatataatgataaataaagtatcgttctcacgaggattgattatcaattaccaatcaattaattctttagttatatttaatgaataataattgttagataaaagtaaataaatcaatgttattatcaaaatttagaaaaataataataataaagataagattattatgatcctcaactatcctttattttacctcataatgtaattacccaatttctcttcttattattcaattgataagttgagttaagaagtttataatctggttaaggcttataaacccaatttatatgaaaacttcttatattcttatgataagtttaatcacaaaaatagcattaagcatagcaactagtaaaaaaaattatacatataatttagatactctcgttctaaattgatttgcatccataacaatcatagcatattgaaatcttatttttttcagaattttgatttaaattc

SEQ ID NO: 232692 - DNA, 1181 bp, Cannabis indica
gctgttcgtttagtgagtgaggctttatagttgctctgatcttctgagctaagattattccttttgaatgaaatatttgtttatcgtttatgctatttgatcaacacaagagcataaatttgaaagaaattcagctgaagtagaagtgattcctccaccactttcaatcaaatcacaaaactcactgaatttactctttacttcactatgatgatggaaaattgaagtttaccatatatttttttggatacaagacttttttctttagcaatgtggcaaccaaatatgcaatacttacaaactaccagaaccaaatttatggaagaaattctactccaacaatccttggtctttagcatttatatactaataaaagaatatctgtgagagatgcaaatttcagctataaaattgagcctttcatcgaaagctggtcgactagaaaaatcactagaaacatacatcctcttgatcttccccaatgtatcattcatctatcttttgatagctttatgccagagcaatatatcatctattggatgtgaaccagtttcactttcacaacttgctctgattgtttaccttttaatgtggtctaatagtgaaagtagttcatttgtacagaaaaaattctttgaatatgtattaaagcattttattaattcggtgctgctcttccttagtttaatgatcgtaattattggtatattttattaagtaaaaacaaaagcaaatgtgctttgaaaatagttatagttaattcattttttcttgggtgtgatggatcgtagttattgtatatttatctttataacattaaggattacagtgtcaattacttagcaataacaaactcattaaattgtgttcgatttattatatgaatattgatttttggtttatttttagattagtttaagaataatttgcagttagattatcaagttttcttaaacattaatatattgcattcaatttacttttaatttgtaacactattatttagattaatttaatatatgtaaaaataatctcaaacaataataataatttttttttaattatttattgtataatttttaaataaagtaaaaaccacctacctagcataaaattaactgtacgtgcctcgcacgtaactttcttctagttccatataagtgtacctatataacagaatt

SEQ ID NO: 232693 - DNA, 1293 bp, Cannabis indica
gcatactacatttatgatcctcaccaaccaaaatcaaaggacttggggtaccaacaagattggaatgttggatatgcttgtgagtttttactatttttcttctcaatctcgatcttaattagcaaagtaacctcttttcagaagtcatttcggtctagttttaataattccttgcaaaatggtcgaattttaagacgaatgccattttgcaaagaattatcgaaaactaaaccaaaaagatagccaatttttccgaaatatcgtcataaatatcacaaacataacactattattcttgttgtttttcttatgaaattttcagttgagaagaatggagtgccaattggtcctagggtaagttacaattcaataacatagaaaatttaacatacacaatgtattctataaatgtgttcttaactcaattgtgggtgaattttgcaggcaaattcttattggctttaccaagtaccatggggtttgtacaaatgcttaacatatataaaacatcattatggtaacccaactgttatcctatcagaaaatggtatgtctcaattcaattctctctcaataaattttatcttctcatttatttataaatgtattgaaaattaatagtcaatctctttggtaaactgtatgattaagctaaacaatagtataattagaaaacaaagtactttagtgtaaaagaaaatttattgaaagtaacttcttgatactaattttgactatttcaagcacttttttttcaatattattattaaaaacaattatttcgatataaatactcttattttataaatttttaaatattgctctactcctgtgtagattggtttggcactggtaccaatctacataggagtaacgcatctttacttctaaattgcttcagcaatactataacatgaatgtgaaatgattcgaaatttatttacatatatgtaaaaatgtatcaaattttgcttaatttgatgacactcgatttttctcgatattaaactatcgtcaggaatggatgatccgggcaatgtaacactcccagaaggattacatgatagcacaagaatcaactattacaaaagctacatagctgaattgaagaaggcagttgatgaaggagtcaatgtggttggctactttgcttggtctttgcttgacaatttcgagtggagattaggttacacttcaaggttcggaattgtctatgttgattttcacaacctcaaaaggtacccaaagatgtcagcttattggtttcaaaaatttctcaataaaaactagtag

SEQ ID NO: 232694 - DNA, 1686 bp, Cannabis indica
aaaaataaaagatccataacacactccaagtcactcacatctgatttgtatttatctgcatgtacagcagcataagcttttaaattggcttggttgcatcaattaaataaaggaagggaattataaatattgttttcaaaaccaaaaaatattagcgcaaaaatactgtgacaaataacttacaaatattttgctcaagcttccttcgaatcctttttttttatctcagctgcatcctttttctctgcaccaaaacccctctttcatctatacaccattgttaaaacttattacacaagagaaaatatcttaaattaacaaacattcaaaacactaaaatgttagaagaattttttttttaagaattcattgcaattgtctaaaatttcagtgtattcatgacatctctacacttattttcctgtatgtttccaataacaggtaagcatctctcctatataatatcatttcattatatgtactatagtgtaattgttaaatgtcctatagtctaattgttaaatacaatggagcaattagcttaaaaaaatgattctgaactagtaacatgtgtcatttatgagtaccaaataatatattcatttttaattcttattacatgttaaacaaccaagtactttaaaatgataagaaactcatttacttttgaaataattccaatatataaaaatgaaacaaaacaaaaatcactcctacaatttcgacatgaaacacaatttggacaaccaacaaacatatataataagtaactttattaagtctttacttatttttgataattcatttttttcatattaaaaaaaataacaactagttgataatgttcttggctaattgactttatttaattttgtattcaaaaagatagatttggcgaatttatttattcgaaaagtaaatgaaagtacaactaagccaatcaagaataaaagcttactaattccttacccaataattttacttggttttctaaaagtgagaaaacaaaaaataaaaagagaaatattctatttaagtctccaattttaatgggtgaattgggtcccagatggactgagaaggtaagaaacttcatcatttatatatatacattcatctatggtttttctttactcaaactttctactattggaatatttgtttcaaaattaataagtgtggaaatgatatgattttatgatgttatacaaaatgatttcaaataaaatgaaaaaaaaaatgtcttaactaggaaaggggaagtagttattgtggcatgctttgttgaagcttgttaagccaacaaatttttgtactacctctattaaagtagtgtagcagttaacttcctaggatgacttctctacccaattctaattgatctctgacatatatgttcaaggcatgattataacattcaggctaatcatgaccatttctaactgtgactaagtaggacaacctgattgaattttgaaaattgtataaactttggcctttagtgtgtaatgcatgtttgtttttcacaatttctaagaaacttcaccaccttttattgtaaatccaatcaaatgcagcaacaaatattcataaaaattacacttaatcaacaaatgcaacaacaaattgtggtcaacttgtgtgcagcttttttaaaaaactatcttaaaaaaataattcactttt

SEQ ID NO: 232695 - DNA, 555 bp, Cannabis indica
tggagattgactaagagattgtaataggaggttgacggtagcactcctctttaattaatgacttataaatgattccaactaagattttaatgactcaaactaagattttaattaagtttaagtaaaagttgggtagtactgtacttgtttaattttgagtttgggagttataaatattaggctatccgaagtttgatatataccaaattatatatattttctgaacttttaaggtcattaaaactcccctaaattattaagattgttaaattttttgtctaattttagtaagaaatgtctaacatgaatgaaagttcagaggacatgacttagtacgtgtcaaagttcgagtaatataatttagtaaatatcaaatctggggagcatgatttaataaaattgaatgaaattggataaattaaagtctttaaattcaacaatctcaatagtttaggaataatttttaatggctagaaaagtttagagaacataattgtgtatgaaaaatttaggaggcaaaaaattctaattcaattggtataatttaattataat

SEQ ID NO: 232696 - DNA, 1089 bp, Cannabis indica
catatttattctccttctttttttggtcaattaccatctgtctatcacttcctttccctccattctctcccattatcatcttgccttttttatctgcattcattccttcctcattcagctcaccattattatgcaagattttatctcctctgtcaatctctccaccaatcactctcctatcaacagcccctgattgcgcttgagaattgccaatcgtcgatctggccagcaccggagaaacagaggactccccaccatgtttcacagcaatttcttgacgtaaccatctcgcgccaatggtgtgtgagcgtctccgaggcgctgctttcagtccaaggtcataagctttaaccagtaggtgtggaggtgtgtcgaaagccttctcgcagaacctttcggagtggcctaacagaccacacacaaagcaaaaagttgtcaaatcttcatacttgaaagtcgcagtacactctggacattcttcaattgtagttttcttccttttttcagaggtttgtcaacctgaattcgcaccctcattctcagataatctctccacccccaataaaattgtttggatccattttgacgtacgtaccaacgtagttgcccagatccttcaacactctttccgatcggaaaccagctattaaaccatggatttgaatccaaaaacacaatccaacaggaacaatacatcgtggattctcccctgccttgagtctttcgaagatcaaaggaattctatcaaacgtccacgggcttccttccataacacgatcaatatccatatcatgatagaatttgaacaagaagagatcggttcaagtccttacaaaagtccacgacagattgccataggaggccatcttgtgttgaatagctttaaggtcgatcgtacgatccgtcaaaaaccggcctacaaggcaccaacgatcatcaaactctacttcctcaaccgtatcattgtcatacatcaaaaacccatcctcatcatcacctaggctcatagcagcgtattgttgatccattccagaaagcaagattgaaataacaccaataaacaaaatcgaaatcacacaggcagcaata

SEQ ID NO: 232697 - DNA, 1007 bp, Cannabis indica
ctcatgtgggatttttagctttcgcaaagaaaatgacattggaacagtgagcacatttgggtgccataagaagcgaatctgaatgcattttgattcctaccttttctcttgaacctaattcaaaagcctccaaactcgatcgaatgctaccaaagcaaaaaccaagtagggatatatgacactttatagggttcttattaattatttattttttacctgtcaaactatgaatggctcgtaccatattttagatttagaataagatactcattttgtttgtgtggatctaattccaatgctatatctttaggttctgtaatcttctattattttttttgtaacatttacattatgtgtaagttgcactccctttttaaccttttaaataatccaagaatacccctctttagcacagcctaatagtcccaaatctatttacaaaattaggtttcaaagttgggtgattagttattttgaaaattatatattatctctttgagttttcaaatttggataatagattctcctaaaatcatttgaatttggacatgggaaaaccatcaggaataagtggagttcggttaaagcattaatcccaaattaaagcactatctttagtacatttgagctaaatcttgggatagaaagctgcaattagctcacaaaagagccacactcaatggaacaaataactaccaacttgaagtcgagttgtgtctattaaaaatgatgttataacaaaacatataggggagaaagacaagccaatgacctattgggatgacataagtcctcaaattttgtgagataaaatatattttatacccgccaaaatttgttagagcaagtagtaacttaagttgtctaacatgtaatatgttattataagtagttaactgttttttgtattatttatttaattaaaatatgtaagagtatgttatcttttatagtaattgagaccttaatttacctacaatagtataggtacatggtgatccctcgca

SEQ ID NO: 232698 - DNA, 1142 bp, Cannabis indica
acccctaagaaatagtgtaatggaccaagatcattaatggagaatacttgatttagttcatcaatgagggtgttgatgatgagaggacttggccctgtgattataatatcatcgacatatacaagaagcacgattaattccttgtcagagcctcggataaacagagaggtgtctgaacgagatgctgaaaaacctttctgaaataatgtctgtttcagtgtgtcattccaagcacgtggtgtttgctttagaccgtataacgctttgtgaagcttgcatacatgagttggtttttcaggatcaataaagccagggggctgaggcatatacacagtttcatgaagtgagccatttaagaatgcatttgagacatccagctggttgatcggccaattatttgttacagcaatggtgagtagcaattgaattgttgctggtttaacaacgggactgaatgtatctgtgaagtcaattcctggagtttgaagatagccctttgctacaagccgcgacttgagcttattgactgaaccatctgagtttaacttgatccgatgcacccatttgttatcaactaaggtcattgatgaatcataaggaactaaagtccatgtgccattttttttgagggctatgtattcatcattcatagctttaaaccagttaggatcggccagggcttgtttaagattttttggttcagtttgagtgagagattcaggtagagggtgatgagtggcaagataggctttgggtttatgaaccccatttttggatctggttgtcatggggtgagtgtttgtggattggtgagaggatggtaactgagcaggggttggatttgtggttgataatggtatagtgtttggggttattgtgttgggaaaggaggcatctggtgtagagataggaggctcagtggtctcacaaatgggtgcatctgaaggagaaatagcaccagcaggatcagatggggaacttccagagaatgcaccagcagtaggtgtgtcaacaacaataggatgtgagttagaaattgtatgttccattggaaatgtaaaaaaggatgtagttggaaacagtgtggaaggtgaggattgtacctgttgttgctgttgagagatggattttgctggaaattc

SEQ ID NO: 232699 - DNA, 862 bp, Cannabis indica
attttgtatcaccccgggaaggcaaatatggtggcagatgccttaagtcggaaagggcctgaccaaattttcaatgcaataatgatttctcctcagttagcctcatatatgtttaaggcacacaatgagtttgtgattggagaatctcataacctgacacttcagtcaaacttgctagagaggatcaaaatggcacaactagaagaccctaagctggttaaggctcgagaagatgtcttagcaagcaaagctaaggacttttcaatttcaagtaatggaatttgttatttaagactcgggtgtgtgtttcgagtaatcctgaacttaagaaagaaattatggatgaagcacacactacctgttactcattgcatccagaaaccaccaagatgtatcaagatctgaagccttattattagtggtatggaatgaaaagggatgtagtggattatgcaaccagattcttaacttgccagcaaattaaagcagagcattagcgactcgcaagattacttcaaccattagaacttcaagaatggaagtgggaagacattgcaatggactttgtggtcggtttgcacataaccacaggaatgtatgactcagtttgggttttacaaaatcagcacattgcttgcctgtaaaagtgacgtatacggtggatcagtatgctgacttgtacgtgaaagaaattgttcgtcttcatggggtaccaaaatctattattttagatgaagaccctaaatttacatcgaagttttgggtgagcttacagaaggccatgtgtactagtttgaagtttagtacaacctttcgtcctcaaatggatgggaaatctaaacgaaccatacaaatacttgaa

SEQ ID NO: 232700 - DNA, 572 bp, Cannabis indica
ttggaaggcttgtgagaaaacacaagtattggtgtgtttctgcacccttggccaacaagccttattgaaagtttccaatgcttagaggttggcacttttggccggccagctataggtccgaccaagactttactggcaggtgtgtggatcccaattagcttgtatgtaccatgcagcatagaatctcaaaggttaaggagttactcggcactaatcctggcaggttagtgttgagttgtctcctacgtacttttcattttttgccacgtggaggagccacgccaagtggacaaaatttaggataacatttgtccctcaagtctctgtctgaatgtctagttgggtagggacttttcactctattttgtattgcaacttcctttgttgtgtaggtatgcatggccagttattggactctttgacttacgtgacttcatggcagttattaattttacattaatcaacgtgagaagttgtgcaacgactgcacattttcccatattgcaactcgtggccttttctttcccatgcatgcccatttttgtggcattaactcctcattaagttttttt

SEQ ID NO: 232701 - DNA, 823 bp, Cannabis indica
tcatgcggtctatccaatttaccaaaaattctggctgccacataagagtgagtggccctagagtcaaacaatacagagaagtaagagttgttgaccgagagctgacttgtaaccactgaggggctagcttctacatcagcctaagtgtaaagaccgcttagttttaacttggaaattagcaggtaattagggtttaattatgaaactagaatattaattatgattatcattttatagtgattcatttgaattcaggatgtattatttatgccatatatggaattttatgtttttgtatgttttgtgccccgcaacattggaatgcggcgtttggctaatagaatcatattttaatatttttgtagtagcggggaaacttagttagatattgggaatgttgagaattattcgaggtttagaaatgaccaaaatacccataagtgacaagtgtgctttttggcttaggcaagggcaaaatggtcatttttgccttttgtcatttttgccctttagtgagattcatttaggtttattattctgattttccttagttgatttagtaaataatacctaagtatattatttttattattcataagaaaaatcaagaaaaaataactatttctctctctcgcaccctagaaccagcaagaggttagggtttttgctgcttcaattcaagtttgcatcaagtttgtagggtttcaacttcaggtataacccttttgtactttcctttttgaattcttaggcttgaagttaaggttttatgcatgtttttgggatttaaggttgatgtagatgttgttttgttttgtttgag

SEQ ID NO: 232702 - DNA, 758 bp, Cannabis indica
ttttttttttttttgcacatgatgctggtatcttttttaatcaaaataaatattttgtgtgtgatgtttttgttggactttgcttttccaccttgttgggggctaactcattttagtttttccctattagtaggatattatctgctttgggtctaagctctcacgattttatttctgggaacctttccaaaatacttcatattaatggagtagtgtccatccttatatacccatgatctttttcatttctagccaatgtgagactttagttgcacacccaataatcctccccttaaatcaaggaccacatacccgtggcctcccctccagcgaaaccaccttgcactgccgttatcaacacgaatggaactcgccgcttgaccatcaactttgtcagattgactttgacacaagtcctaacatcgatctccatcttgtaccaccgtaattattaacgagacacgccacctgactacctcaatatcagatagactttcaatgcaagacacaatatagatttttaatcgcaaggtcatcacattaaagacttctcccacacatcgcaaatgcaacccattatcccagcactcgtgaatctttagctttgataccacttgttgggccccattctttaatcttgttgggctaccacctcaacttgactccaacattagtatgatattgtccgctttgggcctaaactctcacaattttattttggacaccttcccaaaaggcctcatactaatggagtaggt

SEQ ID NO: 232703 - DNA, 1382 bp, Cannabis indica
tatatctcggacaaggggttgttcatgaaaaaatgtttgttcccagatagtagggtaccataaatccttcccagggggttggtcaccctaaactcttaggaatgaagcttccaacactccctgctcctccagcgttggttgcggtaactatcgtggctttaggaccaggaaacctatatcccctaaggctagctccaccaccagttaatggacatgtaacaacgatatctagtggactgcaccttgcgagaagcactaaaaactcctagaaaaggtacctgagggagttagacagagaggggaaaacatgtgcattagtacaatcaccgacccagcatcctcagacaatgagtctgccaatcactttcacagaagaggacgcccaacaagtgcattttccccataattaccatttggtcattgaaggccagataacaaacaagagagttttcaagatctaggtgaataacgaaagctctatgaacatattgttcaaatttgccttttaggcgagtgggctcactaaggcggacttgtcaccttgccctatctagttgcaaggttttaatggggatgccttgatgccaatggagaaaatccagctacttgtcactcataaaggagaaaataatatttgtgccttcaagcattgtacttttgtagtagtggactgccccacgacatacaacccaatactaggatgcccagtcttagtggaatttagagcaacaacttcaatacgacacttatgtatggagttcctctacaacaacagatgtgttggggtaatcagaggtgactagaaaagtgtaaggagatgatacaatgtctcagtttagacaatgctcatggttcgggaagagacgtctattgctcctggaatggaaactcaagcgaaagctaaaaccatccattatgattttgaagatgagctaaactacccatgtaaggatggaacaaatgcaaagagagccgaaccaggagtcatgctgatctccccgtaagaactctacaagatacatcacaaagtaagcaaggaaatgcttcaacccaaaagagttatgttgttgcaactagcataggggtaccttgtagaaagtatagtccaccatttttgatgcctttcatgattgctagaactccactgcttagcttcatttgaccagattctactttactcgcaataaccaagtcatcaagcaccctaatgaaaattggatttctagataaattaggcacaaatcttactattttaggattctgattatgcgatcatacattttgaattttgtagatcaggagcctttaatctctcaagtcaaattattccctaggatcactttccctccttttcattccctataatcaaacatgtaactctt

SEQ ID NO: 232704 - DNA, 1236 bp, Cannabis indica
gagtcccctaacacctttaaaacatcattttttcaaatttttctagacttttggacgaggaggtcgtggatctttctctcgaattcaggacttctaggccctaccccgtcatccgacttttgatggacgacgtgttcaatgccaagccaaatttggggaaagtttggccattctgctgtctcttgtcgttttcgttacgggtccccgttgacgatgatctctccaacagtttcgctggcatgcggattactcactcctatgatcccaactggtatccggacactggtgcgacatatgactggtgatgctcgtttttaaaatatctataaaaattaaaaatcttcatattttctttaatttttgtatgcattgtttaattaattggcccccctactatctcatcctgactccgccttaatttgggcacacatgttagtataatcgtgtgtctaccgtcagttatttcctaataatcgacgggataggattaataaaacccgattgcgatttccaaaccccaaaactgacattgtaggtatagttatactatatacttacattttttttttataaaataaccgcttctaaatgtcaatttttaattagcaggaatattaggaggctttaattagcttccctttttaataaaccgtctctatagggtatttttgtagtagttttcacactcaatggataccgctgctactactcaaacacactctccactgaactggaaccccgaccctttttcaattctctctctacttccctcactgtaaagttagatcaaaaaagtttcatggcatgtaaatctcaggtagttcacattcatcagacacgatcttgatgacactcttttcattggagttccccctcctcaagctcttgttactagagaaccaaatccttaatacctgcaatagaagaagagataattagttacttctctcatggttacaatcctcaatgacagaaggagttcttgctttgattaccaactatattacttcttactcgtggggagagctcttgagcaaaaattcaccaatcaatcgcgagctagacttcttcaactcgaaggtaatttctctcacataaagaaaggctccatgtccatctatgattatgtggacaaattaagtctagacgttattgctggctctattgttagaaatcaagatgttatacttcagctgctcaatggactagctccagaatacgatccagtggtctcga

SEQ ID NO: 232705 - DNA, 997 bp, Cannabis indica
agcattttaattgaattgggatagaaagagaaaaattgggagataagatttggctcccataaggggacccctccctttgaaaacaaccagccatattcttacatatcagcataatgattgtcctactattaacataaagcagctgaagaatcaagtctatccataaggttccaaacgtccatggccatcggtctcaactcccagtaagaggaaatgaacatacaattatgtaaaccgacacaattgtctataaaaaggagagcaaaatcaagcttgttagaagatatatacggttaacatgttttcaaaatcatcatccgtagcagtacaccaattgctactatattctcttctttttctccaaacttattattcattggcaacttcagccaattcaagtactgctaaaaacttcattgaatgcgtctcaatcaattctgagctttcagttccagtagtcacaacacttttcacaccaaacacatcgtcattcacttctgtcctcggatccacaccaactaatctcaaattcttagagccctcagttccgaaaccccagttcatctttacaccactccatgattcccatgtccaagcagctgtgatttgctcaaagcagttaggcttccatttcagagttcgtagtggaggccacgactatgaaggagtttcctacgtgtctgagatagaaactccttttattctcatagatctcatcaaccttcgactcgtccatgttgacatcgaacataactcggcttgggttcaagctggtgctacaattggagaactttactacaaaatttctcagaaaagcaaagtccatggcttcccagctgggatttgcccgactgttggcattggtggacatatcacgggtggaggttacggtgccatgcttagaaaatatggccttgcagctgataatgtccttgacgctagaatcgttgatgttaacggtcaaattctcgatagagaaatgatgggaaaggacttg

SEQ ID NO: 232706 - DNA, 1646 bp, Cannabis indica
ttcttgaaagggaggagagagacaatgcttgtagagaagattatcaggtaagtttccaatgacatccaaatttgtagaagccatgttggtaatggttttttttttttgtttcttttttcgtgggtgaatgatacagtttgagtagtgatagatttgattttgcagtggagtatataactgcaacaacagttgtaacgattggaaatgaagggttgcattgtttaggacaaaaatggtaaattctgaaaaggtttcttttccatgtcgatgaagaatttttttttaactatctatgaagatttcatttatttatttattatttatttaattttaatatcttgaggtagttttttttttttggaaaattctatattaatgcaggggggacctatgctgctatgaatatagttacggaatatttttgctttgtagggctttattgttatatatatggccaataatatagtacctcaactgtgattgaagtttttaacacctaaaaatttattgagtgtcattggataattaaaaaaaaaaaaaagaaaaatttgaaatttaaaggctatgattcaccattgtcaagtaagggtacataaaaatacaaactggcaaccagtttgtatttttgtgccactatctaaatttttttaagaaaaaaaaaaaagaagtaaagtaactctggttatcatcttcttctcttctatcttattatcttctatctgcatataattccttttgttgtttttttttttggtgtaatctccaattttagacagactattagttaccaaaactccagccctccacactcatcacctccatcttcttccctttgttctcatggttgaggaaacttgcttccaaccctcaccatcggcaatattagctccagcaccatttcatagaaaaattcatggcaccaacgcatactcattagttttcctatatttgttagtatagagatcattattaattctctctatataattatagattgcttagttatatttcactgactatactcttacttttatgcactacatattttactgttgtataaaaaattatctaaatttttgtatcttgtttgcttgattcatttttctttatattgatccagtttaagctcctcctcttattcaatatctgccttggttcacatatttattattgctaatccatatatataattaatacttaagcaacatataatggaacaaaatccaaagacaaaatgaaagctcatccaaaactaattttttttgtagctcattaaatttttcgtagcttactcatatccttctttaccaatagatagcgagtactctcaaaaatgaacatagtaccaacacactagtctctttttagaattgtgtttttaaacgtgagaataaaaaataaattttttgtaattttaaaaatttaatagtgtttgacacaaattttttaaaattattttttttagattttttcttactaaaaaaattaatattttaacaccaccacatgaaccccattcggatccgagtttgggtttggttccgggtctagaattcgagtatgtgatcaaaaatataaaacataatatattagacaaaaaaaattatttttgaagattaaaaatacattttgatgttttctgtttt

SEQ ID NO: 232707 - DNA, 653 bp, Cannabis indica
atctgaaacagtctctgcagtggcaatgtttgttgaatgttgctgaacgtttgcatttccaactccaggaaaatccatattgaatctttgatagcatcgagaagctacatgacctgttcttgagcataactgacagacaggtttggaacctgagggaacttgggagttggaggcagcaaagaagttggtgaaaccacaacctacagcagcatttgagaaagattagccagaggaagtatttcttgtggagacagcatacgggttccaagcaccacgaccttgttagtgttggtgttgggaggattgagcgatcgagaatctgcattgttagagagattgggggaatattgtggtttgaaacaagaaccacgattagtagctaaattcacagaatcaagttctctactgtgattctccatacgatgatcttgagacaaaagcaaagtctcgatttcagccacagagtagggagaatttcttgaattgacactaataacaaaagtgtcataagcaggaggcaaatctttgaatattgcagcaacatgttcttttatagtaacaagattaccaatagatagtaaacgatcaataatagttttaatccgaagtagatattcattgatagacaaggaacctttcttttgattttgcaa

SEQ ID NO: 232708 - DNA, 3005 bp, Cannabis indica
cttttgaggatgaccagctgcttgggaagcaaacaaaaaggaaatgcaaagtaaaaaaggaaccaaaaacaaaaagcaaagtcaaaagcaaaaagaaaagttaaaaaacaccaaattaccttctccttctccctctactttgtgacttctgaactagggccaaaactcagcgttttccactattttcaagccttttcttagcttaatttcatcaaggagttcagcccctagctcctccaaacttctaaggtaaaacctaacttgaaatttattagttttcaagggtttttttttagttttcagtggttgtttgtagtagaacatgttgaataagtttataaaggttatgaaataattattaattttatttaggactgttcataagtggtttgaattgttttgggtggttgtagcaaaagttatgcaagtttgagttcaaagaactaaaaattaacttgtttgtgataacttgaattatgttgtgaactgggttaaggtttcttcgtaaaatatgttcactatgatgtttttaggtgatctaaaaaatttggtcatgtttggatcagtattggaggagttatgggatttccatactcggacagggaggtttcaagccatctgatttaggtaattttaggacggggccatttaattttatttttgttgataatttgattaagatttcttcatgaaaaatatttattgtgatgtttttagataccctgccaaattttgtaaggtttggctttgaatttcaagagttatgtaagttttaaaattggatagtggagtttttggccatccaatttaggcagaatttggggttccatcttaagacttttcctaggaacctaattgagtgttttctcaatatatagggtatttccatgatatctatcaataagaaaacttttagttgtcaatttaagtcccaaaagtattagggcaacacttattggtttttctataaatgtgacttagggcctttgattaccagcagctatttctactgaggttgaccgacacacttgaaatcaaaattgaggtaagactagtataacacacatacatatgtacatatttatatttatgttttccagatgtatgacatgtccattagaacgatagttggtgtatatatatgattatatttttatatcgtgaatgtatgtgttttgcaattcagaaagtatgaaccaatgctaccaacactagtaagccgaattactgagtgcatatggtattatggttggttatactttcgaaagcatgaactagtgctaccaacactagtacaccagaatactgagtgcatgtggtattatggctagttgtacttatagtataaattgatgctaccaacactagtacgactagattacgaagtgcatgtggtattatggtcaattatactatggtcaagaacgttcgagactcaattatacaggtttgcatggtttatgactttttgataggtgtatgggcacttagtcgtaggtcggttatatatttatgttttatgcttttcttactgagtctgtcgactcaaagatgctatgttatgtgcaagtaaagccgaagctattgtttaacggtagtgagttttgagctagatgaagattgtacatatcgagacagattgacctggagtgttggatcttcgtgagaactagggctcacaattttgtagtcgctgtgcgacatcttttcattatgtatagttaaaaaaatgtagatacgggatctcagattttataaatgtaatacaatatatgtttatttattaaagtttaaattttattacttttgataaactctttgattagaaaagtgtgcacaatttttattaaaagtactatagcctaaactagtagggtgttataattttagtatcagaaccgccaggttgtctactacaccatcaagatatgtacaatcatcattagagataagctcgactcacggttcagtaagtctttacatgtttttagtagcttattataattagaaaagcatgatggaaacatgttagtgatatattgattttgattatgtgtgtgtctaaggaaatttcagttcaagaacagtattttagagttgtgaagatcttaaaaaagaaaattaaagaattccaaggaagttttagaatccttgaagcaagctcagcaaaggaagaataaggaagaagttttcaaaaaaaaaaaaaatgacgctgaaaaaaaaagaaaaaaattctaccttggcgaatgaagaacacctgaagaactgatgaagatgaaaattcaaggctctcataaaggcttgggcatgggaagctgtgtgggaagtgagaaaattttgattgaaaactctcttttttataagtgagcaaaataccttaatcctgggagtctttaaaattttaagcttaaaaggaaaagataaatgataataaaaaggtaataatgttttctcttctccttattgcttagtggatttcaaaattcctatgagaataggaatatgaattataaatttaaaaggtaacaacaattcttaatgcaattaagattaaggtaaatctagagtttaaaaagaaaaagataaatgataagcaaaatatcaaagatctgttctcttcttcttttttgtctattttttgaatggaacatccaaataggagtaggttttaaatccaattaatcttaatgctatgagaaatacatgaaaattttaagttttcaaagaaaaatataaaagataagtgaaaaaagataagtttttcctctttttcttagcttaacaattaattttcaaaaaaaatcccaagtgcaagcataagcgaattaaaattcctaattctattgggaatgcttgaagaacagaaacaatcgtccaagattgtcaaaattgatgcccatatggtagtttcgagagaaacaggctcagtcacgtcatcaagtcaaccccacataagtgtgaagttgacttggaaggaaatgttaactcgaaaactttccctggtg

SEQ ID NO: 232709 - DNA, 1566 bp, Cannabis indica
gaaaaaattaaaaatatacaccataataaatacacagaaattaaaaaataactatacaataaaaaatacataaaaacagtagaaaaacaactataaaataattataaaacacgtaaacaacaacatgaaaataattatataacaacaaaaagacaattacaaaaataacaaaataataacaagacatcaatctcgttgcaataagcaaatcatttataaatgaactctgaataaactacaaacataaaaaaaaatactatttttattaatcatgtaagaaaaaaaaaagataagaggagtgttcccaattttttttttttgtaagagagaaaaagtgtattaaaaaaattatgagaaaaagtgtgtaagtaaaagaatcttaattagaaaatattaaaagaaattaattaagattttttttttttaaaaaaaatgtgattgattaaagaaaaatagtatgaagtagtttgagttttagtagtaagaaaatgtaaaagaggaaaaaatatatagaataattgcttgtaaattttttaagaaaaaaaagaataaaataaaattttgtgcgataataaaaaagtgttaaaaaatgatgtaaaaggccatatttattatatttatattttatatacatatatatatgttacacctatatttcgagcaagcaatatggttatgacctgtgataagaagctggaaaacaaaccagctcgaattatgaagaaataaatacgttcaataaacttgtctcgaaaaatacaattggtagaaatattcaaactcatcattttaaagataaggacaagccatgaataacaactaccttttataacaccaacgaggcaagtaatcaacgtagaaggtccatctcgggatacacagagtatactacagaacaacagtcagttgaaaaagggtagataatgagttctttaagagcttgcaaattattgatccacatactcgtgagtatgttgaaagactaaaggatatacacaatataattcatctcataattatcacattatgatagtgtctcgcgtttacttctctcaatattacagaaggacatgagaagtattttccaagattatacttagacacaaagttatcttcagcttcttaagatgatcatttatgtcgtaaagagaagagaagtagtcagtgtaactgcgtatagataaagacaaaagcagttatagcaattatttgtttttatctcatatgacgtaaatatgaaacgtgagaattgttcatatttcatgaacggttacatggataagatctcaagagaataattgttaccttaaaatacctataaataggggaggatcttccaaagaagaggacgaccaatttcagaaatagagaatgtaattcaaaaagttatatcttgtaatatgtattttataaacacgtgaaattccaaaaataagacgggctcatggagtatgaagagttaactttaaaaccacattaaaaatcttcttgttattcatgtatattattatgatttcttattattctagagtttatttattacattaaggctcatttattggttaa

SEQ ID NO: 232710 - DNA, 1229 bp, Cannabis indica
aataattaatttaagcaggattagaaagaataaatattacagacgcattaattgttttattttatcctttttggacagaagctaatattaaagaattttaaaaaatattatcgatcggattgtaatttaaggtgaggctagaaataaaattgaggagcaattatatatttttatattattatgacgttaaaattttaataaaaaatatagtattagatataataaaatgtaaaataatacacaattatgttaaagtaagtaattatgtagagtgttgagtttgtgactttattcttaatttcaatgtttaaaagatgtttaaactaggcgaggtaactcgatctaatataatatgaatccagtccaatatttacaaatttctgctctgaaatcaaatcaacattacatatttatagaaattataaattaccccaatacttaagtatattcactagaaaccacataaccaaattccttaattcttcactcaagatccccaagagttagatagttgaatcccttaagtatgatctgaacataatttgtcagaaaaatgctaacaattacatacaaatatgtttttgctgactacttaatactgaatgttgtggtatagtattgtagtggtgacttcattttaatgtactggttaaaattcgtcactttttagcttcacttttaatgttaaaaaacataatatattattaaaatatcattgatagaatttaaatcttgtgcaatgtaaagtacatcgaaactattttgatataattaaatagtaatttatattttattatatatctgagtatatgtagtattatatgggatgtaattctaataacaaaaaatatcaataatttgctatacaaaatttaaattaagaggacttaactgactttccgagtagaagtcttcacttataattatagcacaagagcttaattcaaataatggtttagtttcctggttgtgtatcaaagaatggaaaagtattagagaattttttttatttagttttttatgacaacacaacataagaattatgtcaagtttgattagcctaaacttttgtatcaacaaaacttaggactacaattattatttgacaactacatacggtccgacatccccaataagttgggtctgctttatctgtatttgtatttataaatttgatatatttatatatatatttataatatatacacacacatttcattactgccttt

SEQ ID NO: 232711 - DNA, 1783 bp, Cannabis indica
ctgaaatcaaagaaaacaagcgtaattctattctaaaaagaataacaaagaaggaaaacaactataaaaagtgacccaaaatgtaggctaaaaatagcctaacattagtatttctactttatgattttatttgcatagacattttgatttcatgttctgtaaggaatgttgactttttacttttgaaaattatttattttcagctttagggttttcatgttcgttcttttggcctataggcactctaactttgaacattaatattgtttagccctacaactttttactatggatatgtgaccgaccaggcgatctttaatcttgtctatcttcttgttgccttgacatgtaagtatccaggttacatttttttgtgccaatctaaagtatgcctacacttgacttagaggcgggtttagtagcttgtactacgtgttaaattttttttacataagttttatgtgctagttcgatgcattgtacggtgtgggtaacccctacgtgagcacgcatacttacggtctctttgtcacttgcaattcaccaagtttcatagaccttgcctggaaattttcttggagtgctacctgatgtatatatatggaattgaaaaagaatagctttaagaagttagtcttgttagcaagtggtttagacacaacatatttgaacataaaatattattttttattctttaattggtctttattgatgcataacttacataaattgaatctacaagcttatataaagtccacttctagatatcaaattgctacccctgcttgacatgcaaaacagaggccatcgttgatgaatgatggacggccatgccaaaaggccatgagtactagctcttttactctaactctaatgatgagttgatagagctgctcctaaagataacattctataagacgatcattgatagtatttgtggaggacgctccccattccaatatattggtacgagaacaaactccatgctctcgttgtacattcccagcttgtacgcccccttactagttatctctgtaacttggtaaggccttcccagttgggttcgaacactcctgctgttggatctttggtgtccaggaacactctttggagtactaagtctcctttgaattttttcttgtccttgacttgttcgttaaagtgtcttgcaaccttttactggtaggcctacaactttaggttggcttgatctcttctttcttttatttcgtcaagggattctactagcaagatgctgcttgtatctttgtcatatgttatcctcctgtgagatagtggcaccagttctactggaaacatcacctcatagccatagtgtgacagtcagtagtcctgtgatccgtaaggggaaacatcgggtaagttgtgcaatcccacatcgcctggggaaggtcaagcgtgatgattccgagactgtgtaggtatgggactacacagttgaagtgggcttaaatgacgttgatgccaaacaggcagtggtggaggaagagctcacggaacaagcttcgtttagacccaagatgggtcgtgcgacctaattggagccaaggatcttcgtgaaccacaatggtccttctattccattgtcattgtcaaccagaggccaggagggctggtcgacatcacctatactcaagccacgggatcgttgggtcccacggtggcctttggtcaaacccgaacccgagtttgggtatcctcccttgttcatgcatttttcatgtgcatggcaatgcatggcaaacattcacacatgaacatc

SEQ ID NO: 232712 - DNA, 1125 bp, Cannabis indica
ctacttggcagccaagcccaacttatcccttggccctttaaacatttatgggaaatgggctttcaaactttaactgggcttggaacggtggacaagtacatgagggagccatctttattcaatcctctcatggagataagtgactttaggtccatggattatgagaacggcccaaagaaacgaaagactttggatgggatcatcatcgggcctggaccatctaaatgtaatgaactggacacaaaggcagaagaggcggtcaatatgtatgaaaatcacaatcaatctacccagattatcgaaggtaagataacctcccccaatgtaatcgcagacggctcgagtttctccctaggatcggtggaagaagccacgatcagaagaaagaggggcagactggtaaccaggatgaatgaaaaggctacgattgaaagtctagagccaatacaagctcagcgacgaagaggaagaccctcaaaagcaaacacgaatgtcagagtcaaacccacctccttcaaaagaagtcacaaaaatagagcaactaaacagaagcaatctcttaaagctcactgggacaataagctttttgacttgatagtggatcttgataatcattttgtacttgtcgatcgaagttatcaggaaaagcctacgtgcaccattcaggagataaatttggagactcaagctagtaatgggaaaacaagccaggctttttgctttggggctgtggagacttgcccgaaaatgtctcccaatgccccatgagagccttggcttggaactgtcgtggtctcgggaatgcagcgacagttcgacaactgaaggagctaatccagaagtcgaatcccgaagtactgttcctctctgaagctaggctgccacaagacaagttcaattgtctcatgagaaaactgcattatccaggtatatgttatgttcctcctcttggtacggcaggcggacttgctctatgttggcggttgggagtggattgttcaatacagagtgtggataaaaatatgatcatgggaattatcgcctctgatcctattgaccatccgtggatgattattggaacctatgggcctccggcttatggggaaaatgaagctttttggaaga

SEQ ID NO: 232713 - DNA, 1511 bp, Cannabis indica
gggaaaacctttgttccaatccaaacagaaaagttataagtttcaactttgggaaatgaaaatagggaaggaaatatagatagatacaatatccaaggtgtggttgaggctgaattgggtagtgatcaaattcaaaatattctttcttcattagtgaaatgcgtacacaaagtttaaaaaggaacaaaaattattaaagtaatttttgaaaccatttcaggactagtttgttggagtttattataaagattagatgcttctttttaggagtgaacaatatgaaatcttccaatatatttcacctacgtactttaataatgacaactttattatttataatattaaactttttcttcaaaagaaaggttaattaacctaattaaacgatgaaataataactgcaattaaatataaaaggctaattagtaatttttctttcacatgtagtaaatcgtgctcctgaattttttttgccgttaaaaatttcccttgaactattgaaattgttaaatttaagaatttttgtctaatttaattcaattttactgtttcagtgattgtttatgtactaaaccatactctccaaattttgatatctaccaaatcatgtctcccaaactttcatatatattaaattatgtctcttgaactttcatacatgttaaaaattttttactaaaattagacgaaagtaatgccaaaaaaaatagtcatacaatcatgttgtttatatcttctcttttttattatcttttaataaagttagaaaatgtaattatttaatatatattaaataataatataatattattttaataatttttagggtcgcttaccattagaatattttagaataaatacccttaaaaagaatatcatgggagattactttgtttacaaaaaaaaattgtagaccctacttattaattcatagttcaaaataatttttttatcatttattcatttcaatatataattaagttattttttatttataagtagaccctatttatttggaatacaaaagagttttttagtcaaatttattttatagttattttatttatgattaattgtaaatttaaaaaaaaaaaaaactacaagtagtttataatgtcaaaaataaaatttacatattttgttacatgcacgattatttttttggataaattgcggcataaataactaatgttttcgattttatacacttaaatacctaatgttaatttttggtggtaaaaatacctaatgttacaattcacttacaccgttactaccacttcggttattaactcataaatatggacaccgagaagacccaaatgcattacatttatttattttattttaaaatttaattaattcttaatataaaaactaaaatattaacttgttttttaaaaaaaattaaagtaagagatgcaatattaaattaccatagctgagtgaactagtgtagtatatagaacatgattatcgaattgaagtgtcaatatcatatgaaaattgtt

SEQ ID NO: 232714 - DNA, 2281 bp, Cannabis indica
tccttcaggtttggttaccactgcgtcttacttactatgatagagtacttgacttgctatgtgtgggcacggcactcattcactcaaggtttcaaatgtgaagaacaatgaaggaggctgaaatcattaaggaaagaactctcatctaggttggttgaatagtcaattataacatttgttggatgaatgagagtatcatgttcctttttagagttttttcaactatggcttagggttgaattatatagattaaaaaaaaaataaaatattgggcaaaaaattacactaggccgcacacttaaagtgaacaaagttctagttagatttttgtgactttatttcaactacttattcttctttttaataataccatcttttccaattcaatcctataaatgccaaaactatttatttaataattataattaattatcaaataaaattgtcatttatgtaatttagtaattagaccatacaaattttcttaatcaacaaattgaccccaaaacctcgtttcttcacaattaagcccttgcttagtgaaaattcataaataagacacagtctaattttagaattataattgattaattaaaatcaattaactaagtttgcaagcagtattatctcaaaaagtgaggggatcgtgggcctatataagcgagctatcaataattagatttagaattcaccaagtaaattctctaacttattaattctggcttgcgccactatagatttggaattgaacaacactctcagttatatacaacgctctatatgtacctcgatatagatacgttattatgatccattgctacaatcgtcatagtcaaggatcatctatagatgatctatactgaatagggacaaatttaccattctacccttcaatttatgttatccttaaaacacttagttacctataaatgatattttagtaaattaatataattactgaaatgagatctcaatcatttatatctatcaagccaagctcaaaggaaattatcgtttcatttctaaatacttatagcagctatagattataattcaaacaagacactgcagaacactctttcactataaaacttcagttatctttttaataacattatttagtaaaaatgtaaaataaaattatttagtaagctaaaataacattatttcattctccattgaaataagaaagacaatttattatgttacatatatcttatgattgtctacatagctgtactgtagatgttcttacattggagcatacacagtacacccggacaaaatatttttatcataaaatcaatgtatgcatattataaggactaattaataagagaaaaagatctatttaagatcattaatgacgatgcggtggaagaggtgggatgctttgttcatttctaaaaaaattattgggatcaaccagggttttcacttttactaccctgtcaaaatttttaccaaaatacttctcaccccaaatactttcttgtgtgtaattatttggactcttgggatcatttattccagtatcaaggtctctataattgagatatgccaatcttggattttaggacacataaggagtaatgaagctataaacatttcgaatccagtttagatgctttttcgttatcttcgtgcttctcccagctacatatgtaccataattcatacatgattccagctcaatgagggaatggaattgctgattctgaaatctcatccattataccaccgtaagggtacaacgcatacatcccaactccttcatcttcttcatataatttttccaaaattttgacaaacgcagattctggaattggtttcttaacgtagtctaacttaatctttaaagaaccgttctgcccagctgatctatcaagcaaaatttccttattaaaattatcagtgccgtaatttacaacaccgctataaaagatgataatatcaatctagctcaattgtttgcaatctgtttttttaataccaaactcaggaaaactcttgttcattaagtcgactagactatccactccaccaaggaaaactaaagagaagtaagtgtgtattgttgtcttattcttcccttgattatctgtaatattcctagttatgaagtgagtcatgagtaataaatctttgtcatacttgtaagcaatattttgccatttgttaactaacttgacaagctcatgtatctccatgatctttttaacactaaacatagtagactttgttgggacagcaaccagtctaattttccatgctacaatga

SEQ ID NO: 232715 - DNA, 575 bp, Cannabis indica
aaaccttctatgagtgaagaagggtaaggtctgcctccccttttttcattttgattaccaacattatttatatctcctatgatacaccaaggaagttgagattcagtagagagagtggtgattaattgccaagatttgaatcgaagacttcgattaggctcgccgtagaaaccagttaaacgccatggaggaagattgggagaggcgacttcaatatcaatatgactattagagaagcccagtaatcgcacaccatcactggaacgccacaacattgcaataccacccttgtgaccttggacatcaacacagtaggctccttcaaagcccagtttaattctaagcctttcaatagtatcttttctgcacaaagtctcacacaagaaaagaaagttgggtttcttttgaacaacaatgttctctaggaattgtcgggcccgtgggttcccaagcccacggcaattccaacttagagtactcataacgattggtgggcctggacaccagaacccaccatattcaagttttttgacccaggttggaccgtagcagcaagaggcccaatagctttttct

SEQ ID NO: 232716 - DNA, 2281 bp, Cannabis indica
cattaccccgacctcagctcaacattaaaaataaaactgactccgagacaaccccatcttgggtgagatggcctatcttggggtacacccaaatgtttgtaacgatcaaggcccaaggagatatctcgaggtagccaccctgaccccatgaagtggtgttgcggcatgaaaaaaacaaggcgactcaaagtcacaactacaacactctccaagcaatgattgttcaacaatttttttaaaggtgcatactatcttcacaaacactttttttctcaattttttgagaatgtaagcatcaagagagggaaaattaaaattctccatgttcttgatatttttctaaagctcaagaacacttgcaaccaaaagtttcaaaatcaatcatttcttcaccaaatgtcatcaaattagagctaaaaactcattacccatagcctatgctacaaaaccaatcatcaaacactcacatttcataaaaaaacaaaaaaatccaatgattcaatgccatttttggccattgttgttgatggaatttcgcaacaccaaaaataaataataacaataataattataataataatatgatgaacaagtgcgagtattcaacctagaacagcgagtactcgaactgggaacacaaatacttagcaaaaactggaaatacaaagaacacaagggaatatagtggttcagtcagatcacggtctgcttagtccactgttgcaaggattctgtaggtgtctcatttcacggtggatcactcctttatatacgaagcaagtgtccgattatttacacaaggattgcattcattgccaatccattcatacattgatttataataattaaactaaaacgtaaacattaataaatagtgaacagtttccattcactaaatacagcaacgtatgcgacttctaatgtgcgagttggctgttcgtattcttgcataagcttgtgggcttagaatacacctaacacttagttgagtgtaagatgtctgcgttcttgtatagtcgcacttacggacatcgtataacaagctgatagaacctagacatgcgagtctatattggtttatcgaggctgttgggtcatcgggaccagctcgctttatagagaatcgatctctgtgttttcgcaggaggattgagaggatactcgcatatattgtggtatatgcgagttaagtccgttccttggtcctacataatgcgagcctcgcgaatgcgtttagacttggtcatgttcgcaccatctcgctgagtttagctcaggcgaggtttaaactcgaggagtctcccattgacatctcagctttccttggggaaactgagtacgcgtgtcctccaaacagaagtttggtctcgagtttctaagtgagaaaaatctcactataacagccgtggaaaaattaccaagaagaagtgccaaaaacttcatcaatttcaaatttcaagcaaggaacttgcaagaggaaatataaagaacttacctgctatgaagatggaaaccttaaagcttctaaggattattataatgttatgagtaatttatatattttatctttctaaatatttagattttattttccttataatttatttttggttacaaagggaaaaattttcatttgaatatgttgtaaaaatatgaaaagtaagagaattattttttgggtttaaaatattattctagtataagcatgacattctcgtcaccgtaccattaagtcatcaacaactaaattgaagtgcagactacaccgaaaaaattcgatcatatagtcatatcgtaaaaatttgggggaaatgtttacctaaattttgacaatagtgaggtggaaaaaatgatgacacgtggcacgaggacacagagactagttgatgcagaatgtgtaaagtcatgaccgattgtcatgaccgtacgttagaagataagtctgacgatcacctttacccctagcttgagcaaggtggtttccctccaaggaaaaaaatagtggactaacaccctcataggtggaataaacaatcaccacacacctacgagttaaattagcctaagggatagatgccacttcccccaccacaaatgtagcgacattcttagtgattgatgagtacatcctcatgacactaaggctacccacaacattgaaagagtctcgggagtgtcaccccgagacagccactaacaccttcctcatgttgggtcttggaagtgtcacccctaagtattagcttctatccccgaaggggttaacgatcataccacaccc

SEQ ID NO: 232717 - DNA, 681 bp, Cannabis indica
tgaacttacacaaaaaccctattggaacaatctcaaacccttgaatctttcacagacgtacaacacaatcggaactctaatagagcttcaagttttttctcccaaaactcgaagcctgcatcaacctcaaatcaaactccatagccactacaagaaatgtcacttttttcagcgcaatttactactgcgcatcttgtaaactgcactcgcaaaaaagttaaaattttaccagcgcacatttgcagtaacaaaattataacttttgccagtgtatttacgtgttgggaaaaatatttttgccagcacgtttcattttaccccagtaaaagttctaatactaacgtttatttgccaacactgaaagttaatactaacgtttatttgccagtgtactaacgtttaaaaaaataaatattattaaatattattataatatgtaaaagttttaatcgtatataagttgtcttattgtaagagtatacaccttatattataatagccacgcgatctaaaatcaatggttaaaaaaagtaccttaccgataagaaatttttggtagatcataccatagtcttgccccatatatatatgtataaatataaaattgagaaacaaaaaataagactttgtcaaaattttatttataatttatagatagattgaattgttgaaatgacgtaa

SEQ ID NO: 232718 - DNA, 1477 bp, Cannabis indica
ggtatgttgcttcccatgcccctaaaccttgggttcaatgtcttttgagcaaatactgccatcatgtttctttttggaatgttgatcacaaggcaaacgaatcctatgtttggaaaggaatcttaaatgcaagagagcttattcttaaaggttcaatttctatggctgctagtggggcctcaattgacttttggaaacaaccttggattccttggttaagttggagtgattttaatgaattgatgaaaaaagttaagggggaaaggttttactataagatctttggctgatttatccctggagggtagatgggatcaggaagtggtatcccaaatttttgatgaggagtttgcaaagaagatcctggacatccctagacttcccattcagcatggtgatcggctggtgtggaaaaacaggaagaatggtgttttctccgttaaggatgcttattatgtagatcaggtctctagttttaggccttctctggagatttggaagcacatttggcactcatctattcaccctagagtgtcaattatgctttggagaattctcaatgaggctcttcctacgaaatctaggcttccattcctatcggagaagacttgtttcttgtgtgggtgtgctgaagagagctgtctgcatttgttcaaagagtgttctgtggttaaagcaatttggtttactggtttattcccctgccaccttgattccatcctggtgactcgttgattcaggcgttagaagccatctgcactacgttctcgaatgtcaaaaagcctcagatccttctttattttggctgtgttgcgttggctatttggcagcaaaggaacttagtgagattaaaaggaggagctgtgaattttgataaaattctttttacgatctcttcctctttaaatgaatttgcttgccattctcttcctgttggttattcaggggctgttactagccctctgcctgctgaaatttgtagaaagggtgtggatatagtgctggtagttgatgcttcttggcgcgatggtgttgcgggtttggcggctgttatgacaaacttcgttaatgggagttgggcttataagactgcccaggtaaaagcatcttctcctttggaagctgaagcgagagcggttcttttggctttggcgtgggcagctagctccgattggagttctattcacctgttctcggactcttcgatagttattaacaatttttctaaggatagaatccttccggattggctaattatggatgtctctttttctgttttagacttggtaaagttgtttgacgtgtgtaagttttcttttattcctcgtcggttaaactctgtggcggatggccttgccgggagcactagaatttctagtccaaaggcaggattgttccttggggagggaatttcccctgtgattcccatcttttgctcttgttgttaatgaactttgctttctttacaaaaaaaaaa

SEQ ID NO: 232719 - DNA, 2143 bp, Cannabis indica
tggcaggtcattatggctctgccaagaggagacgtgactattgtggtgacaggattcaccacatctacaatgttcatcaggattccagttatgactggaacatgagtatcttgacctacaatctgtgggtcttgagggagaccaaaagatgcagatggtgcgatagaagttcttctcgtgttaaccatggtgtttgatccgatacgatacccacactctcaatgaaagcaccaaactgttgaccttaaaaagtgattaaccgacgacggagtcatatggatttgatgcttggcaagtgttacacaaataaagaatgaaaagcaataaacacatagatttgtcatagaggttcggcccccttgtgatagtaggtaatgacctacatatcttttggttgtatgtataccgagggaaatactatttagatcactataggtgggatatgaatcagtaggtagatctcaagtgttggatagcctagagtgttggacagcctaaggtgttggacagccttaggtaggcgtgtgagagatgaagtgagaagagagaaggagagccctattgggcgtgtaccagagagagagagagaatagggtttcaaacctagggtgatttggaggcttagtgacttagacgcaactaaggtttctaggctagggttaagacctttatataggaggcctaaaccctagattacaagtttaacacctagatatttacataggttgttagataaatacaaaagactaaagctccattgaattttggatattattcatccaatatgttgggcttttagggccaaattcacagcccatatttgttgtcaatgtgtagagctgtccagcaaagcctacagtgcactccttggctggccagacccttgtgatggccagggtggccggccagggtgttgttccaactggccggccagctcttgagagggagctggtctgtagcttgatccccttttgagtgtccgggtcttcgtttgctcatgtgttgacttggccttctttttagtgagttgtaccgccacgtcgcattggttttgtccacgtaagcatgccatgtcatgaggataaaaattgggataacacttgggttcgaccttttctgtgtgagtactacttgttaaaacgatacgtatacttgcgtagcttgaatatttcgcaacacaatgtattttatccttcaacacttagtttcttgtaactagattttaataaactaatataattactgaaatgagatcttttcattcaacacctttgaccaagctcaaaggaaattatcatttcacttctaataaatagagactatagatgttcatatctatgattaacactcccactcatttatactaccgatgtcccaaagttcaagtgttggctagaccacaggtatgctttcaacgaaaaaatcaaagaacttcaaatagcacaattagcttaaagttcaatcatgtcaagattcaaaataattgatcaatgaaaaactagttgatattaccttagaatagttataacagtaaatatgattattctatttgtcaatatcgatctcattctgatgtaaaccttatacatctaatataaatttaatttgcttaatccctaggaagagacacaccacttaccaaaagtgtaagtaaaccttattgatgattattacgttaatgtaaattcagtgcactgataaatcatgaaacttaaaatattcgaagcatataatcataattattttctactgtgatgacattacttatgaataattatatgttgtaaatttaaataggatttatacattaaacatataatcacgtaaataaatatgtgaatcaattgtaattaataacgtgaaaatatgatttataaactttattaattaaaaataatattagactgaatttaagttttatttaggacataaaacttaacatacttccatttgccaaaacatttttatatcctacactaattttgttggacataaaaaaaatataaaaaaatggatgatttggttaccctaaaaaagaaaaaaaaaaaaaatagctaggccttcaactgacttgagccgaccttgtggtgaaataagttgtttgttaaacagtttttcagtgggataaatcaaacaaactatc

SEQ ID NO: 232720 - DNA, 1002 bp, Cannabis indica
atcgagtgaatttggttctgcctgattctttgatacttgcatggaataaagcagtattaaaatctccattctgtatccatgatattttagctttctgctataagaaggaagcataatctttctgcactggcacaaaacaattcctcacttcctgttcagtagctaacagtgcatgatttaaaggatcctgctgtaatttctactgaatactctccaattatatcctagttttcagtgtagcagcttgtaaattagagaatcccttcttattaatgtccttaaaaaccagttttagtgctttaagcttactgaccaactgatacattttggagccatgaaatctttgtgtccaaatttccctgagctttgtatcaaacccagggtgctttttccacattctgaagtatttaaatggcttcttccctccttgccattgaggataaagagttagaacatgtggagtgtgatcaaaaaggccttcactcagaaaaccagctccagtactagggtaattatctaaccaagactgattagccattaccctgtcaatcttggagaagatacgatcatccccttgctattttttggtccatgtaatgaaattccctattgcttaaacatcttccaattgacagtacgatatgcaatccatgaaatcagttgtagcatggaatttaactttgtgcccgattctttcatcctttgctaagatgtcactaaaatcccccattagtaaccagctttctttagttacaaatccacttaaatccttccataactccaatctccctattcgatcattgtatgtgtataccacagtaaaaaagctactgtaatatgaattagtagtagagacttttaagtgcataagttgacttgtgcacttaagaatgtctacattgtatcttagaggattccaagcaatggctattctcccacctctatgccatgcaatattagtttaaaaacactagcctgaaaatacatttagctataaagctc

SEQ ID NO: 232721 - DNA, 1128 bp, Cannabis indica
tgcaacatctagctgttcatcaattgattggcctttgatctctttatttatagaggtggaattgtataaaggagttagttacaagacagctaaaccagctagacaaaataacagaaaataaaccaacttgctaactgtaagaacagttagttacatacagtaataactgactaacaaccacctatatctccaatacccccccctcaaatgacactggggaagaccaagtgttaatttgtctttgaaaaataaaaatggagatgctgccagaggcttggtgaagagatcagcgagttgatttggagagtcaacataacgaacatcaagctcttgagcaaggactttgtcacgaacaaaatgaatgttgacttcgatgtgtttagtgcgagcatggaagacatggttggaagctaaggaccctgctcctaagttatcacaccatagaattggacaattggaaacagtaagctataattcagatagtagggactggatccatataatttcagaagtggccaaggcaagagcacggtactcagattctgtacttgaccttgccacaactgtttctttctttgaacaccaacttaccagattacccccaaagaaaatacagtagcccgaagtagattttctgtcatcatagcttccagcccaatcggcatcagtaaatccctgcagatcgagagtttttgcagctttgaatgttaaacctctgtccaaagtaccagatagatatctaagtatacgtttgcaggcactccaatgttcagaggttggtgattgcatgaactggctcagcttgtttacagggaaagcaatgtcaggtcttgacgtggtaaggtattgcaaggcaccaatcacacttcgataagtagtaggattttggagtacctactgaggaggacaactttgtggtggagcacaagggagtggtttgaggcttggagtcaattaattgagtgttgtttagaagctcccttgtatacttttgttgagtgagagttattgtatcagttgacctgttaacctcgaaccccagaaaatagttgacaaagcctaactttttgagggcaaactgatcatgtagttgtgtaataactgttggaatttattttaccaggatct

SEQ ID NO: 232722 - DNA, 2152 bp, Cannabis indica
agacaacgatgataggaaaagtatattaataacctcaaaatgctgatttccctgggtaatcttgcaaatagtggaatctcaggaagcaacttttgtaggaaagaatttgaaagggcgccgaaggatttttgaaagatttgaatttctaagggagagaggaaaattgatgaagatatgaggaaaatgaatgggaaccatttcctatcaagaggtttaaatactagtatccctcatttattgggatcgagacacgtggtaaaggaatgcctaaggtctctcaatccaacggttactagtgaacatgcctacacataccccgaagggttttgatgacgtggcacctcaaaggaataaaataataattacaagcgtcctttcaaaatcctcgacgagacaaccaagagttaccatctcgggataaccactcacctgcctctctctcatagtttccctcatgacatggctatcaatcgcaaaattaggggcaggtgttatattgcaaatttttcacctagaaactcgagatcaagctcctgtaagaatgacacgtggactcacgcatccctcgaggattgctgagctgtcagaagaggacctctcgagaataaacctcgcatgaactgaactcagcaagatgatataatcttgacagattctagtcgcattattatgcctcgcatgacgtaggaccaacaaggaaatattcaagtctcgcatgtaccgagatatatgcgatgtctatgaagacttctcctacgacttagtaaagatggtttctttacatagcgagctagtacaaaagacttaatatgctcgatgatttgataaggacttgcacgtcctagatcatcgacacttacaaggtatccacatatgcaactcgattaggacgcaaatacctaagtacaagactcattagtctcgttttaacaagaatgcaccctaagcctacgagcttgtgcgagcatatgaacagacaacttgcactatgaaagtcgcatacattgttgtatttagtgaaacggatttaaactgttcttcatttattccatttacgtttttcttaatttaatgctaatattcaatgtaaaacagtttaatgatcaattaagttctatgtaaccaaaggacacttgctttgtatataaaggagtgatccaacatgaataagacaagacaaaaattcttgtaacaatggactaagcagagcgtgatctgactgaactactatattttcttatgtttgttacttttctatttgtctgtgtagcttcatttgaatactcgcccttctaggttgagtactcgcactttttttgttaaaaaaatagaattttattttattcgatgttgtctaaattcttccgacaacatatataaaaaaaaagataaattttgccgctaatgtattatagtattattataaaatttaatatttaatcattttttaagtcacattttattagaattatacacaatgggggagatgatcgtatagatacaattaatcgttgaattgtttgaaagttgtaataataataacaactacaacaacaaaaacatcatagaaaaatatataaattattaaaaagatattgagcacaaaatttacatttttaataatagaaagctgggtttgataagtagaaaagatgacattctttacgaacattctgattattgtacgaacgtccctgacatgtgccaatccacattcattttattctaaataataataataatataaatgtagaataaaaaaaatagaattgagaatgtgtccatcccttatgtcacgggctcacctttttaggtagcagaacaaccgtgcgacaccttgacttctctaagccaaaataagccttccaactatccgagtaacaatgggctcattttttgcacgactgtatacctcgtgcacacttccatctctcgaaaaactcccactgagtcatgcacacaagcatccatgcattgaggctctttagcaaagatactcgtactatcaataggtttccacgaggataaggaaattcccaacaccatcacttaccttgtcttaaggtcacgatcaggacatctgttaggctatttttagcctatattttggatcgattttatgtgcgcttttcactgtgttaggacgaaatta

SEQ ID NO: 232723 - DNA, 805 bp, Cannabis indica
gcaagacccatctaacacagtcaacataaccctccatagataaagaagtgctcacgtttcatgaataattaggaatgattagatcccaagagaataactgtcaccctatacccttataaatagagacagaacccaaagaaaaaggaaacgaccaatcttgagagaaaatagataatattgctattgaaaaacagtatcattgtattttgtattcaaacacatctatccttaataagagagactcgtggactatgaagatttaatttcaaaaccatgtaaaaactttcttgttatttattactttctagataattatttattatactgtataattaattttgtagtttatttattataaaaaatgctaataatttagttaacgaaaatctgcgttaacaatttagtagttttattgagagcttttgtaataagacacagtaaagataccctcctccaaaatacaaccttgaattacactcatggcagatgatactcaacataacgaagagaatcagccagaagagacaacccatcgtccgggaaaggagcctcgggctttgtaaagaatgaacactgctaaaactccccgtctggaagaaacaatgaagactttaatcaaactggggaatagatcccaaaaaggtgaagtgaagatgtttatgatccaaccagatacgttctagtggtggaactagaaaataggcaacttcggcaacgcctggctgaatcaaataaaaggaatgtcaaattagagcgcgaagcggcgacaacaaagactgcgtacaaggagaggcccctcaaaatc

SEQ ID NO: 232724 - DNA, 2582 bp, Cannabis indica
agaaaagataaaggcatgatcgacatgcccaactaaagttaaagacgtccaaagcttattaggccgaatcgttgccttgagtagattcgtctccaagtcaaccgacaaatgtgtcgctttcttcaacatcctaaggggtaacaaaaaattcgaatggactgaggaatgcgaaaatgccttccaagctttaaagcaacaattatcccagcctccggtcctttcgaaacccctagatggtgaagggttaagcttatacctagcagtaacagaacatgcagttagtgcagtcttggtgagggaggaagatagagcacaacacccagtctactatgtaagcaaaagactgattggggcagagtgtagataccccctcatagaaaaattgacttactgcttactattagcatccaggaagcttcgaccctactttcaagctcaccccattgcggtactcactgaccaacccttacgccaggtgctacaaaaacccgatacatcgggacgccttcttaaatgggcaatagagttagggcaatatgacataacgtatcagccaagattggctattaaagggcaggccctggctgactttgtagccgagtgtaccggggcgcaagagggcgaccaaccaacaataaccagtgacgtccaaaggcctgacctgagcgattcacctgaaccacacgtccataactccgagaaaaatgaaaaccaagaccaccccggtgaaacctggaagctacaagttatggttcttctaccgaccagtcatcaggagcggggatcaccctaacaacaccggagggacaacgaattcacacggccattcgctttggtttccctgcctcaaacaatgaagccgagtatgaagcattaattgccggtctgaaactagcgaaagaggtgaaggccagacacttagacatttacagcgactcccagctggttgtaaaccaagttttgggagagtacatggctagaggagaaaagatgatggcctaccttagcaaaatacaagacttgcttgcccaactggaagggtacaccattcaacaaataccacgagaagagaatgctaccgctgatgccttggcaaggttggcaacaagtgaaaagatagataaagccagccttgtgccaatagaatacttacccgagccaagcatccgcactaaagaagtactcctactcgatacgactcaatcgtggatgacccccatagccgcttacttagaacaagggacactgcccaccaacaaaaacgaggcaaagaaaatgagaaggaaggccacccggtacctaatcattgatggtgtcatgtatcggcgagggtactcaatgcccctactacgatgtgtacatcaagaccaagcccaacgactaatggaagaagtccatgaaggtttttgcggtaatcacgctggggggcaaagcttatccaagaaggtactaaggcaaggattcttctggccaaccatgatagaagactccatggagtatgttcgaaggtgtgaaaaatgtcaaaagtttgcaaaaataccaagggctccacccaacgagctaacgcaaatgcagagtccatggcccttcgctatttggggtatagacttgatcggtcagttgcctaagggcaaaggaggagtgcaatatgcggtagtagcagtcgattatttcacaaagtggacagaagccgaaccactagcaactataacatccaagaaggtgcttgactttgtggtcaagaacattatatgtaggtttggattaccccataaattggtatctgacaacggtacccaatttgacagtgtcctgttcacaaatttctgcattaagcatggcatagtaaagagcttctcggcggtctcgcacccccagtcaaacgggcaggtagaggcggtgaataagaccttaaaggacaccttgaagaaaagactcgaagaagcgaaaggaagctggccagaacaattacccgaagttttgtggtcatataggacgacggaaagaacagctactggtgataccccctttgcccttgcttatgggtatgatgcgatgataccggtcgagctagacccaccctcccaccgacgagcgacatacaaccaagtcagtaatcaccagctgatgaatgaatcgttggacctattggaaagtcgtagggaggcctcacaaatacggttagcagcataccaacaaaaagtagccagatactttaattccaaagttaaggaaagaagcttcaaggtaggagatttagtactacgcagagtcttggccaacactaaagacccaacagcaggagtattggggccaaattgggaaggtccatacgaagttacggaagttgtaccccccggcacgtataggctaggccggtatgactctaacatgaaccttataccagtaccccgatattggaacggccaacacctccgcaaatattatcaataacagttgcttttcagcgacaattcatgctaagggtatgcccgtaagcaacttagaatctttattagtgtttagtcttttcttttagatttgctttagttttaatcacatactactacgtagtgatgtaa

SEQ ID NO: 232725 - DNA, 553 bp, Cannabis indica
ataactctatttgccaaatcatctcattctactgttaccggccgtataaactatgaaaattgtaaaattttacatatcacatatatattacatctagaattcaaatatatctccgtaattgtgaaattattttcttaaggtctatttctaccaataagctctaatttctataaagaagcatttaatcataatattaattaaatccttaattattttctaatttccatgatttaactatacggtcattacaattatcccctagttaaaagaatttcgtcctcaaaatcacatctagaatacaccggacactgactccccatggtgttttttgaccttactaattctctaggtaccttgatcaatataatgatttggcatgtctctcttatcaataatttcaacttatttatactcataatatacgtctgacttaagttctagggtttcatgaaattttaggatatgtgttaagtttcttaacatacaacatggaaactttatgtgtactgaaaatgctattcccatggctggatatgaaattattaatctaatt

SEQ ID NO: 232726 - DNA, 920 bp, Cannabis indica
cacgacaaagtctgggctcatctacataactggaagaacaaagttttctccaaagggggcaaagaaatccttctcaagtctgtgattcaggcaattcccacctatactatggcttgctttcgcatcccttcggccacttgccattctttggagtcgatcatggcaaatttttggtggggcttcaatgacaacaattgacccaaaattcactggcaaagttggcaaaaactgtgtaagtccaaaaaggatggaggactgggtttccgctctctggttcacttcaaccaggctctccttgctaagcaatcttggcgcatcttcaaacaaccaaactcattagtctctaaaattctggcagccagatattacccaaactcctcattccttaatagtgcgttaggacactcgccttcttttgtctggcgtagtatttgttggggaaaagagttgctgcagaaaggacttatctctaagatcggaaacgggcagagtacttccactaccggaactcactggattccgggattcagacagattaccccttttgatacagctcctcctacggttgccgcttttatcaccccaaccatgacctggaacattactctgttagagagatattaccctccccatgtcattgatgcgatcctttctatccctctaccgctccagccatcgaatgatgagttgatttgggagttaacaaactctggcatctactcactcaaatctggttaccacctcagtttctcctcctttacgcctcttgacattccctcaccctcctccccatcgccttggtggaaaaatttatggcacctaaaaatcccccccaaggtaaaatactttgccttctgagccaccaactcaaccctccctaccctcaaaagtctagcctctaggaaaattatcccatcctc

SEQ ID NO: 232727 - DNA, 1985 bp, Cannabis indica
ttagcggttttttcggttttgggtttcgtcggtttcggttccaacggtgttcgataatcggcttaaatcagttttttcagttttctgaattttatactcacccctacttggtcatactccaatttgaaagcgttgccaccaatttttattgataataaaaattagagatatcaatctcagaagctacaaggaaataatcacagtaaattattcatggtgtaatccctcaacactcattaactcactaacccgagccaatataattgataatgttgctcaatacaaattctcaatttcagctctctttctcagatatctctctcaatttctcactctaacttctctctctattatgttgtgtcttcttatttttgttctctttgaaatgagaggagtagtccgtttatatagaccaaaggacccaaaatacttattgtcatatacgacagttaagttaattaacgaacaactaactaattgaatcttggttggaggtttaagaaataatagtacacaacttacatagcaacctaaatcgcaactcaaatccacatagcaacctacataaaaatttacagaataactacttgagcaacccaaattaataaaaataaaaataaaaaaaatttaaaaaataatatataaaataattcccaaataaaaatgatttctcaattcaaatttcgtattaaagaccttgagacaggcctcttatacagtagaacctctatccaagaatacatttggaactaagcaaattatattctaattgagaggttataactatcaaaaaatatcaatgtaacaacaatgacattaaataatcctgaatattatattataatagaattatttttgagtaaatataatatttatacatgtattacaatttagaataaaattactaattctacataaataattttataaaatatatgtatatattttattaagatgtaattattcttatatagaggtatactttgttaatacgggatttagaaattgtataactaattacaatttaagattatttttatttataataggcccaaattaagacttaatttttttataacaaattagagattatttttgaatagggcattcttaaataaaggttatttatttacttacttatctaaatgttcaatggatgtgtcgacaagaaaaaacaattaaacaaaaataaaaaagaattgttatgaggttatgatggaaaaagggagataagatttaaaatagaaaaagaaaggcaccttaggcgttcaaatcaagtaaggagtaaaatataacctcgtcaagctttattatcgttataacattattttattatgctcaaaaagatgcaagctagactttggtttgactataaagatattaaagatatttgttatgttacgtacaaaataaaatagcagcttcttgcctaacccattcaattatttttggaccgaaaaagaaaccatttattatattagttattaaaaaaatatataattttaataatattttagaattttttatttttacacttttattattatttttataaaattttatataaaaaagcaacttaaatcgtaactaaaattcatataacaacccacataaattaacggaaaaaccaaatcataaattaaaaaaatagtatttaaaataataatttgtggtatgaatacctaagtttaattttcgattacaaataaatgcacaagtttaatttttaacagtaataatatctaagttatatttgtataactttgtaggtagctgaacattaaatgtcaaatcattatctacactaggtgtcattttttattggtacatataaattattttaaaaaagaaaattaaaaattcatgatgacttgaattaattagctagggattgtcacgtagcaatttaattaatatttaacactcaggtacatacagagtaggggtgggcatccgatccaatccaacatttttttcctcatccg

SEQ ID NO: 232728 - DNA, 1473 bp, Cannabis indica
acttcccctttttgccactattcttcctaaaactattgttattgcacttgtctcaagtgttcttgccactggaggtctggatagcattactggtgctggcctgaatgtttcgtaggtcttggggttgtacaacaccttgggattgcctaatgttgacttgccctgtctcggcttgtttgaaggcttcctccagctttatgcagccgtttgctcatttgaggaactccttcatattgttggttgagatcctatgaatatctttctagaagtcacttaatggaaggatgccccccagtatggccgcataatggccttctcatattaggcccttgaccttggtggcctcagccataaacttttggatataatccttcaaaggttttccttataattgtttgatctcgacaaggtcttccagctgcgatggtattagtcttgaggacgaaaattgtgtgtaaaattcttgggaaaattcattccgagaattgaatcttcttggagccagcttgaaataccattgttgagctctttccaacaaaattgctagaaagattcgacgctgcaaatcactagtaactttttggagatcagtttgcatctcaaagtacttgatgtgtgccaaagggttttctttcctagtataagttttccataccgacagaacttgggcaagggcaaggtattgatgcatgttgagaattaagagccccttgacctattcagttcaaggtttgaaggtttcgggctagccaagccttttatcatatctcttatttgatccaactgtgcttgcatagaaggatttgatgcggcaagagcttggttgattggcctttcttgattgggctgcagccctagattgaccaagacttggctgaccataccttgggaaaggatatgttcaaggctggctagtcctaggcttggcatctggctttggtcggccagccctgggtcaggaaactgaccaaggtcggccagtcctaccttgggcaactgtacatggctagctagctctatgctaggcaatgtctagccgcctgttccctcctaattggagggtctgactgtgtgtcgatagggggtatatcacaccaatttttgggatttggtggatctaacttcctgaagtgatttttcttcacttattgagttgatgttgtcttgggtgtttccacgcgttcctggaccttgctagttaaagatgggtcttagaacgactttctcttgaatgttccagagaggaatctcgctttgttggccggccaagggtgcaccagtaaagggctggcagaccaaaggtcggagaagtaagggtgttgttgagcttgagatccctgtgcgacccccatgccattggttgccagggtctggctgctcctgccaccagatctatgtggcaggacttgtccacctttaggcagggggtagtccgttcttgtttctgaagagcttggttggactatttttttt

SEQ ID NO: 232729 - DNA, 1020 bp, Cannabis indica
ttggatttataatcaaggcttacaggcttgagttgtgaaaatgtatgaaatattttctttctcattaatgctaaatgttatctagggttcagacttattatatttttcattttcaaaaaaaataagttttagtaaagtgatgtgcttgaaaatgaacttgctccgattctgattctaatgcctcaaatatgtcagtggtatgtctagttgatattccaatacaagttttgaccattttgcactaagacagtcccaaaaattgaaaccctagttggatatgtcaacttgggcgttaggtgaaaccctaggtgtccaggttggcttctgggttgtaggttcgtgtaatttcaagtcttgggacttggattagattgctccatgtcttcatggtacagaataatgaaagatagtgagttggattcaagttattgaagtctaaacttccatcccggagatctcaaagtcaacctgggcgcaaggctagagtcccctcccagatcgactgctataactcgtgtctactcaactccgtaacatcatccttcatgccacatgtcaaacattgatgtcctcgttaccaaggaaagttttcaagttaatagttgcactatacttgtaacaatgatatttttatagagtattaaattgaaataaatagtgatatttagtttttttttacatatttttcttgatatttttttattaatattattggatatgtaattggatatccaattaaaaaaaatcgatctaatccaactagtaattgaattggatttgattagattagattttgaggtctaattagatcggatgggatgataattttcaaaatctaattacttattcaattagattgaatgagggaaaaaaatattagaatggattggaggccagccctattaaaattttctatacttaaaaaatcttaaaaaaaatttccctaaatgcatacttaataatattggtcatatatgaccacattcctaatatcccacaaatacccctcccatttgaaaa

SEQ ID NO: 232730 - DNA, 693 bp, Cannabis indica
aagtttagggatggaataaacccatttgtttgtaaacattaattgttcaatattagagagtgaagtaattagggaatatggaataaacttgttcttatgttcttggttacaagtttttgtcattgattttgatttagatttggtttaaaaggtttgaagtttccttaaatagagttattttaagctctctctcttttggttgtaaagttaggatttttgtgtagagaagtataggaatggaataaatcccatttgtttatacacattaattgttcaaatattctttgaagtaataaggaaaagataggaactaataaattttcttccttttcttttcattattattagataaggtgaattatcttgttttgttttatccttttgtttccttccttttatataccataaaatcaaaacattaaggatttggctttagagttaggatattcagtttgtggagagatacttaatctgtgtgtctattaagattgtatctgttactttaaggtgcctaaccccataccgatgtgacattttgttagtggttagtagttagtgattttccatattatttactaatttaaatgtacgagagccgatagtggtatcgcacctcttgtgatgtttggtaccttaaggtgtcccttagcattaatcgtctatgtctatgaggcttctttaaaatcgaagcac

SEQ ID NO: 232731 - DNA, 1523 bp, Cannabis indica
attaataaataaaccctaaaacttcttttcttctcaattaagtccttctttagtgaaaattcataaataagatatagtctaatttagaattcaaattaattaattaaaactaattaactgagtgtacaagtcaatattatctcaactagtgcagagaccatgaacctataaaatcaaacttctaataagtagatctaagatttatcgagtaaacttcctaactgattaattcctcctgactccactatagattcagaaatgcactcttaattatatagaatgctctatatgtttcaaaatatagatacgttattaattatctattgttataatctaaataatcaaagatcatctataaataatttacatcgagtagggacaaatttatcgttctacccctcaatgtattttatccttaaaatactaagcttcctataaatgatatttcagtaaactaatattattattgaaattagagctcttccatttatctctattaagccaaactcgaaggatttcatcatttcacttctatgttaatatataagctatagaattcgtacctatgattagcgctcccactaaattgtactaccatgttcttaagatgtaagtattggaccgatccaattggtcagctttaacgaacaattcaaagaacacaaataacaccgttaagctagaatctaactgttaacgcagattttctttaactaattatatagccttttacgtaataaaaatactacagaatttaataataataataataataataataataataataataataataataatagaacacaagatatttacgtggtttgtagtttaaatctacatactccacgagtccgtcttattctaaatatttatctagatacagagtacaattctcttaataaatgtaaataattatttctctattaaatttgccgttctttttccctggattctgcccttatttataagtgtataggatggcagttatttctgttgggatctattcatttacaactatacatgaaacgtggacattcctcacgtttctattttatgcacatggaataatatctaataactaccaaactgctctttgtctttatccttaaacagaaatgctgaaagaaggttatttctcgctaaatatgagttgtccttcttatccatcttaatatgataaaacgttaagtataaatatgcttctcatcatagtgttcttcatatcgtaaagatatttgctaggcggttactctgtcgcataaagggcgaggtggatgaatgcagttattttctccatacaccaatatgtgagtcaatgagttgcaaaattttactcccaaatatgtgggtcaatgtgctgtaatgtaatatcccagaaatttaattatgaataattagtatttattatatattatggtttaattaggttgtaatgattagaattatgatcctgctaatctaatttagcataaattataaattttgctaagagtagataattacggagatttatttga

SEQ ID NO: 232732 - DNA, 1264 bp, Cannabis indica
ttattattttttatacttttaataaaaacattaaattttgcatctagttttgcaatagtgcattagagcacaatgctaaaaattgatgcaaatacatcacaaagttttttttttttgtactaaatatagcacaatttttgcatctcccattggagatggtcttattgtgccaaatttggtccaaattatagtatttgccaaatttgacacaatttatagcatcattggagaagtcttttattgaaagtgctaaaaaaatagtaatacatcacctatttagcactccattagagatgctcttagcaaaaatagtattttaatagcgtgccaaaagatgatgcaaatttggcatatactaaatattgtgctaaatttaacgcaacattcgctatgatacaaaatttgtatcattataaatgtactacttttttatttacttttatatcatttttattattttattaatatatatagttataatattaaattataaactatttatatatatttcttattacataacaaaattaatggtaaaattatttttttgttttatcttttcaattaaattattaaattttataaatagtatttttaccccctgaactttttactttaccaaattttgccccttataatattctgcttgttaaaaatagtcctcgaactatttaaactaattaaatttcctccttctgttactctccgtttcactttggtttaaaactgatgatgtggcatttttcatgtaaagaaactatgaaatgacatggcattacaatttaattatcaagtaacaaattttattccaaaaatattaataaataaaaattatttaggaaagaataataaaaagaaacgtgatttgtaattaaatgggtcccctgttcaactcctatttcaaaaaaaaaacaaaattgaaaaagggcatttttgcaccatgagttgagaagaagagggctagggctgatcgaagttgggggtcgaaggtggctggtgggggtcgaagtcgaaggtgactggtggggttcgaacgtgggtggtgggggtcgaacgtggctggtggggttcgaaggtgttcaggcgtttcaaatagtggttgctggcagaggtgacagtggttgcaggcctgaggggcgaccggtggtggtgaagaagataaactcatgggaaagaaaagcttggccaagatgaaggggtttgggttcctcactaagcagagaaccaaacatccattttatggtaagtttggtttttttttttt

SEQ ID NO: 232733 - DNA, 662 bp, Cannabis indica
tttcttagtttaatttataactttttttcaaaataattttatattttattgaatttttaattatttttctttattattaagatatgagtttataaatataaataagtttaatttttcttcaaaaaaatttagtttatttaaattatttattagattctcaataattatagtttgattttttattatacttgtttataaaataacaaagtttgaaaaaaaaatacgaaaaatttaagattatttaagtaaaattaatatatcttaattaatttaatattttttatcaaattttttatatttttttttattttctcagaattaatagaatattgtaattgtttgaaaaaatagaatattataatttttaaaataatttttttaaataaaaagggaaaattttttgtattggtcaaagttcacggtgtaaaaatataaatttttaaaggtaaaagaaacagaacctaaaaaaatgggcataattatgtaactattatattttatggggcaaaatcaaatagtgctcaaagtttagagagacgaaaaatgctaattattcaaaataaaaattatataaaaagaatatattttacttaatatataatgacacttataatatgataggaattcagtattttaccaatggatacgtataataatttata

SEQ ID NO: 232734 - DNA, 748 bp, Cannabis indica
gaatctaattccgatgcctcaaatttttctatggtatgtttagctgatgtcctaaagtaaagtttaatccattttcactaagacggtctcaaaaattgaaactctagttgggaatgtcaacttaggcgatgggtgaaaaacactaggtgcccagattgacttttgggttgcaggttcgtgtaatttcaactcatgggcttgtatttgattggtctatgtatttatggtacaaaatactgaaaaatagtggacaggattcaagttattaaagtcattaataaaaatagaaggagataataaaactgtagtttcaattggaagattgatactatatcgaagagttcaatttaatgatttgttttgcccttaaaaagattcatcacctatcattttaatttgtgaaagagcataaaatattgagtattgctattagatattggtgttaacaccaccatgacacgaggtgctcctttgtatatagttaatgatatttcataataattattaaattaaaatatatataatcaaatatttaattacgttaataacaatacaatattttgtgataatgttagacatcgctactacttttaacatttctcgataatattaagggtaaaggagagcattgataataagcactaatattactcacactatccttctaaagagcattgataaaactcgtaattaattacatcaataacgatatgaaaccgaacaataacagctagagtgatccaccatt

SEQ ID NO: 232735 - DNA, 548 bp, Cannabis indica
ttctaatgtatgattttaaatttttgtaggattttctatcatggaacaaggtggggacgatgagtggagtcctttgttagattatgatggtgatgatggtccatctgtaccagaaggatctagtgttgatcctgaacaaccatccatggaagaagaaggtagtgttgatcctgaacaaccaacatagaaaaatactcgtgggagaaacaaacagagcgatataacaaaaatggttaatgagggaaaaaattagagattgagtacaacaactacagacaaaactggggaaagggagcgacgaaaaaagttacttgaattggagcatgattataattagcgttaacttaattatagatttttaaatatatttagatgacattagtgttggtttaattattgtgactatacagaattttaaatatatttagatgatattaccgttagtttaattattgtgactatgccgatttataaaaaatttaaaaattaaatgcaggggaaaaattgtagaaaatctatttcttttccttttgagtgtggagagtgtc

SEQ ID NO: 232736 - DNA, 551 bp, Cannabis indica
tcaaaatttaaagagtttaaagaaatagtagaaggagaagtcggcaagaaaatccaatgcttccgaacacacaacggtgacgaataaaccttaaataatttttctgagtatcttcaagaatgccgcatacgccatcaattcacatgtgcaaatatgccacaacagaatggagtagctaagaggaaaaatttccatcttgtagaaacatgtcgaagcatgttacatctgaagaatgttccagggagattttgggctgaaagtatgaagatagccactcatgtaatcaatatgcttccccaggctaagttagggttggttttaccctttcaaaaattatggggttgtaaacctacagtaagtcactttcgagtatttggctatgtgtgctacgtattcgtgccaagccacctacgtagcaaatttgataagaaggtgatacaatgtatctttgtgggatacgaaagccaacagaaagggtggagatgttgcgaccctacaattggaaagtgttatgcattaaggaatgtagtcttcgatgaggcatcatcatg

SEQ ID NO: 232737 - DNA, 1661 bp, Cannabis indica
gtactctaataactgttattacataataactcatgtagaaccttccattcagtatccttatcggactgatacaccaatatggtttatatcataaaatttcattcaaacaaaatcaaaagtcatttgtcaatccggttccaaacctttcctcgtacttctaaagttcggagtcactctaccgggccattttatttcttcccaataaattgaactacaatgtaatattaacaagttctccaatcacaatctcaatccttgttctggttacatttccagtaacctttggtaagatcttttcattttacaaacttgtcctagacctctttggtttaaagtattcactactaatttacttgccaaagtggtagaaagtcacaccgttaaaatttcaatcaactctaactgtcaccactaccttctatctaaattcttccaaaagaaacagtatttgaggcttttctgttccgtatagacttcacattttcaccatacaaataatgtgcccaactttcagtgcaaaacaatcactgccaattcaatatcatcactgaaataccattactcacacttcttcaatcgtttaatagcacatgcaataactctcctagactaaatcaaaatataatcgaatcttttttttttaaaagtgtcagcctaaatcacaaatttctcctcattgaccgataatgttaacattggtacaatagttaacctttgcttcaattctttcgtcttaactccactaagagtgtaaacatccctcaacatatatgttttgtagcattctatcaattccagaaaacctctaatctcagttgtagacttaagttaaagtcaactctaaactgctttattcattatcgaatttatcaagatactgtctatatccatttcatgctccaagaaacctacttaaagtcggtaaatttgcattcctgcaattagcataaagtttaagctcctaaaatattacaataccatctaaaatacctctcaaattccttctttgaattggaagaaattaaaatatcaataatgataacattcgcaaagtcatcgagtatgaaaaactactttgaaaatacccttctctcgaatcttcaactggtaataaccagattgaagaccgatctcagagaagacaatccttccctaaaattaatcatcatgacttctatccttgacaacagtatacttactcttcaccatgaatttattcaatttccaacgatcaatacatacttgtaaaatttcattcttcttcttcacaaataaaattggcgtactccaggatgggatacatgggatacccagtccaacaatttcaagtccaacagccaccatcccctgtaactgaaccttcaaccatctcaaataccattcgatacggagtttacgatataaactctaactaagcaccagatccatttcaaagtcaatctcccattttaataataaccccaataactcccctagaagacattcaaaaattctcagaccactgaaacgtattctggtcccataggtattctttataatatatacctcactagttaagaaactgatacatccatctcacagtagatctcttgccttaaacgctaaaattaataaaattcaggactcttgaaccttgcccacgaacacgaatgggtcctcac

SEQ ID NO: 232738 - DNA, 5049 bp, Cannabis indica
ctcgctgcccgagcataggttatcctagtggcaggtcgttcatggtcatttgctcactagagataatttctctaaatgtcatgttgaaatagattctaaatgctgtcctatgtgtagtaatgaagaggagagtcatcacgatttattcttcagctgttgtgtttcaatggctgcagtagtgcaacaggttttttactggtgtggctgtgttgatggccttcagattacaacaggtggttgtgctggataacaagcaaaatttttggggtgattaatttactttttgctgctacaatttatatgttgtggaaaaataaaaactattgtgttcataatagtagttgttattatactattttaaaaattgtaaatgatattaaagaaataattaaatacaagttgtatagtttaaatttaaaatataagaggattatacaatctgaaaaaagtatgctcttgcggcctaattcagtagatgttgctggtgggagattgggccggttggttgtggccttagtttggctttgttttgtctttgattaataaattttttttagagaaaaaaaatagaatttgaatttattaaatataaatatgatattgtggttataaatatagactagcggtttcacacttttacttacaatattaataatgtaatattcagattgaaaaataatattttattattgtggatttttaaaaaaaaaaaaagacaaatgcactaatattcccttattattgattatgtagatctgatcaagttttctcaattttaaaattgtggtaaaaaggtgaaagttattcaattcacattatgccatacaaaaatttattatataaatactcatactgcattgcccatatgcatacatagttacatacaatatatattaaagataattagcgtatatttcgaaggctcaaaattattagaatgatcataagaaagataataccacataactagtaagaaggcatgtattacaataattgaagcaagagagatatttcaacattatgctaaattaattagcataattatccatagacgtattgatgatgatcaaacgtgtacgtacccccacaacaaacaaaaccactagagaaaacacaaataacatacgaaacatataaaaaaaaacaataaaagtagcacacacttaataataacaacaataataataataataataacttgactaataattaaaccaaaccaaactcaaattattatgatcttaattattttcttatgacccttcctccgcaggtgtaggtgacattgcaggtatctccaactacgagggtgtactcatgaactggccttgacaagaagtttggcaagtgaaccaacatgtcacacacacaatcagtgtctatttcgtacaaccatctgcagcaatcgtcctcttcttgcgtgccatggtgcctgtgcctgtgtctgtgcccaccacgaccgccccttctgtgcctaccatggtggtgatttgcatccaaggaaggcgtagatggggctggtggtgggagtggactatagggtatcatggagcatgcgtagtttgctagagcaaactgcgatgcacatactggacggggagtgatccccgtctggggtcccgatagctttccctcaattttcagtacaacaatgaggatgaagatgaggaggaaccttagcgtactagttttggctctctccatatgtgttgttttttttttctcttaattttttttttctttcttattggtgtgttgctttgacttctctttttctaatgcacgcgaaaatatatttggagaaatgagaaagggaatatgggattttccttgttttggggattaagcctagttcttcatttatatacaagtttagtttggagtggttttttctttagtgaaaattatgtttttggtgaaggttgaggaaataatatttaacaaaaaaaagccattacaaagagggtgagttgcaggttttgaatagttgagtctctcattccttttgtgtgataattgggctttgttaggtgactaaatattaatattcggtgtgttgatgaaatcaaacttactcctactaaatgtataaggaatgtgagataataaagcatgaactttctgcatgtgcaagggaaatatgcatttagagaacttgtatttttgcctttttttttattcattattatttatatatttatgacaaatgatcaatttacccgtatattactcaccaacattttaataatgaatgtttatatatttattaataaaaaacagatcattaaaaaaatctctaagggattaaagtccaactaagtgtaaattaaataggatgtgctgtcaaactttgtgagttggaaaacaaagaaatcgaaattttcctttcaagctactgttaaaataaagattatttattaaaaaaaaaaaaaataataaataaagattatatatatgtacttaagccttttttcttcaaacattcatatatgatatataagtaaattgaataagagtagatagttctttgattgaaaagagtgaataatttgctgaggtgttgagttctgcaaagcacatttttgtggttgattttaattgattgctaaaccacgaaagtggaaatatagtcgtcttaaaggtaccaaaattaatggggagaggataataataaaggtgcaaaatatatatattatgttcaatttgatactgataggaaaaataatcctttattagggacttcagaatttgataagtatgagagaaacagagtactcaatatcaaaaaggaaagagagattgaaaatgctctgttttattaatctatctcgatcattacatttgatagtatatatacacaagggagctgagttagttgaaagacaactaactaagcttaagccaaggaacctaactaactaagctaagactttaacaaattgtaacatacttataactaacaccctactcgtaatagccccctcaagatggcgtgtatatgatacactcattttggagacaatgttgttgaaggatgagggaagtcaggctttagtgaagatgtcagccaagttcttttttgattgaacgtgaagtaacttgagggtctcttacttgattttttttttaatgaaatggcattcaatttcaacatgttttgcgctcatgataaaccgaattttcattgatgtggatggttgcagtgttgttacagtatagaggcgcagacctgctgagtgatatgccaaaattcttaagtaaagcaatgatccaagttacttcagaggtgcattagccttggctcggtactcggctttagctgaagatcgagaaacaacttgttgtttttttttattttcacgagacaagagcttggctaaggaacacacagtagccagatatggagcgacgtgtatcctagcatgtcccccagtctgcatctgcaaagaaagagggtgtacattggagggggacaaactagtttcagcataggctgatatatgtggagatgtgttcgaatggaagaataagccttgtagaacacggtgagtggcttgaaggtgaggcactcttagacaagtgaggaattggctgagatggttcacagcataggaaatgcttggcctggttatggtgaggtaaatgagtttaccaattaggctcctgtatgttgtggggtctggtaaagcttgagattaggttccattggaatggatgatgattttgctccaaggtaacatgtgtcagctagtagttgcaaggtgaaaggtctttcaaatatcttttgtttggttctgcctatttccaagccaaggaagaacctaagtgagccaatgtctttaagtttgaactttgtgtccaaaaataatttgaagtgagtgataatggacactttgttgctagctacaatgatatcatcaacttagatattaggacaactagcatgattgttgttgttcttttaatgaacagggagttgtctgaaagggattgatggaatccttcaattttgagagtggtattgaatttttcgtactattatttagaggcttgtttaaggccatatatactcttgttgagtttacaaacagtgttgggaggggcaatgtaacctggtggagttttcatgtagacttcttcatggagatcaccatgcagaaatgcattgttgatgtcaatttggtgaacattccaattgtatattgcagctagtgccagaaaattttaagtgtattgaattttactatacgagcacaagtttgatcatagtatatgccttatttttggttgaatcctttagctacaagttgagctttgaatctctcaacttctccttgttagttatatttgactttgtaaacccatttacgtccaatggctttgtggccaggaggtagtttggttacagtccaagtgtgattcttttcaagagttccaatttcagtatccatggcttgaagccaatttttgaattgtgaagcttcagaataggaaagtggttcgagttgagagtaagctgcaaggacagtagccctgaattggggacttaatttggcataggagatgaattcttcaatgggataagttgtgggtgtaatgtgacagacatagtctttcaaatattgaggtctagagatgtgtcgaccagtttttgatggggatggccatcatttggtttatgtgagatggagaatgagttgttgtcctgggatggatgttcaggaatggcaactgattcaggtggtgaatcaagaggcatattaatggtgatttgattctcaggaacaattgctagtactgaattctgcaaagtacatttttatgattgattctaattgattgccaaccacgaaagcggaaatatagtcatctcaaaggtaccaaaattaatggggagaggataatagttaaggtgcaaaatatatcatggtcaatctgatattgataggaaaaataatcctttattacggacttcaaatttggtaagaaaggggaaaaaaaggaaaaggtagggaaaggaaaagattaggaaaaaaaaggaaagaaaaa

SEQ ID NO: 232739 - DNA, 1352 bp, Cannabis indica
tcaaggagctactctccatgacaccagctgacaagagacagagaccaaaaggcctacacaaaagcccctcataggttggttttgcatacattattcactatgcactaaacatagaataatttgaacatgagcctagaagttatgttgaggtcatgagatagtgataagaagaaatggggaaaacaatggaatcgaagagatagaatccttgaacaaaaataagacttcggatctggtttaaaacctacaggaaaaagggtggttggctgtaagtgggttctcaggatcaaagatggaattcatggtttagaggagatgagatacaaagcaagattactggcaaaaggatttacacagagagaaggggtatattacacagaaattttctcaccagtagtgaaacacacctctataatactaatcctagcactaacagcaatgaatgaccttgaattagaacaaatggatgttaagacacccttcttacatggtgaattggaggaggagatcctaatgcagcaaccagaaggctatgtggagaagggtaaagaagatcatgtttgtttgctaaaaaggtcactctatggcctgaaacagtcacctaggcaatggtacaaaagatttgatgaattcatcaccaaatctagtttcaagaagagtgttatgacagttgtgtgtatgtcaaaacatcaaatacaaggagtacagtcttcttactcttgtatgttgatgatatgtgctaatagcaagcaaactgatgagtgagataagaaatgtgaaagatatgctgagttcaaaatttgaaatgaaggatctcaggcatgccagaaagattctatgcattgagatactcagggataggaaaggaaagaagctaatgctatcttagaagaattacatttcaaaagtgctgcaaaaatttggtttttcagaggtaaaatcagttagcacactaatgactcacctaacaaaactatctcactcacaagctccctcaacagagtctgacctcaattacatgaaaaacacaccctactcaaacttggtaagaagcctgatgtacatcatggtcggtaccagacttgatttaagccaagttgtgagtgttataagcaggttcatgggaaatccagagatagaacactggaaggcagcaaagtggatgataaggtacttaaaaggcacatatgatatgggactactatacagctcaaactcacaagcaccagaagtcaaaggctatgtagattctgactatgcaggtgatatgaacaccagaagatctcaaactggttgggtttttcaactaggtaactgtacaatcagttagaaggcaaacctctaaattgttg

SEQ ID NO: 232740 - DNA, 830 bp, Cannabis indica
ctacctctaggttgtattgaacagccaaggataacattatccttgtagtcttatacttgaccaccagagagaatattttagtgaagtcaattccctctttttgtgtaaatcccttagcaactaatcttgctttaaacttgattggtttagagttgtcccttccttctttatgtttaaacaaccatttgcaagacattatgctcttgccctcaggtcttgggaccacttttcaggtcttgtttttccttaaagaactcatttcctcatccatagctctgtactagtacttgcatccttcccttgaatagctttttcataggtttttagtatcgttttgtttaagttggtagcacttagaaaagcataagcaagaatctcttcccatggattatagataaatttctgtgttggcttagatgtcctcttggccatgtcccttgtcaactagtaattttgtagattctcatcctcctattgtggttcctgatggatatcctcttcttgatcttgggtagggtgttctatgccttattgttcaggttccacctgaactgggtccacctgatctgggtccacctaaactaggtcaagtgtgatctgcatgggttacatattgatagtagtaccttcactattactttctaaggaagcaacagtacttgaatctttgttagaaatacatggaaaaatatcttccttaaaaataacatctccactagtaatagttgagtccaggattctcctttacccacgatctattcccttttgtaccatctggatagcttagggacacacatttcaatgctcttggctctagctttcccacactt

SEQ ID NO: 232741 - DNA, 1569 bp, Cannabis indica
ttggagtaaatgtatgaatgcaactcgtgtgatttgtagcaatctatacaatgaacaggggtttaactttgcgataacgaaaaaattatttgtaataaaaactttataaaataataactaataacttatttcatatatgaggagaaaaagagaaattgacaaataaaaataaagagctcggaaagatagtagtttctgaaagcactcactaacatgaaattgaacaatataaggaaaagaaaagcattaataaaatgataaaaattagaacgctccccatccaaatgtccaaaacacatctgcttaaaatatttttctcttggtagtcttatcatgacttctctcttcgttagaatcatcctaaaaaaagaaaataatatattaacttaataaaaatattaaccaaaactaaggaaagataaatctccccaatacataaattagattacataaccccactttcataattattagagtcaagaagagttgtattaagcttagtctttttgttttgagtagatggagtcttgatagaaagatcaccacaagttgtgtttgagctcttttcaaatatttaatccatccttccaaataatccatctacttcccccaaatcttttttcatttcagtaaacaaactctttaattttaattctaacttcaagtcatgaagttctcgttcaacatctttttcccttttctctttatcctgctgaaaatgaatgagttcttcaacatcctctttaattgatgatacatttttctccaagcattcgattgcttgaaaaacatacatcttctcttcttggtcaaaattcatctgcaatttaaaccttttatttaaaaataaatacgaagtatacaaattagaggagaaattaaatacatatgagagatttacaagagtttgaaattttcacaaacatttcttgtgaatgattgaataagtaaaattttatgaaattgtatatactgattgtttgatcttatattctatatataatgtgaatgtgctacaggagaatatgggaagtactaaattaagtagtttccataattaacttaataccattctatttatgtaagaattttcctattattttttgatctgtgcccgtttttgggtctgtttctgttttttcttcttaacttgtcttcttttgaattttaactgtttttcctaccgatcttcttctttgttttgaatttctttgcttttaactgctcccgcctcttctttcctcccctttccgccttattcctcctcagtctcccccgtcgtttgctcctctggtgtatcccacttccccttccctggcctgatatggatccattctcggattccctacgcactaccctctcccttacagatgaagaaagaaatattgtatctctacccactgctacagcaacaaacacactcaatacatcccccttttccctgattgcccgagttataacttccagaccagttttacaaacccggtttctttgtagcaaatgcctggtcattgggcaggtcgctacccctgtggtaatcactgattttcactctgatatgttctatgt

SEQ ID NO: 232742 - DNA, 1535 bp, Cannabis indica
tataattttaaaagagaaaaaacaaatttgggcccctgggctgggtgggccctaagcacaggcctagcccgcctatacccagggccgggtcggcgcacataagagacgagagagagtgtggccagcatttggcgagatcaaaatattagagagatagagagattaggtattagagaaggaatctgagaaaaaaaaaataaagaacaaaataattcgttttgtttttattattttttattgtaaaatttattttatttttacatgtttttaatttattttaaattaaattattttttaataattaattatatgtggaccaattaaattatattatttgttaactgtgtccacgtagattaatcctatgtacgtgtgaatagtccaatatagcagttaactgtataaaattgatgaaaataactaaatgctaatagaatacgggttttaggggttttaccgctaaaatttatgttttgagagttatatgtaagcaaaataaaaaaatttaggagttttgcggcaattaacctaatatgaaaagatttatgtccaaatgacctttttacaactaaatagtctggtgtcgtctaaacttgagtgtaaaagacaaaaatggatttgagcttaatcaagactgtgaaagttgaaaccatgctcaccatgtttgaggaaggaatcatgtaaattcttttttaacattattcaatcacaaatcacattagcatatataatcctctgtcacgtgagattgggtacctttttattttttttgggtatcaagtaaagaacccccattttttattaaaataaaaatattaaagaatcaagttcacctttctgtcatgtttaaacattacaaatcaaagctcatgtcttatgttttatgtttgattctaaagtgcccctcactaactaaatattgtgtctgtctatctctccttaacaaattataagtacttaattaaatgaagaaacaaaacgtgacatggggttttgcttgaatcctttatgtctcaacactttctttttttgtctttttttttttttttgctagaaaaatccttctaattagaattaggaaaaaataaaaaagaactatgaaaaaaataattattctcttgagattaaaaaaaaaacttaagcaaataacaaaagtaggttttttaaataattgttttttttaacaattataaaataatatattaaatatacatatttagatcaaatatataatattaatatatctaagacactaaaaaaatgaattattacatagaaaatataaattgacattttatttaccaaaatacatccataaggtaaagtcaacatttacaccttttatgtaattttaattaccaaaataccacttacactatcatcacttacacaatcagacgatggttgcagagtggttgctgcgtggttgcgcggtggttgcatcagatgaaggtttcaatcagacgatgggttgcatggtagttactaagtggttggccgaaggttgcatctgacgaaggtttcaatcagacgaa

SEQ ID NO: 232743 - DNA, 719 bp, Cannabis indica
aaatttgaaactataaaagttatttagcaacacttattttaaaagtgtgttaaattataaaaataaataggttagcaacactttttcattaagtgttgttgttgtaccacttttctagagataattaaagttgcattgaatacgacagtaaaatattatgatattttcataagtagataatcatttaattaaaactctaaatatgaaggtccattagggttttataatatatttattagatttaattaattatataagtggtattaaataacatatataagtttagaaaaatttgcaaggtttagaaattgttttactaaaacaactatatttcgagttttataactccaattgaggtgattccagtggcgttggaaagataatttaaagatatataaattttgtagaaatagctgtatcataattcgaaattttgttaggtcaaaattaatccctaaagttacgagttgaagagcttacaatttaaatttaaaagttagatatttgtttgtttaataatttatcatattattgttataattattattattattattattattattattattattatttataaaactaaatctaggactgagtatagtatatattttattcaaccctaaaattatattgttctattctttccacccgtatgagcaagactaaccttaaaagttttcatgtcatcacctttccattacatcctttagcca

SEQ ID NO: 232744 - DNA, 1697 bp, Cannabis indica
gtctttgctctgggacaacataagggcatgggtaacagactcagtggtgttgccacagatagaacagttggggtggggaagaatccttttgaggaataaattgaatgcacaaggcaaaatatggtgaaaagctttccaaatgaaatgtttaattttgggagggacagagagaggccaaagctttttccaccaatgaagataagggttggggtcgaagaggagggaacatccgcagatgccacggaagaggcaaggtggtaggcagatttgacagtgatagtgccagaggagtgaaatccccaaatgagggaatcagaggaaattggatcaagtggaattttgaggatactttctacttgataagtaggaaagaaatgcttaagtttagggacattccaagtggaatcctgattaatgaagaaagaaacaaaagcttgggactggtccaaaggatgtaagagagtgggattgtgagtactagggatccaattgggtgcagataaaggaacattaataccaataccgatcttccaaaccagaccctttttaagcaattgacggccccaaagaatactcctccaagtaaaggaagaattatggccaacaggagcattcaaaaaataagaatgtttgaagtatcgagctttaagaatagagtgaagaagaaagttcctatcattccaaactcgccaagcttgctttgctagaagggcttggttatgagaggacaaaatacgaaatcccaaacccccaaaaaatttagagacagagatgtcatcccaatttttccaatggactttttttgtgccctaagaaccccaccaaaatctggctatcaaactttgaattttctggcatatcaatttaggcactctgaaacatgacatagcaaaagaaggaatggcttggaccacagccttaattaaagtttccttgccaacacgagaaaagaacttttcattccaagaatttaatctagaggagaccttttggaggagataatggaaaatggaattagtaaccctgccaacacaatgagaaactccaagatacttactaataaaaccctccccatgaagttgtgaagattgacgaaattgaagctgggaatcaacagaggtgttaggggagaaaaggatagaggatttctctctattaaccaattggcccgttgctctgttgtaaagattaagaatgacattgagggcatcactggatcgagagttgacttgggagaaaagcatgctatcatcagcaaacagaaggtgagacaggggctgagcgcccctgcacatctgaattccagaaaaattagcatttgtctcttgcagacgaatagcagcagaaagaccctcagcaattaagaggaagagatagggagataaaggatccccttggcgaatgccacgggtagaatgaaaggtgttagtgagggagtcgtttatggataacctaaactggacagtagataaacatcgcattataagagaaataaaagaagtagggaaaccaacatgaacaagcaatcgatttaggaaagaccactcaactctgtcaaaagccttttccatgtcgagcttaatagcaacccaaccgatcttccccgatcgtctagaatgaatggcatgaataagctcattcgcgagaaggatgttatcactaatttggcgcccctgaagaaaagcactttgattgat

SEQ ID NO: 232745 - DNA, 828 bp, Cannabis indica
ttatattattatatataataaaagactaaaaagtttaaaaaaaaaataaaagtgcaaaatcgggttggtcggtttaattgggcgggttggacctattttcaacccgcccaattaacagattgggcggtttgtaattttttcgggttatttcggtttgtaatttttatcggttttttcggttcgattagggcgggttattcggtttaggcggtttacaaatttttttgtacaaccctagtgtattatgtaattattccttaatttattatttctatattgtatatagattcaattaaattaaataataattatttttcttttctaataaatcaaatataagatatatattactcacaccctttgtattgtatttgtatttcgactaaaaccaaaggcttttcactgaaactcacactcctctcgctgaaggagacccttccttcttcgagttctctttccttttcatcttctaaaccattttttcacctctctttgctttttcaattccttcaagctcgatcgccaaaaaaattctgtatatttacatatatagatactcaggtactggttgacaggttgagttttttcttttttcctaatttaatggaggttttggtgaatatgattattgttttagcgattctaccttgctagctctgtcttcttcttttcctttttttgtctgatcaatttgagctccggtaccttttgaggatccgaagcttgcgagtttctccggttgagttttattgctcattagcgagaactaagaataagaaaatctttaagaagactatatctgcttaattcgtgaagaagatctttgaa

SEQ ID NO: 232746 - DNA, 846 bp, Cannabis indica
aattggacatttaatattaattattttttcctaccttcctaataactattctgctctataaaagaaaatttctacttcataagttacatatgtttcttattctttatccatagggtgttcttctcttataagttctaaatgtctagtaaagagatcaaacaaaaacttctgtctagtgaagagatcaaacaagaacctagtgacgaagttactatagagatacaagaatatataaaaacttttaaacgttttgaaaatgaaaggctggcgaacaaatgacagttcctacaacttcaaaaaaaaaaatgaatggctgcctccaccaccagggttccccaaagtgtgttgtcgttgcaaattgagttattttaatggcgaaccgatcaagcctgacccgttgtgcttgtattgcgactctcattgacacagtgtaaacttttaaattgttatgattgtttagtggttagttttaaagtttatttagtctttacttatgtttcaaactttttacttgtttcatgtttactgtttaaaagttttcaatctttttgtcttaacgtcgataatctatcaacattcactcgataaattatcgacaaacataaataccaggaaatattcctaaatatcgacaacgatttaaattaattaggtgtattgtcgacaacatgtcaacaaaatatcgacaaactatcaatacactgccaaatataatcgacaaaagtatattttcaaattttatcaaaaatatgtcgatatactatcgataacaatgcttttattaaaattattttagttatcgacaagatgttgacaaactatcgatatcatgtcgataatggtcat

SEQ ID NO: 232747 - DNA, 654 bp, Cannabis indica
accgaagagggcatgtcctgttgtttcccaagattgtttgcaaatggagcatgtggaataattgatgatttttcttcgaacaagcgatgtagcaacaggtaaagcatcatggataacacgccaagcaaagatttttaccttttgaggaatttggagagaccagaaaagtttccaccactgtacagccgaagtggaactggagcaaaggtcttcgttatccaatgaagttgcaaggtgataagcactttgaaccgtaaagttgccggaagagtgatgatgccaaataagcttatctcttgtgggaaagaagctcaatggtaaggtgagcatcttttcaatgtcaagaggactaaaatattgttgtagcaaagggatattccattgcctttcatcagtgataagattagccaccacaccattaggtggtcctgagtatgtgatcggtatgaaggatgaatgaccagggagccaaggatcaaaaccacttcttattgttcggccttcacctattttccatcttaaaccatgaaccaataactcacgaccccaacgaatcccttgccatgtaagagaaggagaatgtcccatactagcctcaagaaacgagttgtgagggaaatatttcctcttgagaagtgtactaaggagtgaatt

SEQ ID NO: 232748 - DNA, 679 bp, Cannabis indica
caattaatgaattgccacgtcatttttttctacattaatttcaacattaagtccctcctactttttctacaataaaatccctacaaaacttcaccaaaacttgcattttctctattaggccctttttttcaccaaaattcaaataaaactcaataaactcgactaacaactccaaattatcaagtggacacacaaacacatattatcacaaaatagaaggaaaagaactaaatataagtaaaatacaaatatagattaagctaaaaatcatgacaaataactctttattcaagtgttatcaatgagaaatcccaactctttggttgggaaggtgttaaggaatactaactctaccatcatggaaagccaaaaaaggttcttcttcgcaatctatctagagggccttgttgtggggcagggagatagtggtattaggttctcggtggagggtgagttcaggtgagaacatcaatgtgatgaaggactgttggctgcctagaccgttgagttttaagcctttcattaaacttgagattcccattgatattaaagtggttaatcttatattaacaaatggggattgagatgttggtttattaagggttgtctttgatgaggatgatgatgagctcattttggggatcctgagtggctctcttgccatgaaagataaactaat

SEQ ID NO: 232749 - DNA, 1562 bp, Cannabis indica
gtcacatgcgaatatggtcagaatcaatccttctatcatttcacatgttctgaatatcgatcccaacttccggccagttcaaaaaaaatgaaggttgatggacaaagaatgagcagtagcactgaaggatgaagttcaaaagctgcgcaacaacaacttcataattgaagctttctacccagcttgggtcacgaatcccgtactagtgcccaagccgaacaagaaatggcgagtctatattgatttcacagacttcaacaaggcatgccctaaagactattttacacttccaagatttgataagcacattgatgcaacaatagggcacgaaatattaagcttcatggacgcttactcaggctacaatcaaatcaaaatgcatccaccagaccaagaacatacaagtttccgaacagatatgggtctatattgctacaaagtcatgtcgtttggtccaaaaaacattggagctacataccaaagattggtaaacaaaatgtttaaagatcagatcgaccgaaatatggaagtacacctggatgatatgctcatcaaatccagaaaggctggggggctcataaacgacctggacgaatgtttcaaagtcctcagaaaatacaacatgagactaaatcccttaaagtgatccttcagagtcagcttgggaaagtttctaggcttcatcgtcaatgctcgaggaattgaagctaatccagaaaagattcaagcactcctgggcatgaactcgccaacaaaaaccaaagaagtgcaaagcttaactggtcagattgccgcgctcagcagattcgtttcaaaatcaacagacaagtgtgtcccatttttcaacatcctgcgaggaaacaagcagtttgagtggacagaggagtgtgaaaaagctttccaagagccaaaggcacaacttgcaaaacctcccatactcgcaaaacctctggacggcgaggagctgggaatatacttagctgtcacggaacatgccgtgagtgccacactaatcagagaagagaataatctacaacacccagtctattacatcagtttaagactcattgaggccgagggccgatacccgttaatagaaaaactcgcctactgcctcattctagcaacaaggaagttgaggccttattttcaagcgcatcctgttcgggtatattccgaccaaccactacgccaaatactacaaaaaccagatgcttctggacggctactcaagtgggcggtagagttgggccaggacgaaatcactttccaacctcgaacaacaatcaaggccaagccttagtaaactttgtggtagaatgcacaagcaaaaaagaaaacataccagaaagcaaccccgagcaagtacaaatacctcagccaagtcacaatgaggacaaatcaatctggaaactacacgtggatgggtcggctatagataaacaatctggtgcaggaatttcccttgtcacgcttgaggggcaacacctgtgtgacagtcagtagtcccgtgatccgtaaggggaaataccgggtaagctgtgcaatcccacaccgcctgg

SEQ ID NO: 232750 - DNA, 2666 bp, Cannabis indica
taaaattctcaaataagacatagtttatattgaaattctaattggcttattaaatcaattagttgaatctacaaaatgatattatctcagacaatgtgagaccttaggcctatgtaatcaagctcctaatagtagatcttaaaatttatcaagtaaatttcctaactcattaattcctcctgactccactatagatttagaattgcactcctgattagatagaacgctctatacaccaagtatagatacgttataatttatccattgtttcaatcaaaacaatcattgatcctctatacatggtctacataaattagggaaaaaattactattttaccctttaatgtattttatccttaatacacttagctacttgtaaatgatatttcaagaaactaatataattattgaaatgaacattcaatcatttatcggctttaaccaagctcaaagaaaactatcatttctcttctaatagacatagaagctatagatgtccatatctatgattaacacttctaatcaattatactatcgggttccccatatgtaagtatgagttagtcctacaggtaagctggtaaaatataaagacatgtgcaatacaattaagctagagctcaactatctcaagatttagatcaaatgatctatcatcaactaagtgacattaacttagaaaagatataacgataagtttatgttatcttttccactctcaatattgatcaattctgatgtatagccaatgcatctgtatctaaattactttaataatgccttggaaatgatatttcacttatctaagtgtaagcatactttatcgctgattatcacatcactgtaagtttgatacactgataaattgtagaactaaataatttgaaacatgtaatcacaattactttgtactgtgacgacatcactataattataaataactatatgttcagaagttaataaaacttatatattaatattataatcacgtaataaacatgtgaacaaagcatatcacaatgtcaaaatatgatttttgatgtttattgaaaataaataagattacaataaaattaaattttatttaaagcataaaatcccaacttcaagaacaataatataaactctttattatatatataaatataaactcttactattaacaaaaaaataatattaatatgatcatttataaaaaaaattctataaaatcccaaagatcaatttattaagttgtaagatatttgacctcttcaacataatttagcatgagtattcttttatgtatttctatccattattttaatgacttctagcttcatgactacctctttcatcgttggacgattattaccatgcaaatccaagcaacatttcgcaagattggcaaaaatcataatctcttccattggtccctctagcacttgagcatcaagaatgtcaagtagacgattctctcgcattgatataagaaaatatgtagccaaactcctaccttcttctgttcttattagagaaattgctttttgtccagtcaagagctccacaagaaccacacctaagctataaacgtcactttttacggtgtattggtttgattgaagatattctggatccaagtaaccagcagtaccataaactactgttgtcaaatgagtttgttctaaggtaatcaatcttgaagtaccgaagtctgcaatttttgctctaaatttttcatctagaagtatgtttgtcgacttaatatctcggtgataaattgggaaagatgcagctgaatgtaaatacgtaagagcttctacaacttcaatggctattctcaaacgcattttccaatttaatttaaactcttcactatagttgtgaatgtagtatgaaagagttccattaggaatgaattcataaactaaaagaggaacttcagtctcgagacaacatcctaacaacttaacgatgtttctgtgattgatttgtgaaagaatgactacctcattaatgaactctgtaactttggcttcatcaactttggttgacttctttaccgcgataatttttccatctgccagcattcctttatacacagttccttggcctcctttgccaagaaccctatttatattaaaatggtcagtggcgttttctaattctttggagttaaaaaccttgattttctcaacattaaccttttcagcagatatctcttgttccaacaacatacctccatttcgtttgaagatctttttcacgtgtttagcatcattatgtttctttaatgttttgtaaaagtaccatgttgtaaaaaacagaaacaatgctcccaaaccactaacaatacctgtataataatgacttgagttattaaataatatctaatttttttttcgcatcagtgtgtttaattattcttgctaaataaagagccatgttttattaatcttgttttagaaagtgataacacatttaaggtagtatagtgcaatataatgttatgaaatttaatttacttagtttcgaatttctattgtattacagttataacctcattagtcttatctctaaatctaatacactataatttttagacttacatgaaatttagtttgaaaatgaattgcaagattattttttacattctctacgcttagttataataaaatattttcttt

SEQ ID NO: 232751 - DNA, 1104 bp, Cannabis indica
caaggaaataataatgaagagtgcaattaattatggatgagtgtttaggaatacgaatcctgttagttcagtttctcaatcattaatgttaataattaattctctcccttttggtgatgacaaattatcaatttaaccctagttcttttcaaatcatgaaggtcctaaatcatatatcatctactcgcatctctgcagtaaattaacctataacttgcattaaaatccaaatctaaaaaatcacataagctatgtaaatactctcgttttacatcaacttatgtttgtcctattagagcattcctaatattcacttatcagatttcatattaggatcataagttacatttatgatggccagtttaaaatatgtacttaaaaaacaaatcatacaatcaaggaggaaaactaataatcacattaactgaattgaaaaagcgtcatctaacaatcatcatatccctaaattaggagtttagttcatattcatattcataataatactaaaacagaatttaacataaatgaaataaaagagaagaaagaaattgatggtggaatgaatctgggctcctactctgctctttctgccgcccttgactacttctaggtttgaaattctctgctctcctttccttactcccagtctatttttaatagattcagtcccagactttaaagaatcgagaaaagaagaaattggcctcgaatggtatggagcctcgccgcgaccatgaaatgcctcgttgcggagagattcttgagactgaattcaatgctccctgtcaggttctcgccgcggcgtctgggccagttaaaatcctccattctgtcacttttggtcgcggccacgaataaattcgctgcggagaagaacgcaccgattgctgatttttcgatctctcttcactcttatcacacttttgaagccccgtactttcaaagctataggaaacctgcaaacacagaaaaataagcgtaatttcgtcctaaaacatcacaaacaactaaaaaacgactttaattaacacccaaaaactaggctaaaaatagcctaacaagagtatagagagaatttgaattcaatagagagagagagagaga

SEQ ID NO: 232752 - DNA, 805 bp, Cannabis indica
aacgatgtaccacacacaaccttacttgagtgtagtccaaaagcctgtgccttaatggtcatgcatgtctatcccaaacgctctaaaactttatccaaattttataggaagcgaccccactttcacattcacgtaggtgagtctatcaagagtactcttgtagctcggtactctactccacatagagtatagatctcattaagagtttttattatctcaaccttagatcgcttcagcaattcatgcttcataatttttataacaatagcatgatctcattcttatcatatcataacttgttattacccatattgaacctattttttgagatctctagtccatagatcaagttaccattattagtgactcattattctaagggcaatagtactatacctttcaagattttaaaaactttctctttagctaatcctttcgtcaaatgattggttaagttttcatcaatgcatacatgatccactcttactgctctaataaagaggaattctctaatattactatgtttacgacgtatctatcgtctcttaccgctataataacggttctgaacttttacaataactgcagtattatcacaatggatcaacacagttagtattggtctttcccataaagggatctcagctagcaggcttctcaaccaacctacttcttcactagcagttgctagtgctctgatttcatgagactccgtagtgtactatgccaaaattgtaacaccctaatgcttagacacgctacaataattttattacttactgtgctgtcttttgctaatcaaaga

SEQ ID NO: 232753 - DNA, 991 bp, Cannabis indica
ttaaaaaataaacaaatttaaaaataggatattttgacggttaggatattatcaattttattttaaaaaattaaataaaataaaatatcctaagtttaaaaattttatggttagaaaatcctaaaatacctattcaaaccaaaaattaacaatttttcaaaaagttcatgttaatttaacaaaaaaaatataaatttcaaattaaagtaaatatctaataagataaaattttaaaactaacatttatctaatcttataatttcaattaattaaatatattttaaaattaacaaattttgaaaatctgatatggttagcaatttgaaattctaactagattatctgtaagttttattaatattttaatatcaaaataagatcatttcaaatcttaataataatatacgtaaatatctgatcttataattaaaattaataaaataacaaaaaataatcaattttcaaaaataaccataaaggctaatttgtggaaaaatcaaattttcaaatttaaaggctactaatatctaaaactaatttaaattaattaaaaattaataaaatcaattttattctgataatgagatttttatttaaaaatttagattctacacaaaattccaccaaaatttgaattttatttcattgaaaaatgatttgtgaaacacaaaatatgacaaaagtaagattgcacatgtcgcgcgcatgaaggggacttgggcgtgcgaaaggctacactgcagcctacttgactgaggaaccttggttaggtggggcttcggacacgaactgtctgaaaaaccttgaacacgaggttgtatgaactcggtcttgaccgagttgctcccagcctccgtgcgcgcacgtgggtatcctcctaagagttttattttcaatcttcaaaaaatcataactgatgcaataaaatccaaattaagttatgtaaaagcctaaattcattaatttttcatctactttccagaaaaaataa

SEQ ID NO: 232754 - DNA, 2174 bp, Cannabis indica
tgttaggaagcatgttagtagcctgatagtagaataggcgcatgtttttaatttccaaataagcggcaattagtaagttttacttgatcacaatctgaccagactagctcttggttacacaggttgttctaaatagtattgacgccaggcgaaacactaggagccagggtaattcggttggatccagtggtcgtcagggagttcagatcccctttaatatttgtggtcgaggtagaggtcctaggggcagggcacgtggctagggtgatgctaactcgccagaggatgcccaagctacccaagctgcccaagattgggaaaacaagtttgcagaaatgcaagcctggattaatgaacacgatgaagagatctaacatttgagacagcggggtactcctgcaatccctgctccagaaataccaatagctcctgcccctactgtgcaagcatgatctgtagctccagtgaaccgaatggaacccctatatgaaaggttccgcaagcaaacacctcagttttcctgggaggtcccaatgttatgaaagccgagcagtggctaacagtgattaccagaattctaaactttatgggtgtcaccgacaatgatagagtggcctgtgccacattccaattccaagaagacgctcttgtatggcgggacatggtgtccctaactcatgatgttactacaatgacctgggaaaagttccaagaactattcaatgcaaagtattacaacaaggcagtcagaagtgaaaaacgaaaagaattcactctgaaggaaaatatgagtgttactgaatacacgactcaatttgatcgtttggcaagattagcctcgagaattgtgccaaccgattttagcaagaaagagaaatacctggacgggttgaatgcgaagataagacacgacttaatgatcactactgatgacaataccacctatgttgatatggtggataaggcactacgagctgagggcgcagtggagtgcaccttagagtctcaagggactttggttgttggtggggcttctactcctcctacatcaggctttactaggggaggtagtggctcgaccactgatcagaaaagaaaggcacctactgcatctagtggttcaagtcagaacaagaggttccaaggaagccagggtcgtggcaatcgtcagggtagctccgaaaccagatacacttacccagaatgccccagttgtaagaagcatcacctatgagagtgtagagggcaagggtggttttagtgtggtatgtcagggcattataaaagggattttccctaactcaagactaaagcacagaagactacagcgaaatccgttccagcaagggtgttcgcgataacttaggctgatgcagaagccagcccttcagtgataacatgtcagctctcggtcaacaactcttacttctctgtgttatttgactctggggccactcactcttatgtggcaggtaaaatttttagtaaattgggtagaccgcatgatatttataaatcggggtttggaaccctactgcctggtgaagaattagtcatctccaaaaagtggattaggtctatgccaatcagagttgaggataggcagttcagtgttgacttaatagaaatggatttaatggattttgatattatactgggaatggatttcttgttcaaggactcaaccaatattgattgcaagaggaggatgataatcttccaaccagaaggcgaagaactgtttttttttttgggtcagttcagggatcgcggatcccaataatttcagtacgaacagccagggaattgttatgagagggatgtctagggtttctggccgtggtattggataccactcagactgagtctatttggccagaagacatcaaggtggttcgggaatttctagatgtttttcctgatgaacttctgggtttaccaccgcaaagggaaattaatattgttattgatttggcacttggagtggaaccgatttttaaggccccttacagaatggctccagcagaaattaaagaactggaaattcaactccaggggttgcttgacatagggatttcacggcctagtgtgtcaccctggggagctccaataatgtttgttaagaagaaagataggtccttgcgaatgtgcataaactgacaatcaagaataag

SEQ ID NO: 232755 - DNA, 1240 bp, Cannabis indica
ataagaattgctattagagcatttttcagtcaaataaatgttttttaaaaatatttgatgatataaatatatttttagcatttattgaagtgaaaaaaaaaatatttaaaataatatttttacttctcttttattattattattattattattattattattattattattattattattaaataatagttagtattattttaattattttttgagggacttatcattagaacatttttaaaacactatgtgtcaataaaaaatatgaaagagggaaaaaatatagagttaattgtggcaaaactcctaaaattttcattttgcttgcatataactcctaaaattcaaatttgagcggtaaaatctcccaaaacttatattctgttaacatttagtcatttccatcaattttatgcagttaactgccatgttaggctgtccacgcgtacatagaatttatccacgtggacacatttaacacatggcacaattaaattggcccacataattaattattaaaaaattaatttaattaaaaataaatcacaaaaaataatttatttattttccttccaccatctttatttttctcatctcatattatttttttctaattattgttcttcattcttcttaaaaaaaaatatcaccaccatcaccatcacccaccacaaccgaactgcccaccaccaccaaaaccacatctacgcaccacaaccatcaccgaaacctctttttcaaatccaaacaaaaccccacatcttagatccaaacatatcaaagagacctaacacctaccgaaattcgagtcccgattccataaaaacaaacaaacacaaattaaatccacatgaaaaaaacttcagattaaagagaaaaaaaaatcgcaagggtgagagagagagcttattgaacacgaagttcaaaagcgactagatgggagtcgaatatctcaaactccacgaattccggcaaactttaatagttgattccaacgatgttaacgcctaaacttttgagggttttgttctattagagcttctaagctccatcatactactccctatacgaaatggtctcgaaatcatgcccaaaaattgattgaaagttttcggactctgtcgatctcctccttcgggctcgtgtcaggcggggctcgtgagggtggggggtgtcaatttgagtccaacgtgagaaaaatcgagagagagagagagagagagagagagagagaggagag

SEQ ID NO: 232756 - DNA, 2900 bp, Cannabis indica
aaaagaatatcatagcactgaatatgatatcatgtaaattttaagctacaaaaaaaagccatgtgatatcaaattcagcattccttgctgttacaaaaacagtaaaactaaaatgaaatataatcctaataaatggaaatacaaaagaatagggggacatccttaaatataaggtaaaccaccagtacggtatacctatgctcaacatgggaaactgtattcttgtccccaaattacatgcctactccctgtctctccacttaacatttaacaaaccatcatttatgtatggatttaaataacatgcgagtaagtaaatttaagtaaatagctatttcatcaatttttgagtagtagcacaggaaggagaattgaaatttggagacatgagatttttattaagagtatcttagaatcatcatggaattctgttaatcatcaaagaatatcctaaaataatattaatttggaaagtctatataataaattaagcaaggggtgtatgacagaggtaggcctaatctgaatgtcaagtaattgctttggtctatggagagaaaccagtctctcagattcccggaaagtttgtgttcccttatcaataaaaatcactctctcatttcatattatctttttcattgcctatttaagttactgcagtgtctcaataactcagttttattccatccaataaatttggcttgatactatgacgatggtagttgagaaacttaaatattcaaatagacacaatttgaaaagctaaacagaatctattacctgcaagtatgtaatagcccgccgcagatcaccttgtgaaatagaacttagagttgaaagagcctgcaagaggcatgggatagtttgtgacatagaattaaaaatttaaggctgatccaaacattgatttttaagttcacaatttctaacacaagcttttaaccctttgtatcacacctctgaatccaaattcagaccttcttcattgcaaatgtacaatacacgactagtcatgacttcttctgaaagtggcttgaacctgaactttgcacacctagacgcaagaggctctatgatcctacacaaagataattatcaacattagcaattaaattgtcaatgaatctaaatataatatgaggataagaaacaaaaagttttacatatagtttgacatcccctgttatgtttgatttgacaagctttcacacatgaacaaataaaataattataagaaacacttaatcccttttattcaatacaagccttcacaatagcaccaaagtcaatacatcaaacttttgcactcagaaacatcataagagtattgtttgtattttaatcaaactagctggaatggtaatctcattctcaaggtataattcataggtgcatgataaattattatgcacaccgtggcagctaaaggaatctctcaaaataaaataagagcaccgtgcagtattaaaagattcatcacagaaactattatgtgaaatcatattatgtcaaattcaaacaaaatgtaataacatacttcatacctgctgatgtaattacatatgaaaaagaaccttgtgactctggagtaagtttccatcgtacgtctaagggcattctgtgcaatagatacaatcatacatttttagcatgccatcacttaatacttacaaaatacacactaggaggaacagagatagaaacttgcctgagcatcttcagtcatggaatcagcctcatcaaggataatgatcttataaggtggacaagggtatcccctgaagtttttgccgtaaaatagatctaaatatcgttaatatatagaaacatgtaaaataaaacatctaaagaaaattctaaacaagataacagacccttgacgttgcacagaacccacagcaacagcagcaaaatctttgatttttgttcgaacaacattgataccacggtcatcacttgcattaagctccagcactctagacttgtatagttcaggtctaaaccaaaaagtttcccataagaatccattaaatcaaagatcattccaaaaaattcttaccccacttctttatgggtgggatgcattgataagaacaatataacccccatcactaacttaatttttaaagtgacagaagaataacaacaactttgagctgaaaataacaacacttataccattgatcagcttcaaacaaaaacctacaacttgagtgattataattcaagtcagaggcaaactactaatgtgtaaatttataggaatggaaaaacaatattatataacagtgcaagcattaaaaagtcattgagcccgatatcaattctctaggaattaaaacaattccacaaaaccacaaagttgaatcatagtacacttacaaacaagataatttctcatttccagttctaaagttttcaacccatatttcatttcagtaaccagcaaaccaatagcaaaccgtgacttattcaaaagcaaaagttctaagcccatattccccattttctagcagaaaattataaaagccatagttcagtaaccagtaaagcaaaagcgaaacgtgatatataaattcaaaggcagacgttcatagcagataattacccaaaaagctggtgagcaatggctagagcggtggtcgttttaccggtgccgggagggccatagaagagcatgtggggacactggaaaacccaaagaaaaaaaaccaaaaaattgatttttgaacaatatgggtttctttaaaccaaaccgattgaagattaatgaatttacattagtggtttcgagggtgttggtgaggacccggaccacctcatcctggtgagccacgtcttttacttgcttaggtcgactagtaacaacgaaattgaaattaaaaaccaaaaaaaaaaaa

SEQ ID NO: 232757 - DNA, 1820 bp, Cannabis indica
agtttttcaacaatttattctcttttattttttcttgtgttcttatttgaattgtgtcaaattgttacaatgaacatgagtagctaaattgttattaggatattgatggagattgtttgacatcttttcatggttttatatgatttgattcttcccctaactttttatgtggttcaatttcatttgttcttaatttttttaattgactgaccatcaattaattgtttatgattttgatacaaaatttgagaagtgattgttgattatgctatagtaaaatagggataaatttcaatataggacgagagtacctatgtggtttggatagcatttagggttttatgcttaatgcctcttatatgttgaaatttatcacgacagtagaaaaaattacatataagttgagatttatatatcttagatgaatctaaattacttgagtaaacctgttattgcatagaaactctaacatttttacttcgtgcattcaagagcatgttcttcatgactttgctcaataaaatacaacgggagtagactattaccgacacttaaggccgaacctctttaaattctagtgtcattatttatatctattgtttgtgttttagtttaagtctcatttattattacgactccgcgtcggttggctaaaaatccagtcaacactaattaagttgtagcaactttaactttttagctatatcctctccataaatttcttcaacaactaatggaatatctactataaattagggttgtacataaacttttataaaccgccccacttgaataacttgcccaaataaaaccgagattactcacaaaaaatgcaaactaaaaaatctgacaaaaatataacacgccaatctttatattgggtgtattgaaaatataccaaactacccaatcaacccaaactaacccgaccaatccgattaagaggtttttttctattcttatttttattttatataatctatatataatgtaatttatatacatattaacaattgaatatgacaaaaaaaatattagtgctcggtttggacgggttaatccaaccaaaccgaccaattcattgggcgggtttatttttttttaattggatgggttgcccttagatttttataacccaatctttacgttgggttgaatgaaatgtaacgtaaaccaaccaaattgactttttaatttacacccatcctataaattattcatataaaatcatgagttataattataatctatctatatatatatctttatatatattttttttctaccatacataaagtaataccacctaaaagcaagtatattatatatatatttcatataaaaagtttatatactagatttctattttttttattcaaaaaagagacttcattgaaataaaagaaactatcagttcatggtggtcacaagggaaccacctcccttaaattaagaaaatcaatagaagacctcccttaaattaataaaacaaatagaagacctcccttaaattaagaaaaccaatagaacagaaaaatgcagcccatgggttctggggatcaaaataaaagaacaattaacaacattatcaagagccaaaaacaagtaagtaatatgccagaaatttaattatgaataattagaacttattatataaatatagattaagtaattattagaaaatgaaaataacattctatatattgtagatcaaagggattataattagtcgagatctttgtgacttggaatcaccttaatggttgtaaatcaatctatagatttatagtgcaaaaaagagctcgatcatggggacgtag

SEQ ID NO: 232758 - DNA, 1647 bp, Cannabis indica
cttaattacaccaataacgatttaacatgaaatagagtgattgacactattagtactttttaacagttttctaatataaaatatctcttttttcaatttcatatttttccacaagtgatttttttgctcacactccatgcaaaccaaaatttatgacaaacacaccctaagagctctctatttattttatatcataggaaattattttttggatagttgaagcttattttcttaaaagttcactctatattttagctaatgactctgtttagaaagcatgattgatgatgtgatactttataaatagttagtgatattttattaagtattgttattagttatcagtagtatttaacaccacataaaaattgtgaggtggttagcatttatgttgttgcaatagtgcttttttatttttgactaataaatgacaactaaggccgtttgaaatcacataaggcacgtatttacttattattggccatgctaatcattcatcccaactaagatttttctctttcacaactaacaatatcaacatcaccatttaagaaacatgcaccccattaccatgatgagcttgccctaagcctaattccttggaagtgagggaaccccatcgtggctgtggagcttctatttttaaggtcaagatgcttcattattcaatcattgagttgaggacaaggacacatgttgccaaaaccaagtgcacgcgtgacacttcctaccattgactagagcatgatccatcaacttggaagatttcaagagatatggttttgattagaaacataaataaaacaaattaaaatgcatggttaaaacatgtaagtattttcacattgggatcataagttagtctagagagaaataacattatcttatcagaacaccaaaacttgcacatcaagtaaattttattgtcctaaatttatattccaagaagtgggatacaacaaaccttttgagtttttggagaaattttgaatcttggacagcttgagattaaaacaattggtcttaaatttagagacaaaacaaaaaatcatatttggaagtttttttgacaaaaactacttaatttgttatacactatacaacacactgtcaatctagatatcatatttagacatcttcaattgctttaaacatttaaaaaaaataaataaataaataaataaacaacaacaacaaaaattgctttaagactttgtggttacccttatatatatatactccaaaaagtaactttggacccaaaaatgtaattttttaattacctacgacttagaaaaagtcaaatttcacatctttattatgtgaaatggttaagtattgtgtagcactttctgcaacatttaaccaactataacggttgcttgaaaattcagaaacattaaaagacattttaaacatatttttcaacatagggctccatttttgacacatgaaatatgttggttgcttgaaaatggaaacatatttagccaacaataacacatgaaatatggttgcttgaaatccatatttaacttcctttatttctactattttaacagacatttaacttatgagcattgctattagtattagtagagtccaaacctttctacaagtggcgttctataattggttagtgatata

SEQ ID NO: 232759 - DNA, 580 bp, Cannabis indica
gcactcaggataggagtaggtcttacatccccctttaccctgatttctacaaaacttcttccttcacctgaactccctataggtgggaaagttctcttcttctgctcaatagtggaatcaccactctccttgccaagactagaaatagagagagtaggggttccaccagccctagagcctctcaggtttcttgcagaaactttactgctccttcagctcgaagagccgtgtcaaccatttcagcataggtcgtggtgtcattggtggtgataactagatcgtgcctgatcttggcattcaaccccgccaagtactttttctttttactgaaatctgtcggcacaatccctgaggctagcttggccaagtgatcaaacttgatcgtatactcggtcactgacatattctcaccttgtaccagttcaacaaactctttctcacctgaggctatcttaatcctttgtatttattttgtttgtgatcaatatacatttctcttgaaaaacatattattgccctagaaattaaaatatatatatatatacaatgagtcatgaaaattggtgttaaaaaacatcat

SEQ ID NO: 232760 - DNA, 806 bp, Cannabis indica
attggaccctgtagatttgttaaatgaaaaaatagaccctgtagtttccaaaatagtaaaaataggaccttgagcttaatttttgacaatttttttttttttaaagcaaacttgaagacaattcttaatacgaacggatacagaaaatgtaaagagttttgtcatagcacttttagatcagattataatgtaaacttttattttgacaaaaatcaattcaggatcctatttgtaccattttaagaaataaatggtctattttttaatttaacaaaatagagggtctaattggtaacttttacaaaatacaaggtccaaaataatatttaccctataataacctacaaaaatttttacttacatacgtctaaaaatagtaaaatttgatatgcactcatacttaaattcaaaaacttgttaacgttttatatctcatctttttttattgttatttgcttatgtttaagatttgttattatgaaaaaaaaattagattaaaaaactcgtttcgtgatattttaggaatagtatacctttgagtttgcctttgatttatgcttcaaatagagagagaaaaaagctttaaaatattaaatatggaatttataaaattatttacaataggaaaatgaaatttttacatgaaaaatcacttttgcacaatttattaccaaaatactcctacacgtctaaaaactgtcgcctataagagtccattgaaaaataatcacctacttcttgccacatttcccacgtgcccacctactttttttttatttcccacatgcccacctatatcttctcac

SEQ ID NO: 232761 - DNA, 743 bp, Cannabis indica
taatattatcttatatatatatacgtggtttggatacagatagaatagaatcttttcttattgaatcaaatttgaggttccaataaaaagaaacacaaccactatctaatgaattcaagagttaaaaggaaatatgacgaaattggtagaagctatggaaacttatgaagtgataactttcaaattcagagaaaaggaattcaaaaaattcatcattttctagttgaatgtttagccaaagatgaattttaagagtgataaagacatataacacattagattaatttaaaactttgatactgctgcaggtaaaagcctacactactagagttggctctggtccattcccaaccgaaatcttgggtcaagggggcgaccttcttaggtttgccgggcaagagtttggcacaacaacagggcgtccacgccgttgtggttggcttgacatagttgctctcaagtattgttgtcaaattaatggtttttcctcactcaatctcaccaaacttgatgtgttatccgatcttcccgaaattcaattgggggtcacatacaagctagctgatggcactccaatcaaatcgttcccatccgaccttcgtctcctcgagcaattgaaggtaataataagtcttgtccccgttcgcgatcgtgattgatcctactcttgctcatatcatgcttatgaatcttgtatatatgtttatataggtggagtacgaagtaatgcctggatggaacac

SEQ ID NO: 232762 - DNA, 1650 bp, Cannabis indica
aagtagtgtagtgccccaagatctttgagagtgaagtgagtattaagttgctggacaaacttgtggagattgatgttgttgtttcctgtaacaataatatcatcaacatagattaagacaaggatgatgttattattgttgatgcagaaaaatagggaggtatcagctttggagttctgaaaattccattcaagcagggcgttcttcaatttgtcaaaccatgctcttggagcttgtttgaggccgtacaaggatttgtggagcttgcaaacatgatctggttttgttggatcttcaaaccccacgggttggcacatatatacatcctcttctaagtggccattgaggaatgcattgtttatatccagttgtctaatatccaagtttctagaaacagcaatgctaagaacaattctcactgttgaagccttgacaactggactgaaagtttcaccatagtctagaccagctctttgatgaaaaccctttgcaactaatcgtgctttgagtctttgaaaggatccatctgcatttctttttatcttatgcacccatttgcaaccaactagattgtgtgctttcgatctcggaacaagagtccaagttttattctttttgagagctactatttcatcattcatagcctattccagccactgtgtttgagggcttcaacaacactacttggctcttcatagacaggtatccatttagcttggctaagatatgtttttggcttaaaaatcccagcctttgatctagtgatcatgtgatgaaatggtgctgtactggaggatggagtctcagttgcagtggctgtttcttctgtcctggcagctgtgttttcctgtgttgcagcatctgtactgagttgttcttgtactgcatcttgctcaacaatatgtggtgcatcaggtatagctgtaggtagaacagttccatggtcaagtgtatcaaaacttgagttaggtgagtttgtttcatttacctgatgttgggaagatgctgctgttactggtgtagtgtcaggatgtgctcgagatggtgctgaaccagtattgtgttgggagactgtactgaaatgtctaaaatgcatattaggaagttgtgaccaagactcattatggatgacaagttgcttttctggtgcaaaagtgtttagaaaaccagattggaatggaaattccctctcattaaataacattcctagatatatacactctacccgttgtgcttagacacttgtagcctctataggaatcattgtatccaagatttacacatcttaatgaatgaaactgaaacttgtggctttgatagggtcttatgcatgggtaacaagcaacagcaaaagttttcagtttgttataatctggtttcctatggtacagtgtctttgagggtgttttgttgtgcaatacaggtgtagggagtctgtttattagataaacacaagtttggaaagcttcaacccagaatttgagaggcatactagcttgagctagcaaggtaagacccatctcaactatgtgacgatgcttcctttcagctcttccattttgagctgaagtgtggggacaagagtgctgaaaatggataccattggttcttaccaagatttcaaaaacctgatactctccaccccaatca

SEQ ID NO: 232763 - DNA, 597 bp, Cannabis indica
aaaaaattaattatggtaaagtaagattcaaatatttgaaatgaaagaattgcatgtgcttttcatctcatttttctttcgtgtttcctggcaacgtttagcttctagagatacaaaagtagaaagaaaataaaaaaaataactagacggggtcaatgtattattgggtgggcagtaacaaaaaatttcattttaactttcatatcatcatttcaggttaaggtaggtaaatttatattttgatatttatatttttaatttttattttgattacatgtatttttaattgtatttcttttaaaaaaattgcaaaacttttttaatataacggaatcacatattatataaatattttttcttaaagctgagcataaaattcaaaaaattaaaatattcgttcaaaccaacttattaaaattgtcgaaaccaaaattgctgaaaccgaaaaattagaaaaaccaccaacaatttaaatcgccattagatggtttagaaaaaccaccaacaatttaaatcgccattagatggttgtttttcttcagtaacaaaccaaccaaataaatcgaaacctaccgctattttatatacatatttact

SEQ ID NO: 232764 - DNA, 1396 bp, Cannabis indica
ttatttacaaggctctgtgtatgaacaagaaaatattggagacactcaaacactcatcaaacatgcaaacaattaacatttggcatcaaaatgatatcgtagattagataatgttaaattaatgcacaaataagaaataacacaacttactcaaagggattcaaatattgataatgcttgattgttatctgattgccccaagtaaatttgcaccatcgagctttgcaccttctaaattctgaaacatgaaaaatcgaattacatactgagattaatcgattatataactaaaccagaaaactcaagtaagacccaacattattaacactggctagagatgctttaacaccataaccgatcagaaaacacccagaaataacatgaatctgttaatcaaccagaaaatcccaacaacacatttttaaactgataaataaataaagaattaacaaaatcagattcaaacaaaacaacccaaatcacaaaaaaaatagaaaaaaagaaggaaaatgaaaaattagagagagattgaaccagagagatgtgaggggtctttgactttaacgttcgctcaaaccaaaaattccagtaatcggcaatggaagaaattttcgatcgatcaaagcaaaagatttcttgagtcaggtaaagaatagggtatcttatgctatgctagagatcgagtagaaaaagttgaagctaaagtgaaggattaagtttactgctttgatcaatgaaactcatgacgaacacgatcaatatgaaattccagccacaaactgaagcttccaatcaaactgtaatgatgcatatgaaaataaaaaccacacgaacatgatcaatacgatgttgaattacctaatgacccagaaaattatttcctcagataccgaaccacgatgttgagtgggtgccgccggcggtggttgcagacgatctcttctcagttcgacgttctcccaatttcgatttaggaattagggattggaattcggaattacgtattttaattttaagttactgtctacaccgggtcgggtcggacctctgatataaaatttgtcgggccaggtcgagttaagcccgatttaaccgaggaaattatattgtataccctctttaatttatttgttttaatttttacttgtattttcatattctttaaaatatactcacttttatatatgatatgatgtctcaattagactctttagattaatgtaaattataggctagacttaactagaaagtgagagtatattaggcaactcacttaaaaaaaatgagtatattttaataaaatataataaaaagatatttttaatgaataaaaaaaaattatttttcaactcattccatccttataaagcctgattgtaacgggctagaaaccgcc

SEQ ID NO: 232765 - DNA, 1333 bp, Cannabis indica
tatgtaattaagtgggcattagagtaggattatataatcctacttaaactaattacgagtcgattagggagataagaataaataaagcgtaatttattaattacgcagattatattggaatatgtgggtaatcgtagataccataacttgaataaaatattttcagggctggcaactgtggaacttgacggggaggtcagaaatgtcatggcaataaaagatgacttgaattgaatattataccggtctagtttagaattttttttaagttatcgatttggtggattaattagggaatgactaaaatacccttagaattttctaaaatttaagtgttaagggaaggggtagaatagtttttttataaagtgaatcttttgtcttttagtgcctttctctaggctgagatattactaataataagtttatattttatttaagtcttatgtgttgataaatgatgatacaacttagaaaacttaagaaaaagtcaacacaagttccttctcttctactctcttgcacgagcctaggagaccagcagcactcaagggattttcataactgtttcttcaatttcttgacagaattaataagttctagggttggtacaagcttgaaggtaagtttttcacccttttctcctagtttattcaagtttcaagttagatataagttagggttttggtgatttcgagattggggtgttaaactgaagttagaataagtttctatgcttgagttagagtttgtttaagatcaacttggttagaatcagctcagttagggttgagttagaggaatttaggatttataagcgtaaattgtacttgactatgctatattgattaaattgatgaattgttgtgtttgaatgctttaaacatgttgtattcgtgttataaaactgttctgtgaagtttgggaacaattggttaggtttggagcaagttttgggacttttaagatttgaaatttttgagtttctagtgtggtgaaccagaattccggatggtacagggctgcaccaaccggaatttcggatgatcaattttctaggaatccccgatttttgtattttagccataacttttcactcagggtgtctgttttagacattctatataccgtttcgaagcttatgaagagctctacagtatgagacacagattagatccaaaagatatattttattttagggtgtttttaccataagatttggtagaaaactctaggttattttatgcaggttttagacagtgttttggaatagacccttattgatttacctttatcgtgtacataggactcgaaattgtcgagcatcgttcca

SEQ ID NO: 232766 - DNA, 585 bp, Cannabis indica
tggattgaattggatcgtgcgaattagtttggattgggtattgtgtgaatacccgaattttgagtggtaaatttgagagaagatgggtttgagtatgaaaatgaagaagagagatagtggtttaatactagtgaggacatttgattaataagatatgtcgcagttcagatagcttcttcctagatttgctttggaacgtaagtataaacagaagggcttgggctacttcaattcaaggtgccaatttttccattcggctatggggagtgcaatgacaaggaacttttgtgaataatgtcactagaaattctccaaagatatatgattaaaatattcatttccattatcacaatgaacgaaggacataaagtttggcattatggaatgaaaatctcttgaacagccttccactgtctttaagcgttgatattactaataattataaagattagtctggtggaatggtcactgctatggcttagataaagattgctttgatacaatgtggaaaaagatgtgtaccacaactgatagttagccaattatggatcaggttgataagggaatttaatctgtcgtgggtta

SEQ ID NO: 232767 - DNA, 2313 bp, Cannabis indica
ttactcttccaagaaaccagagactagcccaagaaaataaaaaaaccggctgttgatctccttgtgtcaacacaagctgcccaatcagcatctgtgtaaccttggagctgaatttcagactttgttggataaaacaacccctgtccaggtgttcccttcacatattgcaaggctctttgggcaacattcatgtgtgtggctctcggggcaacaagaaattggcttaacttgttgacagtgtaggccaaatctggtctagtaatagtgagatactgcagcttccctattatttgtcaatacaacttgggatcagcaagagcatcctcactatcttggctgagttttagatttacctccataggtgtgttggctgctttacatccgagttgtccacgatcctctaagagttgtagagcatagtgtctttgagacaagaaaatgccctcatcacttctagcaatttcgagtcccaaaaaatacttgagctcaccaaggtctttcaacctaaacttatcattcaatctggttttcaaactctgaacagcagtcatgttgttgctagcaatgatcacatcatcaacataaacaagaaggattatgatacttgatcctttttgttgtatgaataatgaatgatctgtagctgagtgttgaaaaccttcagcaagtaaagctgtagagaatttttcaaaccattgcctagaggcttgctttaggccatagattgatttttgtagcttgcatacagcattaggtggcaactcccccttaggagtatacccttgaggtatagtcatataaacttcctcatgcaaatctccatggagaaaagcattgttaacatccaattgctgcaaaaaccagccattaatggcagcaagagcaagtatcaacttgacagaaacaagcttagcaactggtgcaaaagtctcattataatcgaccccttcttgttgactaaaacccttagcaacaagacttgccttgaacctttcaatggatccatcagcattatatttaattcgataaacccatttgcacccaatagcatgatgtccagctggaagactaacaatgatccaagttccattggattcaagagctgttatctcagtattcatgggtttatcccaaactgaaatccctttatcttgatgataaaattgaggctcaaagtggctggaaatagcaagcaccagggcacgaaacttaggagaaagcttgctgtaatcaaccattgcagaaatagggtgatctgtagaaacttttgagacctgagattgaacattgttagttgataaaaaacaatgataatcttgtaaataagtaggtctttaaatgtttcttataggtctggtatgaaaagccggtgttggaatgttaatcacatcagaaccatgaatagaatcacatgtggaaggagaggaaaaactgggatcaggttttgatgtgtgaaaatctggtgctggtgtattagtttctggtgtttcatgatcattttgatggtgagaattaggggcataagctgcttgaacacagggatgagaatttgacatatcaacatgctttcgagaagcatcagcagcaaaaaaattaaaaaaatctgatgacaaactgctgttatttgagaaaggaaaaatgtgctcatgaaatatgacatctctagagcaaaaagttttgtttgtgctaaggtcaagcaatttgtataccttcattccaggtggatatcccaagaaaacacaggcagtatcccttggggagaacttaaatctcccagctcctaaggttgaggcataagctaaagtcccaaaagtttttagatgtgcataactaggagctttagagtttagaatctcaaaaggagatttgtgtttgagattaggagtgggagttctatttataagatagggagcagtggttatgcaatctccctaataagctagaggaatctgagattggaaaagaatagctctagcaacattcaataagtgctgatgttttctttccataatagaattctgttgaggtcattggacacaagagtgataatgtataatgcctaatgaggagaataaggctggaaattgcaactctttggcattatcagacctaacacctttgacttgcacattgtattgggttttaatcagctttatgaaggcaggtataacaaattgggcatcgaatttgttcttaataagatgaatctaagtgaacctagaacaataatcaactatggttatgaaatacctaaaaccttcaacagtgggagtattgtatggtctccaaatatcaatgtgaatgaggtcaaaa

SEQ ID NO: 232768 - DNA, 1637 bp, Cannabis indica
tcaaaatacaaatattaataaagaaattaatatagaatttgggccttcttctgctcatctttccattttgtctctcttttttgagtttctttctgtggttttccctctaagctaagctatagctatagaataataattagcacgattcccccaaagctatacatatatatagctgattattcatctctctctctctctctctctcttcccctttttagatttgtaaaacattataacaaatagtactttgaatataagaagagaaagaaatcaatatacccaaaatgtctagcagaagatcaaggtcaagacaatcaggtggggcaaggattactgatgatcagatcaatgatcttgtttccaagttgaaccagcttcttcctgagattcgcgataggcgttcagacaaggtataaatatagatagatatgaaaagaagataaatcatcattatcactttctatttttcttctttttactatcggttgaatttttatacaagaatatatgtattagctagcaatgaaatgcaaggacatgaatagagctttccgccatcattatcgaaaagaaacgtggaaattaaattcccaatattcctattgcggaatgagatggagagtgattgaacaacaatttccattgatgaacaagaatgagatgaatctctttattaaagtgttacccacaacatacaaggaaaagctatatatatagcatcacaaataaccgacatagtgtaaaataaagtaattccagctaacaaggaaaggacctaactaacacctaactgtctaacagtaaacaacagtagcaactaactctgacacaattcagttaaaatctgttacccccctcaagatggatggtatatgtcgtagacagccatcttgtgaatgtgagaatggagaatggtggaagtcaaaggcttagtgaatatgtctgcaagttgaagagttgtgttgactggaattaagcgtacagcagattgtttgattttctcgtgaatgaagtggcaatcgagctcgatgtgcttggtgcgctcgtgaaatgtcgggttgtttgcgatgcgtattgcggactgattgtcacagtaaatgaaggctggtgtgctttgtgtgatctggaagtctttgagaaggtattgtaaccatgtgatttcactgcaggtagcagctaaggccctgtactctgcctctgcagaacttttggagatggttggttgctttttggtgcgccaggagatgaggcaatctcctaaaaatatgcaaaaaccagtagtagagcgtcttgtagttggacaggaggcccaatctgagtccgaaaagccttggagatgaagagaggaagtgctgttgtataacattccctgtcctggttgtccttttatgtatctaaggagatgattaacgacttgcatgtgtggtgttcgaggggctgacatgaattggctgagttggtgtacagcaaacgtaatgtctggcctggataaagtcagatataggaggcgaccaattaattgtcgatatgctgaaggatcatcgagaagggtgccttgttggtcatctaattttattttgggatccatgggagtattggaaggtttgcttcccatgtatccagtatcctcgaggagt

SEQ ID NO: 232769 - DNA, 1153 bp, Cannabis indica
tttgattcctacgttagattgtttatttttggtattttgatctgcatgatagccttaggatatctaatgtgtgatttcgagacgaaaaaaatctgaatctgacattcgttgtgattctggactctttgagtcatgaagaacacaaagaacatgtttgagttcttgaaaaaacacatgttttgatccatacaagtcctggctagcgaaggaggtcttgtttaagacctggtcgactaagggtggctgtcaaggggtctggccagctaaggagatgtactgcataagctggttgacctattcttgaaacatgggttcctagctggctactagattaggtcaaggagtctgcccggccactaaggcttagaaccctggccagccaaggccaaggctccaatggggcaaccagtttgttttcctctgctgacctaggctagggtctcgtgacggccttacaggcatatacaactatagccttatgcatggttccccttgggaactctgtataaggctcagtagtgagtccattatagttaattatataacttaggacttactatatgtcttagtaagtgtacttaatacggtacttggtcgataattgaccttgcacgttgtgttttacctggaagatagccttaggtattgttgactagaatatgtttgtagctttgtcaagttgctcaccttcccttatctcttctatgcaggtggcactgggtgttggataggggaggtgacaacagcgtaggtcccttatttattttgtaattatggccaagatgaagttgacttgtcgtagagcgcctccatgtagctagggtggctacaaggggtcgagttaggatcgtagaggaggctactcagcctcatgttgatgtttagagattgactagcgggctgaaaaggacttgtgtttttatttccaactgtcccttgggtcgttacgatgctaatggcgatctgctgaacaggcttggtgagcctttagtgttaggcttagaacacatcttggagcagccttataagcctgagatactagatgcaagatcactgggagacagttggctctctcccgcttctaccctttttgatgatgtttttagcaagatacttgctagtggcttagtgaggggtgtccattgtgagatac

SEQ ID NO: 232770 - DNA, 1214 bp, Cannabis indica
ctatctgtaaccaaggttttcctccgccataagtgaggtttattaataaataatgggaaggaccctagacaaatgggtcttttctcttttcaaaaaaaaataaaaggctcaagatagaataaagtaacataattggaaaatacttgcataatatgcaaacaggggaaacaatataaaatagaaatatgctcctgcatcacttaatctttagcttatgtacaaacgaattaaaaataagctgaaatttgcctttacgttttgataatcaaaaacaatattgccacacaaatttcttaagaaccactgttagtggcgtagttacagtaaaaacaaacaaattaataataaaatagttcatatatgtcaagggaaatagaggtaacaagaataagttggatcattacattacatttctaaccaatgcctccaaatatgtctctaaattaatgctcagcaacatttgttctagagtaatcaaaattggtaaaccaaatttaccaaaatggttaaaaagaacctttgaaattatccccataaaacaactaagtatcccggaaccacgtttgtaagtagaaaaaggaaatggctccttactgcacagttgcagacctctgaaaaacaaggcctgcctaaggtcaagttatgcaactggaggacgaagtacatgatcttgtgaggtatcgactgcagctggcggcatgaattgccacatggagagtccggggtaaccaacgaaaggcaccagttttccaccgacaacttggccagggctggcaaatggagacggcattgcaggaggatgcatgaaacttggttgtgaagtcatggccttcacttgtttaccaaggatatctttctctgcctttagcctctgtttctcatctcgaagttcgttcttctcggcctacaacataaagaaaatctccttatatcatgtatcaaacaaacacttttgtggaattttactgcaatctcctatttcaacctcttagtcaatctttggacccgaaaacacatgccgaaatattttttttatgacgatgttagttataattacaacatagttcctgaaattacaagtttaatattgtaactataacgaataccgttataaaaaaaatattctaacatgtgtttttcaagcacagtggttaactaaaaggttgtaattagcactcctctctcaacaagaaaagcaaaagcaaaccttaagc

SEQ ID NO: 232771 - DNA, 940 bp, Cannabis indica
tatttagctaattttaatataaaaccctaaaaaaattgtaggtcctttatttgttgcgtaattttttagtgttcaacacatgtaacatgttttctaaaccttatttttggtgttctaaatttttgtaaatttatcaaaatataaatttacacacatgtgtgtattgtaaaattttctaatttaattatatatattaacacgggtttgatcaatctcatgcaatttaaaaatattttcttttggttttggatataaacctatagataatggggtgttatatttatatcccagaaatttatatatacaatacaccccaacactcctttttacataaaaatttattcttttatatctttacactcctttcctatttcataaaaagcccttgaactttataatctttcaaaaaaaatcctaaacccatattaaatatttactattagaattatgttagattaagcctaggttgtattatttatttatttatttttaaactatcatccatatataatcatgtcttctttattatctttgaaattgaagaactggcgaaagtagaaggattatgtcaaattttgaagtctaaacatacattaacaattttaacagttgataagtcagtttaaaatagaaaaaattatggcaacaatctcgatcttgttccctaaccactgctcttgggttatataggtagaggaactccctcctcatgctcaacatatatatacataaagaactcccatttcatcatatagaaaaaaagactaatcaaattacatctctaaaaaatgatcaccctggtgagtccatctaataatcaacataaaaaatttatgtggcacactaataacatttttgatggataataaaatgcaaatttagtaatcatactgatttcccaaagacccttatatatacactgtaggaaatttgctgcagt

SEQ ID NO: 232772 - DNA, 1580 bp, Cannabis indica
atacattataatcatgccattacactaattatttatttagcatagacatgtgtgttacgctcacacgtctatatatgtctatgtggcatagacctacgtgctacgctaacacgtctaattacaataaggccttagaacagttcatcactgttctaattaccgagtccaaccaaattatgcattgaacgcataattcttaatttcaatatatatagcatggcataacatttaaaccttaacaattattagggtaataatcctagaccaaaaaactgctcacttagggtaataaccctaatcccgagttctaatgaatcccaaatataatattcaacataagcgtcaccgcacataacgttctacgtgctaactactgtcttacctgacgtcccacaaatgtggagattccaaatcctcaggggttcctgagcaagcgtcagtaatcttagtcacacattcctcggatttcacaaataaagttaatcccaaatttcactttcaataatcacataattagcattacatttacatattaacatatatatctcgaaacgagctttctagcgatataaagaatgttcaaaacggagtcctgagtcaaaagttatggccaaaataaaattcggtcttccccgatacagtccaaccagaattccggttggaacagccctaaaccaatcggaattccggttgtttgggcagaaacaacacgaaaaataatctcaacttttaagcctccataacctactcaaatcttcctcaatcaccaccaaactttccagagcatcatcatataacatattaaatatattttacagctcaaacacaataattgcaccaagaacaaaaaagtgccattgttgagcaagctttgagttcttgaactcaaacttgcaagaactcaaagcttgctcaaccacacaattaaacaataacaacagctcaattaggtctaaatcttcaatagaacataatttcacaatctaaaccatacacaaagtaatatctactaactttaaacacaactataactacaacaccataatcaactcaaatctcataagcatgcaatttcaagaacataatcaatggcttcacatatattttcactataaaattacagctataaaattcaaggtaaaagtggtagaaacactaccttaagctcttccaaagtccaagcacaaaatttcacaactccaagcttgaatcaaaccaaattttgacaaattatcaagtgaaagaaaatgaatatagtgagagggagagggtcggttttggggctgagcaaaaaccaaaaattctactttctaatttgctaataattacattttgttacaaataacacaaatgtcaaaataacaataatgcccctacgaccatataacatacatataagcagtcaagggcaataaagtcattattcacatatcacattactcaaataatttttagaatattcatgtatcaattaaatgccaatataaaatcccgaaaatgtatttcggccacgaactcagttgacctgaaattcccaattgtgaccatactgcgccgacctgtcagaaaacacctaaaaa

SEQ ID NO: 232773 - DNA, 1186 bp, Cannabis indica
ttatcgcacaggtatttgttttcttaaactaaacttcttaatccaactgacatttttcgactttgattattcttgtaaatttttttttttaaaaaaaatgtaggatcaggaatttagcggtgacggtagagcgatagagagaaagctggaatcgacgaaagaacaaacagagtatgaattgttgctcactggagagaccggtgacgattcaattactgagattccttttcaggttgccttttgacttttttatttttgtcagattctcttttttctttatattaaattagattgccattcaatgtacatgaaggatattctgttaactttaattataatgtgttttgaattttaacctaattagacaatggtactatgttcatcatgattagaaaggagctcaagttcgaattgtatttgatagcgatgtgaaatattgtcaatagtaatatgaaccaaatattttgttaatttgtttttcagttgtgaagtgattacaagtattggaacaatttaacataaattatattaatccaaaatggtgattgaatcctatggagatcgaatttagttttaataaagaaaaatatatattttgtgttaatgaaggtgttgagctggaaccctcgggccctttattttcctaatttcgcaactgcagaacaatgtgatagcatagttagtttggcagagccaagcctaagaccgtcgtcattggctttacgaaaaggagaaacagaagacaacacaaagggaattcgaacgaggtatactttgccatgctcaagataattgaaccattactttttcttattaatgtatatattcttttgattttgagatgttcacttacataagtacaaagtacttattacctaagtatgtggctggaggaaactcttttttttctttcatttttctccctgatggattttggattggtgctctctttctgtattaggtcttttaaaacagttttggtttcaattaatgcaaagttacatgttcttctctgactttggattaaaaaggtttctgttaagattgtttacttgatatatttgtgcattagtattagtaaagcctcgtaggaagttttacaaatgaaaacatacagaaaagacacgcctttctccaactttatggtactttgcctggtgtctattaccctctctctctctctctc

SEQ ID NO: 232774 - DNA, 828 bp, Cannabis indica
gtttataaatttttttgtacaaccctagtgttgagggattacactatggaagatttactatgattatttccttgtagctcctgagattgatgtctcttattctcatctaataaagattggtggcagagatttcaaactggagtaggaccaagttcacattgaacttaggatctgaaccagtataaatctcgtgtgttattgtgtctgaaagctatctagatttatctctgtgtttatgtctctagtttgatatgtgcttgctggttttattcttgatttgtttgttttgatttaacatttgtttgtttaagtgtgatcttgaagctgaaattatagaggttaattcctacatagagctaaatttcctacgtgtctaattcaattagtaattggatttaaaaatcatcatctaacccaatttaatttgacctcaaaaatctaatccaagacaatccaactactaattagattggattagttttttaattgaatatccaattacacacctaatttttaaaatggggtttttcataaatatgagaaaatttaatagagtttacttttatatgtcataaataaataatgaaaaagatacgagataaaaaaaattaaagtttaaaatatggaaaattaaacaaaatagggtaaatgtcattttggatcctatgttttgcaaaagttaccaattggaccctctgttttgttaaatgacaaaatagacctcgtattttctaaaattgtacatataagaccctgaattgatttttgtcaaataaaacttaataataatctgatctaaagatgttatggcaaaactggttacatttt

SEQ ID NO: 232775 - DNA, 1590 bp, Cannabis indica
atgattatatttgtgagatggagatgcatagagagactctgaataaatagaaagaaaaaaataagtacaaatatatataccatgagtacgagagagagatcgaatgaatagagcggctaagtgatattaaggttctttacattgcatttcaagatttttttcttaagtaaagtaattatttatgaatttttcttaataatagataatatatattgtaagagccaatattttctgtagtgacaaattatgtccagttgcgtctggagttcgtggtattttgtctggagtttatactgttagtgatagtccacgccggaagatacattgggtaatttgataaagatcatacacaaggcaaggcaaaaccgattcaggaaaggagtcaaagcagtatgcatcacggcattggtatacctgatatggagaagcaggaacaacctgatatggaacgaaaaaactcagcagccagcagagcttctgcaacagctgaagaaaaatgtgaaaactagattgatggttgtaatgccaaaaaaagtaaaaaacaaagatagagaatggtttgattgtttgtagataaattgtatagaaattattgaggccatattatggtgcttataggatgtaaatatgagtttgtgcaatgaattttcacctgattcatcaaaaaaaaaacaactatctatttcgggattcatggtttagctgagtataaatacaacttcttggtattatattgactaaccttttttatcagagattagggattacgtttctttcttcttgtttcgtctttatgttccatggcaagtctgaatcttgagcttggtagtattaatccaaagttgcagatcagagcttgatgatgttaagttcagactgaagggattttagtattgtcttcatcactagatttgaagggagttcagattgaaaaaaaaatgttgaagagagctcatcattcacacaagggaatcttgtgtctccaatcaagggtcttggttaatttgggtatagattcagtgtattttgtaaaagagtgtattatttacaatattgtttacggttggtatctgtaagatacatctttgaatatagtgaaagttattacaatggttcgaggaacccaagcactagccgcctagaatgagtttctagggcaagtgaagcgtgtaaatttctagtgttgaatctttgattctgtttcttatattcaagcataaatcaagataaaatcaatccaaatatgaaaaagatacgttagacaaaaacttgggatttacatttggtatcagagcaggctatttctattagaaatattgatccttagggttcttgcaagatgtgttatactgaaattcattgttgctgcaattcttgatttttctgcattttgtttcctttcttcaatacccagttggaactaaccccctctccagacacgactctaggagtattctactctctatctttgttttggtttccttgttcgtacaagaatggagatgttcagaaaaggaggatccacatcacgacccccaatgctggaaggtgccaattgcccatactagaaaacaaaaatgcgagcattct

SEQ ID NO: 232776 - DNA, 1302 bp, Cannabis indica
cttttcgagcttctctgcaaaaaaatcatacccagattatttcgaaaccttgcatgccatctttgtcattgacattcttcttgcgagtttcgttcgatttgattttcgacctcaagcattcaaagggatcatcacgccgtttgttgttccgtcgattgcaggaccattcatctctccaaaagctaacttcaaacagtaagtgatttctctctttattttcttacatgcttttaagtttgctatttttgggtttgatcactagattcttagttacctacctttgtcacctcatttcgttttagcaattttagggttgaattgtatttgggtaaattttagggtttaggtagaaggtaaggtttttgggtttctcaaaatttaccaacttctggttttatgaatttcatccaggaattgggattgctttctctttgcagcaatgtcccaatctagttcagaagttcattttccagaatatttagaaacagagtgtcccactgaacttgtcgtcccatataaacctagaattttagattccaaatccaaattagagataaatgatgcaaaaattaggagacacttagtaaaaacccatcaagatgacattgccagtcgccacagacgcttcttgcaagaaattatagaaggaaaacgtcttttcttgcgagatacttctttgcctgaatcccacaatttatcgtcaattcctctggctaggcctttatttttacctagagtcataatttcttttgaactaggtgacctggactttgaaatcatgacctccaagccttgaaaatcaaagactccccgagatcctaacttcacctttgaggttgaactaatagagtcgaaggtgtgagccatcggagattatgtaggtaataccctaaggacttgtggtattaaatataagcgagactcctgggttagatcggtggttgttggcaagttcagctattacccaccagaacgacttactcgcgaagcatctgaggggactagtggcgaggccagtacgagtggctcgacagggataggcgcttggagcctcgaacatattagggctgagccattatcctcctacgagattattacaaggacttcctaaaccatctcagaattgccccattccagttaaattctatttccaacaaaatcctcgcaagtttgaagaatctgtaaaaaattttgaattgggaatgccctactcccctagaaaaagagcatctttactccgtcaagaccattcttgcgaggaacaatgtaacaggggttttttactatcttgggactcacaca

SEQ ID NO: 232777 - DNA, 948 bp, Cannabis indica
aaactttttataacttatgtttgaacactagtggtgttttccaattaagggctcgattttaaattctattacgtaagtatggtatatatgtgccctataatatttagggtggttataacagattctagtagtgtttccgtgagtgtgtatacttaaaaaattatattttttgctcctgaataaccagtcaactagttgagaaccggtcaaccagttctggccaaccggtttacctttttgggcagcctcgggaactcgggaatcgtatttttaccctaaatttttactcgggtgtccgttttagacgttctatatactgtttcgaagcttgcgacgagctctaccgtatggtatatgtttcggagccaaaatataagttttattttagtgtacttaaattacagggtttggtaggaaaccctaggttgtcctttgcaattgttaagcagtattttgggataaacacttattggtttatcattattatgacatagaacccaggatcatcgatcgtactccaagcaagtcagccaacatatctaaactgaaacttgagataagaaaagtatacagtactacatggcatgacaagttctgaaagtataggcaatgataatgtgatgatactatggacataatacacgggctcacctgattaggtgatgcaatatacctggcgacgtaccggacgtaggtacaggcaacagtgatatatgatgagtaccgagcgtacgagcataggtacgggacctgattaggtgatgtgatacacgtagcaacgtactaagcgtaggtacgagcgtcagtgacatatgatgagtaccgatcataggtatgggctcacctgattaggtgatgcaatattcctggcgacgtaccgagcgtagggtgttagtgatatgaaaaattcctggttatggcatcaatcaaaactgttgttaagttttt

SEQ ID NO: 232778 - DNA, 952 bp, Cannabis indica
ttttctaatctcaaagttgcttgcttctatctctccagtcgttcttcaatatgatttacatgcttctttatataggccaacaaagatagatcaatcctcttaaaattaggattttttcaaaaaaaaatgataagtgctgcgctataacgcctatatcctgcgctatagcgcctaagagaaaaaatcccgaagtcatgctgaaattatctttttctcgtaaaaaaatattttttttctagccaggcgctatagcatagaccccctgcgctatagcgcacaacaccaaatttttctgcttcgaccttgctcagtaaatcatgcataacttttgcgtccagactccaaatgagatgatttaacatgttttgaaaagctgggaatgagctctatcattttaggcttcataagctcttcgagagaatgatgaaatcattgtcaaaaatgggctcaaagatctcaatccatcccaaaatatctttttagcacaaacctacacacttagagaaaacacatcaaatctatacaaaaataaatactaatctatctaataattgactaagaataagtgtacaaatgtgcactcatcacactcatataatatttaaataatatatcaattgttaactattacctatatgaataaacaatcctaaatgaaattaaaaaaaaaaaaagatagaacatgtggtaatataaatatatcacttgataaatattacctataagaataaataatggaatgaatttaaaggaaaagatgaacctttggcaaatataagtgagattgttttaagagatgaattttcaatatatatgtatatgtttacaatttttaactaaaattctagataaaacctaaacttatgatttttacacttaagttgtaacaaataggaaaaaaaaagttaacatatattagacatacataatagtgtaagatctcgaaagataa

SEQ ID NO: 232779 - DNA, 1285 bp, Cannabis indica
gaagatgcctcgagataacaatgccaatgccgatgcattggcaaagttggcaacaacaagggatatcgataccttagaattaatgcacgtggagtacctcaaaaggtcgaccattaagcaggagcaagtgtgcttagtgactgacagagactcttggatgaccccgtatctcagctacatccaggaaggggagctaccagcaaataaaaaggaggccaggagaatagtttataaggcgatctgttacgtggtaattgatggggtgttagttatacaagagaggattttcaacccccctcctacgatgcatagagaaaagagaaatgcgacaagtccttttccctatacacaagggagaatgtggcaatcacgtaagggatactccatgtcttgtaaaattttgaaggtagggatattattggccctccttcaagaaggatgccatgaaattttccaaaaagtatgacaagtgccagaaatatgcaaactacagctagcgtccgcctgtcgaacttatcacctcgaataaaaggaaaccaacctccttacatatgaattcaatacttatcctctatacatgttttatcggttaaaaaaaacattaattcgaattaagacattccttttaatttggttccttatacactcaacttgaaagatttttaattaggtcccaataggccatatttcggctctccaaatctgatacgccaaacattattttatttttgagtactaaaagattgtggtatagcaatgcccaatatattaattacagttttttttcataggtgtgacttaattctttgaagtgtgtcgtacaaacacattttacgtatgcatggatttcagaaactcgttaattaagttacagtattattataataagttgattcaaatcattaacacacaataagtaatggcccaatgggtaatatttatgttagtgacttaattgaaatagataatatcagtggataaagtgaagaagaaatagacgaaatgagtcaaatcatcaatacatgtgattcatacactccattttcgattaataggtctgattagtgttcagactaacattccttatttggtgaacatatctattaatgtataaaactaatatatcatggcaattggtttattaagatggcaccatataacactattggtcaatacagcatgacgttgatatgtagtgggtagtataggacaccaaggagtcatcatcacgccagaattaaattgaaattttggtactatatatataattaaacataaactttgc

SEQ ID NO: 232780 - DNA, 1611 bp, Cannabis indica
ctccaaacaccaacaaaattcttaggatccgttcacatatgtcccaatgtaactacccgcactacgcaccactttatccatcatgaacccagttttaaggttatgaatctgtacccacatatcaagtttgtgcaaatgaatcattctaggattctcaccactcttcaatcgatggaaaataagaagaaccttattaaaggtccatggacttccatcaatcaccatctgtatatcaatctcatgataaaattggaaaaggtatagattagcttctaattccttgacatacacacctttaccgggctgccatagagatgccattaagtgtctcatggcgtcaaaatcaatagatcttcccgtgagaaacttccctacaagacaccatctatcatcgaaggtctgttcatcaccatcagcctccccttcaataagaacaccctcttcttcatcatcaatctgaaagttctcatattgttcagcaagatcacccattattttattatttttagtttgtgttaaatatatattaaaattgatactcactttagaattttttctattttacactctaaaaaatatacgttttatataaaaataaattatattttaaatatgaagataaataaaactatatacttaaaatattattataataaataaaaaaaatatacatcatttaaaattatgaaaataatatagttgaaagtagtaaaagcattagtagtacaacaagtgtgtacataagtggtacacaaacaagtatctttccaaccaagtttaagtgtccaatcatgccattgaactaaaatatattcattattattaccgttaccattactattaccaacactaaacataattaatatcaattgagcttgaaccatacaattcccactttttgccacctcctaaaccaatatcgctaccactaccaccactgctcctaactaactcactcccccaatctgttagcttcttctccccactttgaccagacccactaatagccaacatgctattattcttcctataaaataaacaatgctccaccacatgctgagttgagtcactggggcacaaataagctccgatagaattaaacatggttgaatagtaatggagtaactcaagaaactgatcgagaaagacctagattgagcaatatcctattctactagagtgaagatccttggcctaagttcctcatcaagcctaatcattttccaatcgggttcggtcgggtcgtataaacaatgccagagccaatgcacgactagggtttcacctctcttgacttaaacattgaaacacccacatttaacaatcttgttataaggtttctcataactgggttaaactcagacgaggtaataagaagctatttggtgaaactcgagaggtgttgacccatttgagacaagagttcaggcaaagacctgactccagttatccgcacgtgtgagggttggcccttgacatgtgtagctaagagttgaaataaagcaggccactaaggacactgcatgatgtcgagattaatgatgtggtggcaatttcaagagtgtaacgatacaagtatagcttgattataggtgaaatgagcgatcttta

SEQ ID NO: 232781 - DNA, 981 bp, Cannabis indica
tccaaccaaaccactttgtttattccagagaagtggataggtaatccccgtggtaaagggtgggcgacatcaaacataattcgaagccgaaagtaggggccccaggtttctcggagcgaaggccggtaaatttcaagaaggtggccaagagaagatgagacaagggccgccagttcctcggatcgcttgaggaaaggtgtgttaaaaacttggacccataagggaagtttcaaaagactgtctccatttagaacatccaaagagttcgggatgtccatgagaattgcttggttaagataagtccaaggttgctgcagcaaaactcggcgcctatctccatcacagccaaactcaacaagaaataagccattggatcggtcagtaatggtcaccggattccgagatatattattccaatccttggtcattttttccatgaagttttttcggttgaaagatttgacagtatggactttgacaaccaaaaatagagggagtggttgtatctcggagtcgggagtatttgagggggcgggctcatggagagtttgaatggtacattcagtttctgtgagatttagagcaacagacagagatttggttagatcatccatggtgcaagtgaacaagtaatagcaaggctcaagtaagatgatgttaatgtgatagggcctagtagtcaaagtgaaagaacaattacacaaaggttgatagagtaaacgggacaggtgaaagtggaacaaggataacagcaaattgtttggaggatggacagaggtactcgagagtctaaagacaagataactataaggaagatgtctatgaactatggggtagtattggttaagagatttcaacagcgggtgaaacagggggctaatatgataccttaaactaagacagcaataagcagggagaatatatgtgactatgatgcagacctggagactatgaacaaagtgaggattggagaagtcagag

SEQ ID NO: 232782 - DNA, 766 bp, Cannabis indica
aaatttttttatagcggtgttcgttatacttacaacatcatccctgtaaattttttaaaatttttgaataatttacattaccaaaaatacgtttaaagttttttaaatacgcgtggtaaataagaatatgagaaaatttatttttgacattgtaaactattcggaattgttcaaaaaagtttcaaggataatactgtaactataacgaatactctgaaaaaaaaaattaataaaaatattccaatatataatttcagagattataattaactcatataataaaaaggaacaaacttgacttattgttttacttcaataaaaattaaaaaatttgacttgtttttcttttttaattagaaaaatattaaatttggaagttttgggaccattatatgtgaaccttacaaatgtgtaaagtactactactaataattataaaacttaaacgtctgaccgatgctataaatgtcattaaatgttttatctttaaagatataataataattaaaaattttgcctcttaaattttgacttttaataaatttatgtcttttaaacttttaatgtggttaaaaatcttcttaaattattgagattattagatttaaatttttttatctaattttggtaagaaaaatctaatatgaataaaagttcataataggacatgatttgatacatttcaaaatttaagcggatgatttagtagatatcaaaatttaagaaatataatttagtaaatagacaatcacagaattagtaaaat

SEQ ID NO: 232783 - DNA, 1702 bp, Cannabis indica
aagttggaaaattgtcaacttggcgttgggtgcccatgcatcgtgtgttctaggtgctcaaaaatgaaagttcctcaaatctgattttgttgactcaaatatgtttgtggtctgtctagttcatgtctcggtgcaaatttttacccgattacactacgtcagccctggaaactgaaaccctagttgggttgtcaacttgggcgctgggtgaaaccctaggtcccagggttgattttaaaggtgttgtttcatgtaattttagctcccaaggcctagacttggatgcttcatgtcatcatggtacataatactaaaagatagttagttggaaataacttggcgggatccaaatacccattctggagttcctaaagtcaacttgggcgcaaggctagggacccttcccaagtcgactaatattactcaggactactaaagtctgagatgttatctttcttatcacgtgtcaaacattgatgtccatatcactagggaaagtgtttggattaacattgcccctaagtcaacttcacacatgtgtgaggatgacttaatgacgtgaatcgagcctatttctcttgaaataattaggtgggcattgattttggcaatcttggaaaattgtttctgttcttcaagaattgctaacagagttagaattttgaatccccttgctcttgtttttgagaattttctaaaactataagtaagggaaaagaggaaaaacttatcatttttcacttatcttttattttttcctttgagaacttaaaatgttcatgtatttctcatggtgttaatgtaattgagtttaaatcctactccttttggaataagccattaaaaatttaaagaataaagaagaagagaaaagatttaatcttttgcttataatttgtctttttctttttaaagtttaaattttcttaagtcttaaatgcattaggagttattatatcttttaaattttgaattcctattcttattcgaccagggaacgcaaaattcattaagtaaaaggaaaagagaaaagatgattatcttttatttgtcatttatcttttcatttaaaactttaaatttaaaagacttccaattgccttaggattaagagatttagcttactataaataagagtgcctttactatttttttttttcacttttctttctgctttccatgccttggcctttttgagagcattggtatttcattttcattaattcttcaagtactcgtcaactcctcatgtagaaaattttagattttttttcaaaactttctttctttttcttcctctctgtattttcttccaaggattctagaactcactagaaatccttaaattccaaatttaagacttcaaaaagtcgaaaataaaatttcatgtgagctgttttgagctgaaattttctcctccttcttggtgtagtcacctttaatttgtcttgttaaggcttacaagagctatttttgggttgtaaggaattgaattttgaagctgacgtaccttgtatgatgagaagttgaagaatgtgtgataaatatgatccacacatggctcaattcactagggccaagtttattgtgcccacatctaagaacttagaaaaaagcgggtggtgggtaagtgatggcaacagagcttcttaaggctgccaaagagagtaatgatttgagagatcgagctttgaaagctaaa

SEQ ID NO: 232784 - DNA, 1327 bp, Cannabis indica
tatttgattaggtaactattgtttgagaatttataatatttggaagattgtatccttaaaactgagagccaatctgagggatgtaattatctagagaatcatggttgaaattacttaattatatatttttgatcttgttctgttaatttaaattgggttagctagaggaatatacattttttagaataagaagcttttatatgatgatgaaacaaattaatagccgatcgagaattgatatcaaatatattttaaaaaaaattaattataagatgcataaggcttcaactcttctaattttaaggtctttttctttgttatttattcatatttctaataaaatgcaaatttataatgagtatgatattattattaatattcttactcattctttagatgattcttaattttagtggccgaagcttcctccttacttacactaatttcttatacttgtaatgatctctagattttttggcttctttataatagaatttttcctttgtctcaataataataataataataataaattgtcgttgatcaatttgctgcaccaaatattacaataacagaaagagctatacatacatatatatataaatagataagctcataggacgactataacctaacaaacaagatacaaaacattaaaacataaaaaaaaaccatttcttaagaacggtcaacacacaaccatttcttctaagaattggcatatacatatatataaattattcttattattaatttggtctcactttggtgtgctatttttatcatatacatttagattagaatgtgtatgatgtattgttttgtagatcattacttatggagaatgaagaggaaaatgtggatgatgaagtgcaaaaatggattaaggctgtaaagagtgaagaaaaaaagaaggctacaattaagataccgcagaaaaggaagaggcaagggacaagaacatcaggcatttgggatcattttaccatagttaaaaaatggtaaaaggagcaaatggtaaggaagaagagagggagagagcacaatgtaattattgtgaagctgattatgcagctgattccaagaattgtgggactagtactctgtggagtcacattgaacacaagtgtaaggagtgtccgtttagcacatatgttcagaagcatacaaagcaaggaatgataactgatcattttaccaagacaattcaagaatctgaagttaattcaagtaagactcgaacctcaatgtttagtcaagctaaggtccgagaattgattggaaagtacttcattcttgatgagcttccttttaggcatatcgaagg

SEQ ID NO: 232785 - DNA, 1672 bp, Cannabis indica
taagtgattttaagaactaaaaagattaagagacaaattgaaaggtataaaacacatttagtcgtaaaagactttacccaaagagaaggtattattataccataactttcttgcttgttttcactaaagatttatccagaattattatggatttagttgcgcaccatcttctagtgattgcctcacatggaagcatcaccctttaggcattcttattgttagcttaacctatcatttagcaaaatcaaagtctatttctcatgctccttcaacttctaaccctgcaagctatcaaagctggtggaaaatcgtttggactgctagaatccctcctaagattagatattttttttggaaggccttcaattatgctctaccgtgtggcctaaatctttataataggaaaattttagacactcccatttgtcccttttattccagaaatgaagagaccatcactcatgcctttcttgagtgttccaaaaataaactggtgtggaaagaaactttttttaaggagcttcattgcatgaacaaaaattatgatattaaggaattttttctcaagagtttcgaatctttatcaaaagataagcttgaactgtgttttggtatcatgtggatgatttggaacaataaaaattacgccatattcactaaaaaatattgttttaatatgaatgtagcatgttatgttgtaaagctgttgtaggactatgttgaagcccaaaagagttaattcactccctaatcctcttactgctggtaggagtggggaagataacttggagaaccaaaaaaataaagacggattaccttccccaaggtactataaattgaatgttgatgcggcattaactaaacaaaagaaagggaaaatcagacataggggctgtggtgagggactgtcacaacaatgtttctgttgtccttgctaccccaagaattggagcggtttcttccctataggctgaggcacaacattgctatgctttagtgtttggcattgagaattctactctctcattgcgatggactatcttcagcttgtacaaaaaattaaacacaagtggaaagatcgttcatcattgtcagatttagtttctaacattgttgatgccttcttttattttcttaatgtatctcttgcatatgttttgagatatgaaaatgttttagctcataatttaccgagaaattcattagacttagatagagcgagttgagagaattgttcctcattcctaattcttatattgtaactcagtactttatcaatggaagttacaattactatcaaaagagtataatgatatagagtatgattattaagataaagagataatcatgatggactgaagtgaatgaggataacctagtatccttatagggattgattccttcctttaattgaggagtttccataagaggttgttgctttgttttggtagtgtacattgtggctgtcacccactagcaataacaaatagcaactccgaagttattttttatatatatatatatatagctaaagctcttttctttacaataaataataaaattaaaggatgaatgagagagaatattaatcctttatctatatgtacactgcaaattataatggaatctatgaaataatggcatattgatcatatatgtatgcttttcccta

SEQ ID NO: 232786 - DNA, 1591 bp, Cannabis indica
gataactaatcagattgtaaagagttttatttagggcttaaaacccaacaaatatgtatttgaacttgggacatatttctttccagtgtaattgtagtatcactaacctatgtctataactactattaaatgataatttagactctatattttacaacataaaatataataatatcataagctcaatattaatgaaaataattacaattaagatagattagaaattgggtaacaattgttttttttttttttttaatcaatcaatcatgtacttcattactccaaaaacacatttacatcctattggcatcttcaaaagaagacccggtttttatctatacattacaatgtaattacaacttccttgtgtgttatattttacagctgtaactataaaaaacaccagtcggcctcagctgcgatagagcaacactcggcatcagctgcatctaaaccagtcggcatcacagaaaaaaaaaaaaaatcagttgctatagaagagcaaaccagtcggcatcagctggtgtgcttctttggccaattacacaacactctattctttacatcttcctttatagcacggacaacaacatcttgtgctattctccttgaattccatagcaaatcattgcgatttttccaaacatggtacaccagagcagccactgcagcagtgattactgccttccgaaacttgctcattttcgctctttccagccacctgcacaatctgctcaagtctattgtttcaactctccatcctagccaagctttaacttgagagagacaaatagtagagaaaggacaagaaaagaaaaggtgctctgtagtctttggatgatcctacagaacaagcaatagtcttctccaatgatgttgtgtttgtacaacctttctctagttttaagtctatcttggattgtaatccacaagcaaaagctatgcctagggatgttgagtctattccatacctcatgactccaattcactttgctttgtgaggggcaaagagatttgtagccatttgatatactgtatttggcgcttacgaattgctgaatgtccataacacctttgatttgtgctttaaccgaattcaatttcttccaatattagctagcctgaggtggagcttgataagtccaccaatcctctcctttaatgtatacacagtgtatccacttaatccacaggttatcttctttgttcgcaattgcccacacatattttgtcattgcagcaaaattccattctgctattcttttcaaaccgatccccccagctgcttttggttggcacacatgatcccaagcaattggacctggcccttgagaaacctgatttcctttccataaatatgctcgatagatggcttcgatatcccttatagttcgctttggaagcactataacttggctccaatatgaatgaattgacatgagaactgagttaaccagaactgctctccctgccaaagacaagtttctagtactccatattttgattctggctgtcatcttatctgctagaaccatacattcctttcctgaaattcgtttcgcacaaatagggatacctaagtatttgaaag

SEQ ID NO: 232787 - DNA, 2010 bp, Cannabis indica
atacagtcgatccaatggtgacagatccgaacgtccagacacccggaaatgcaagggatccaccagggacagccctcagacaagttaatactcaaccaccaacaacaggccatagagtgacttttcctctagctgggttcactctaggtgtgcaagagactggaaacactagtacgacagccgagcacaccacacctggaactagaatcccatccacttcaaatactcaaaggtcgatcgagatgatactgaaatatagaatttgagagatgcattggggttgatgcaaggccacagtaacactttcaccatgaccagcaagatatctgagcatctataaatcttgcttttgatgaacaaagacgctagtttgacgagtggaaggattgagagatggagatcatgagagcctagcaagcgacaattgacaaccgttccaggcaggccaccatactgatctgaagagcctataagatcaccagccaacagccagtgactgatgctagtatttccatggggccacagaatgagtcaaaaaagtgtttggctaaacatacccaacaagcccaagtcggtagactgtccaatcgaaggccacgggttcaaactttgggctaagtggtagacggacagatctcaccaacccgtcccttgagagggaatgattaatttaatccacgtactcagacggagatatcaagccaaccccttgcttaaaacggttagacacaaaggcctctttggacatcagtgtttgaccaattgggtacgagcacggccttagaaatgatctgaatcgcagaagaggaatggacaaacatgatgttcatactaccatacaactaagcaatatcaataactatgtacctggtacagttctaagagaccctcgtgtgacacaggtcggtcaataggtaagtcatgttaatccattggtgcaagcacaaatatcattttaagagccttgttcaaggcctgaccagtccaaaactcacagatatagaaattgaatagactagaggatctcaattctcactagaaaccaacgctctcgacgtaccgcctaagttcaaaattccaacacgaaaaatgtatgcaggaaaagaatgtcctttgtctcaccttaaatatttggaaatacaaatggacttacaagcggtgagagctgatgtacagtgcataatcttcccagctactttagcagaagtcgcccagttgtggtacttcaagttagctctggagaagttcaattcggagaattctttaacatcagagtttcatacacagttttcctcttctcaacaactccgatctcacttagaagacctagtagaagtgaagcaaataccaagataacccttgagagcttacatatggctgcagctacaaaggagaaaggaatgacctaggaggggaggctagccataatcttaggaggtattgaacccctaggggaattgtggaaagacctaaaaagattgattgtagggcaatggaagaattcttggacctaatagattgatttataaagctcgaagaagtagttcgacgtgtagacacagttggactaaaaaaactaacaacaaaccaccgcagccaatacatctgtccagcaagaccaaaattcaaaaaatgacaacaactcaaacaatggtggaaaaagatcaaataatggcaacaagtagggtaatggaaataaaagtagctttagtggaaactacgacaacattctcaagagaatgcctaaaatttcactgtatttactgtaacattcctgaaacgtaattatgaataattaggatttattacatattatggtttaattaggtagtaatgagaaggattatgatctagctaacctaatttagcataaattataaattttgctataagtagataaataagtttaatttgttaatcacaaagtttttttttaaaaaatgtgaatataatatgagttatttgtgaaataaaaatacttttaagatcggcgaccttggagacccaatt

SEQ ID NO: 232788 - DNA, 653 bp, Cannabis indica
ttcttcaatctctttttcgcctcgtagttgttgctgaatattattttcctttggaaatgaaaactttaacaactttaacaatgcatcaaatatgttagggagctacatcatcaacagcattctctggctccccgtgataggtccacttctaatatcctttcataaaacctctatcaaatgcgtgtgctctaaccctatctattttttcaaacctataatttaaacatctcacacaaggacatctaattcttccatcggaatccttacattctgatgccattgctaaaaaagcttgtagaccattccaatattcatgacaactacgatttctgattttgatccaagatttatcgattgtcgccatatacaatgtaggtgacaaatgtagtatgaaaagtttgaatgatttgtaaagtgttatgaaagttttatgaaattttttattggcatgtatataaaaattatatatatttgtaaatataactaagttatgatatatatttgtaagtacaccaaaactatgatatattattttcaagcatttcttatgaattatatttgtaaaatattataaatatttttatgaattttagagatattatttcatgttttatgtaggacaatagctatttgtatatccatcgctcttgtat

SEQ ID NO: 232789 - DNA, 701 bp, Cannabis indica
aagaagctacgagttgaataccttgatgaaatttagcttaaatggagcttgaaaatgatgataaccccttggtttttgatgtggttttaggtcacgaaggagaggaagaagtaaggtaagttttttgctttactttaactttgactttatttttttcatttggattttcttttaatttcactccaagctgctgatcatcaaatgagatgagtaatagctccctaatccatcaaaataagtgactaatcaaagggcaaaaagactaaaatgcccttgctcactaagttacctcgtgaccctaggggtgaaattgtctaatttttgttattgcgctaaacccatacattctaaaaagttcaatgatatttccctgcaaattacttgataaaaatttgtattcatgtgactaaaattattgtccgacccatttacactgttatcaaatataaaaatataaaaacatgaaaattcacagataacatacatatcacacttataattcaataaaatttctagaattcagaaataataatcataacacatgttttcatgaaaatagggtctacaaaacataaaatgcataaataatcacataatcatattaattagtgctaagtatcctactaatcccatgtctaagtataacaatcattacagatattatccttaaaattagacttatttaagaaaaaacaaaaatt

SEQ ID NO: 232790 - DNA, 1289 bp, Cannabis indica
atcaaaagcaactaaatggttgatttttttccaaactcccaaaaagtaaaaatttctggaaacgagatttttccagttatttctatttttattaattattttgaatttcgatatgtatgctgatgtgacacaacggtatttatacaaataattttcttaaaggtatttctattaaataaaatcaattttagatataatactaaaaatacccctttaaattattcatattaataattattatttcttccaaatggtttgaagtacacgcatgatatttggtttaacttggtaaactttcctattttatgacagtaactatttctattttattttgtaatatattttaatttcctacaaatcaagaaatcaattcttgcatgaatattattgttcatttgtgtataagtaaaaaaagagatacatagtacataaagttgtaggatatatttgttagaatgagaatgtggtaccattggataagactaaacatttgtgattgtgttgctcaatgacaagtctttttctaatgcccaaagttttaccaatacaatgatatatttaaaataacattgtttcccgccaagagccaacgaccatttttaatttattttttatttgtattttaatttctttattgtgcttaaagtaaaataaagtactgatatatagtactattggtgaagactacacatttattattgtgataagactacacatttgttccgtttattgacaaacttataattaataatatattaattttgttcctttatttattttgtcttttattactttgcatgcaattcaactcatataacaatttttatttttttcaaatagtttgaagtacatgtatggtttgagtattgctttggtaagctttcctattttgtgttagtgataaatacaagtctttgtcgaaaggtttaacctatacaatgactatataaaatgatctagttttctgctagaacgaatcaccattattattttatattttcatcacttcatgtatgcatgcaattttatttttattgcttttaaaattaggcaaaagaagatatagtacatacaattacaattgtaggttgaatttactaaatgaagatgtaaaaccattgagtatgaagggtttttcttgaaatcataatgggtcttccattgtctatacaattgttttgctctaggtatgacatttgtgagtaaaattgtgtgcatataaatatagatatttaccattagcaatggcctcaccactgaatcaatcactaaatcaagtttataagtcc

SEQ ID NO: 232791 - DNA, 629 bp, Cannabis indica
cgagtcaaaatttatggccaaaagaaaaccgagaaaaaggatggctctctgctaggttttggccgcgccgaccaataatttggccgcggccacttggttcgaaaaaaccagaaatccaaattttaaggtctaaaaatgcccactttaccacatattcaaacctcaaccaatccatacccaaaactcaaccaaaaccattcataaactcaaatttaatatctcacaaccctacacaacaatgttaaaccaaaacaaaactcaaaattactttcacaacatacccaaaccatgaacataatctacacattacacatgattcaagcttgaatttcaaagccttcaaatcttcaaagtgaacccagaaattcaagcttaaaatccagaaattcagacaataattttaaccttagaatcacacaaaataatctaaatgcaacctataacatcccaatagctcagatacgcctataacatcataatccatatactcatcaataacatgcatcaaaaactcacaagagcaccgtcgaacgagttcaaagagcattaaataaaatcagcaataacacatatagaagagctaaagaattttaccacaaatccaagagttccaagtatgtaaaaaccca

SEQ ID NO: 232792 - DNA, 1235 bp, Cannabis indica
aatgatttattaaattgaaagctaaataatgaattttgtcgatatatatactttaaaaaaaattaacgctaaatatttgttaaattaaaaaaaaatatataccggtcaaactaaaaaataccatgtgcgatcaaatttgtatacgaataaaaaaagtattctactcaatccaaatcaaattcagcacccttattcaaaaaaaaaagtcagaacccaaaaattcaataaataaatgaaaatttatcatcgataaataaaataaacaaataaataataataaaaaaaataaccactaaaaatgaaagaataaaaatttctatacaatttaactaaatcaaccacaaaaaaattactatttacttcctttttatttttttaaaatcttgattgtattacctacgagtcacaactcaatttaaatttttaaaattacccttttaatctcaataaacttgatcattgtttctctctcatcatctggccacgagcatactgatgcaagatcccctttcgctgattctggaagtaattcttgcactgcaaatactccttcatcatatatatagagttatgtttatgtataatattattgtatacattatatatatgtaacaaatctaaaaaataaagagacaaagtttgaaaattgaaaaaaaaaagtacagtaaagattaataagcaaatgttgaaaaaaaaatttatcagtagaatacacaataaaaataaatattagtttaaattcagtgagagtttaatttagtcttttatttttatcaacatagccataaataaattcatatatatgatgggattgaattttcctaaattcataattgatgagtgtaagcatatgcatacatatatctatatatatagtgtgtgtgagagagagtaatagtaggtgatgagatgagcataggtgacttcaggtgatgaagttatcgtcagaccaaattttttttgagaattagcttaggatcgtaaggttttatttttatatatatatatatatatatattttgagaggttttcttaggggaattagttttatatttgttggggaattagcttacgatagtaaaattttattttttttatatatatattttttattctttgccaaaaaaaagctgttatttttgaatagatttttttttaaaaaaaaagtcacccaataatttgtcataaaccaagaattcttttatatagccacattttatattgaatagatatat

SEQ ID NO: 232793 - DNA, 1490 bp, Cannabis indica
caatttaatgatctttgtatatatattttatatataccaaataaaagtggatgacacattttaggatttatgatttagattcttggtacattgctacaagaaaaatgacatgttaaaaaataccagtggtgtctattatagcacctttcaatatattatattgctattgatataattaaatatcaaatctcatataatttaacgtattatttttatgaaatatcattaatcaatcgtaaggcgccctctagtgatattagacaccactccactgatacactataacaatgcttaaaaccaatatccaaatgaccaagttgttctatgttgtttcaaataagaaatgacaaaaaatgttaaattaggggattttatcatcttctacctcgatttttttcctcctctcaccaacgatatacaaccacccacaacgattttgattttggtagccactgttagcgactttcactggaaactaccatctatgactaatcaaggaaggagacgaccgatcaccagccccaaatgtaaaaatatattatgtaaagtaagttaatatatacattattttttctagaaaaaaatatattatgtcatttttatagatttaaagtctattattactgtttcagtatattattagtatttgaaaagaattatgttcatttgtcgaatttttaggaccttaaaactcaaaaatttgaaaaaaaaatcgtgggtccttttattaaatttacttttaatatatctttgttattttttttttattatttatttcttgtcaccttgttaaatcttctttttttttttcaaagaagaaatttttttgaaaaaatgtaatttaggtgtagttattacaattattctggtgtttagtattactcaatatatcatattgttattagtataattaagtataaaatctcaacattttttttttaaaaaatatcactaaaatactattttagtattagatttaactcacaataccttatttttttaatcattatatttgtcattttcgtattagattcacaaataaaaaaactctttaaaaaaagatttttagcataaaattttaatggttcatatattattttcacttttataatgttttttatattttgttacttttttgtcagttcattggtattttttattattatttaattttgttgcttttaaagtgtaatcaaattatttactagtattatttcaaatttattacataattatttattttgtatgttttgtgatagttttgtttatgtttcagtataacttgttttgtaccacatatggtggtttgtcatatatagtggttttacgtttaaaacttttgggttcactctaagaataatgtgtggtagacactctcaattcaagagatttttaagataagtttttattcacaacaattattatttggaatgtttttttagtactggaatttaaattcctatttttattaagtagagtgtgacattaac

SEQ ID NO: 232794 - DNA, 1832 bp, Cannabis indica
taggagcctgaattcgctgagcacttgttccacttaggttggccggcacacctgaatttggaattgaggtaagattagtataatagtatgaatatgtatttacatgtttagcatgcatgttagtaagcctgttagattacattagatatgtatgttggcttttgtactatacgccagtatcgcatcggttcgacgagagtatgactagcgtaccgagtataggctgatattacggtcgatagtaccgtcgtacgaacgttctaaactcagtactgtgtggaacacagggattagggttataatcgggtgtatgggcgtcagttataacccgggttatttgtatgttatattttatgcttttcttactgagtctattgactcactgtgtcattgctatgtgtaggtaaggacaaggctaaagctgaggagccgtgagagcgagcaggtgaagattgtacatgtcggggcggttaggcctggagcatacgatcctcgggacatcagcgcttttggtatttagtcgatgggcgacaaatcttttgtaaatgaatagcaaacttttgtaaatgtattttgtaaacgggatcccagaattttataagtaaattatgttatgtattaattaaaaagcaaaatgttaagtattcacgttttccaataacctcgttgattagcaacgagctgcacagtacgttaaaaatcacgctaacacgcctatgctagttaggaggttacaactaacgactgtaagaggaaggaaaaaactagttgaaatttatcctaaacaaaagaatatttcaatttttgaaataggagtcattttaaaaaaaaaattaacttcaaaccaatctttgttttgtccttgaaaagtttcacgatttttcgagatgtgtagggtgagattttagcagaacactaacgagtgtaagaggatggaaaaaacttgctaaaatataccttgagaagaagaatattttcaattttttaattaggctgcaattttaacaaaatttaactccaatccaatcttcatattcatgtcttagacgaaatacatatacatcaccaacaacgcaaaaacaaattttgcatgtgttgggaaatatagtgacaaacgcaattcgtgaagaaattggtgatgtaaaattttctgtaatagttgatgaagcacgagatgaatctaagaaagagcaaatgtcaattgttttaagatttgttgataaagatggttatgtgcaagaacgtttttttgggcttattcatgtcaaagacactgctgctttaacattaaaagaaggtattttctctatactgtctaattatagtcttgatgttcaatctattcgtgggcaacgttatgatggcgcaagtaatatgcgtggacaatggaatagtttgcaagctttaatttcaagtgaatgtccttatgcttattgtgttcattgttttgcacatcgtttgcaattggcattagttcctgcatctagagaagttatccctgtccatcaattttttacaaagttaaactccattgttaatattgttggtgcttcatgtaagcacaatgacaaactaaaagctgctcaattacttcagattgatgaactagaaagtgggaaaggactcaatcaaattggttctttccaaagggcaggtgatactcgttggagttctcatttgaaatctatttctattttgataaagatgtttagcgcaacatgtgaagttttattaaatattattgaagatggtacaattttttctcaacgaggagatgcagatgcagcttatgagtcattaacatctttagaatttgttttcattttgcatct

SEQ ID NO: 232795 - DNA, 999 bp, Cannabis indica
cgacgattccatttttttctgtagtgctaatgctaaaaatgcgggtaccctgctgaattgtcttcacaaatattaaagttggttgggacaaagagttagtaaagcaaagagtggagtggtgtttttccctaatactagccgtgtttgtagagaggaaaacaaagggattttgggtatcaataacctgaatcccaaagagaaataccttggaaaccccttcttcttcactgctaaaaggagggacaactatcttttcttgaaggacaaaattctgggaaagttggaaggatgaaaagctaagcaactatctcaagcagggagaacaactttggtaagttggattcttcaaagtatacccaattattttatgtctacagtgcaagttcctagtaccttgtgtgaggagttggatcgggtggtggctaagttttggtgggttggtagtgtggaaaaaaagcactattgtgcgttgagaagttggagcgaattatgtcaatcgaagagatgtggggggctcgggtttagaagatttaaggacatgaatgtggcccttttggctaaactttgttggatgattttggaagagaaggataaggtttgggtgaaactctttagagataagtattgtaaaaacaatgatgtgtggactatggagaaaaatggaagtgactcgagatgttggaaagcagatatgcatccacggttgaagcatttctgctggaggatgtttggcgatatactccccaccagaagcaatctcagattcctgcattcaaattaccaaatatgtgtcttttgccactctgaagtggagactgctttccacctattttgccagtgtcattgtactcgggcaatttggtttaggactgacatcagaatttaggagggccattggggcaatttgattgagtttggccaatggtggtgtaatctgaatgatacagatatgcaggtgacgattgcgatgttgtgtgattcaatttggaattggcgcaa

SEQ ID NO: 232796 - DNA, 759 bp, Cannabis indica
caccctcaggttgagtcctcctggaacgggtggtccgtctagactatgggttagttgaccttctggagcccatgggttctttcccggaatgatggtgagtttcctcatctggtgtattaacaccttctgggttttcagccatgaaggaggtagtttctttttcaaaaaaaaggagggttttttctgagctttttcacaaaggctctcaatgaaagcaccaaactattaacgcagatttttattaaccaaactttgagcctcacagtgataatctcacaaataaaaaatgaaagcaataaagtaagagatacgaatacaagggatttttttacgtgattttgcagttaaaattcttcatagtccacgagtcaatcttattagatttcttatagttttctcagggcatttcttgtatgctttttttcgtcgccctttggatcttacttgccactatttgtgatcacatagttggcagttaattacaatcttgactgtaatctttttacaacaattatcccctgaaatcatgggggtttgattgcatatcacctagtgtaaatgcagttataatttgaaaatcatacaattgtgatttcccctcttttacagggtcaaaatgattgtgtgttttaacacgtctttaattgttacgttcgagggtgtttcgataggagcttggttccagtgaccgtaatggtgagcaggagcctttttccttatccttccaagattgaaaaatgtacgccttgttgcttcttt

SEQ ID NO: 232797 - DNA, 1337 bp, Cannabis indica
ctgaagagaatgtagactcatgtatgttttcatcaaaagagtagcaaaatttttttactggtccatgttcatctgcatagtttatagttaaaagaccaaaaaaattattattaatttagaatattagaagcatcaacaataagtaataaaattcaacaaatgtaaaatgtacctgtgagactaagacgtctttttttattatcacttgtattgtagcttaactttagaaaatcattgaaagatttaacaactccaaggatcaggttgattttcttgtctaaatcatatttgtacttattttggataatatgaatttttcgtttcaatcttccatgtttgcatatagtcttttgagtgataggtaagtcatcatgcaagacgaatctcttcaattttaactttagaatcctttcgtgccgagctaaagatgaaagttgatattttaacaaaaaaacttcttcagaaatatttcttgagtctcctaaatctttgatgattgtagaaattaattccatgtaatagattccgtcttaataaaaaaaatagaagaatacaaaagtgaaaatttgaataaatagagacagagattcaatttatatgtacgaaggatatattttttacgaaaataaaaatataacaaaaatatttcttatgtgttctttaatcaaatgtcacctaaatgataatttaaatagatttagtatatgtgtgtatgtgatctttttaagtcattattaacttgaacataatattaaagtatacatattcataaaattattttcaagaacaatttaaagaaaaatacatgtaagtactaaaattaatttctacaatatttttttagttacctgaagaatgcatattttgttgatgttttattctactttcatgaatgttctttaaagatttcgtaagaaaaagaaagaaagtgagaaattttttaataaaagcaattgtaaagtaaataagaatgttaggtgtatatatatgcataaaaagataattattaaatttaaatttttaattctatatgtaaacaaattatattatgtataaaatatcttgtatttattttattaaaagatatatattattattatctttaataaatattttgtattattttatttttaattgtaatatttttatctttttaaaagcatcatactaataaaaaccatcaagtgaatcgttaaagaatttaaaagtaattctattgatctgttatttttttaatgtttaaaggtatatcatgtaaatcaattaaaaaaaaaagttcatgtctattgactatggttttttgtgtctatcgttttttgtctgtgagttgagatttg

SEQ ID NO: 232798 - DNA, 1336 bp, Cannabis indica
atgcaaaaagttcaagattattatacaagagaccagatccttcagttcttgattggtctcaatgagtcttactggggtattcgggttcagattatactctatgatccactcccctctctgtccaaggtgttctctatgattattcaacaagagcgccaatgctgtcttggcaatactggtgttgttgctgctacttcggccaaaccaaatcccaaccaaccatctcggagcaagaaacctcggctaacttgttctaactgccttaaaccaggtcatcttgttgataaatgctacttcctccacagttttcctcccgaatatggagacaagaaaaagaccaccaccactgctcgggcaaatcacgcctcggtgactcccactctagacgcctccgtggctggctcttcccaacttcagctgagtcaacaactgatctctctactcaattaacaaatccaaggtgctccttccaccagtgaaaatcttcctgtggtttctaacgtcttcggtaatgacaatttttttcctcttttcttatggattgtaaatagtggcgcaactcatcacatatgtcactctcttcattgctttacatcttcaaataaaaataatattgctaacttggttacattacctaatagtcatcagattcatatcaacaaatctggaaccgttaaaatatctgaccaacttgtcttaatgaatgtcttgtattttcccaaattcaaattcaatttattttctattaatgcttatcttgaacattgtgttattaaactactttcacttttgatcaatgtttgattcaggatccctccctgacttctacgattggaatagctaagaaagttggacaactgtttttctttgaagaggatcatcgttttcttactacggatatttctgtttttgcaaacaatacatgtaatttgatggacccctggcattttcgccttggtcatccttctatgaacatttctactatcttaaataatcgtttgcaattttgtgaaaaacctttcaattttatgtgttctatatgtcattttgccaaacaaaagtgacttccttttacatctaacaataattttgtcacttctacttttgatttaatagatcttgatatatggggtccttttcatgttgctagtattgaaggttaccaatatttcttaactattgttgatgatttttctcgcatacttgggtatacatgctcacttctaaatctgatgtttctttcattattcctcaattttttttctctcattgccactcaatttttagtcaacattaaagctgtttgttgtgataatgctaaagagctaaatttaac

SEQ ID NO: 232799 - DNA, 1120 bp, Cannabis indica
caacatagcattctagtattaacgttaaagtcaaatacttgctcaaggttaagtaatcactatagatatcgtaaaacatttcaccaggattagaaatttgtcttgagtcttttgaatagacattgtcaaatttcctatcttatcctcattattctgacaagttactactatccattagaatgattagatttactttcttagttttaaataaagttcctatcatgatcataacatagtaagctatcactagtgtcatcgaaataatgatgggctgaaattttaaaattctcccactaaggtaaggtactgtggtactatgtccaagaacttttattggtatcaagttactattgcgatagtaacatgttaattggaacacgtacaggattaagaataaattttgctagtttgctagttattttattatattatgtttatgtctaatcaatatatgtgtgtcatagagtttctgtggtgttatgaatataatttagagttcaatgaaaaaaagtttgaactacatatgttaataacttcttccatcccttagtgttatagagattctgtagagttttgaatatagtctagagttcaatagatataaaagatctttgaactgcatatattatttcttaacttcttccacccctatcagatcaaaagatttttttattaaacaaaatcttaataattttttaagaattgacaattattcataaacattaaattaaattctaagtgtttgtgtggtattatctctttgcagagattaacttaccatagattttgtattattaataaatacaaaacacataaaatatgataaacatataaatataatatggtattggcatacaagttaaaaaaaaaatggagctcaatttcattaaagcaattcataatgaaaacatcttaagagaaaattttattaatactcttcaaaatgacataatgaattatttgcataaatatgaaatagggaataaatttcccaaattgataattgaaactaaattgtttgaaaagtaaaacatttaattcaaaaaattaaagaagataacgaacttcatcttcaacttggagaatctccacgcttcttgattagtggtcaaaaatatca

SEQ ID NO: 232800 - DNA, 958 bp, Cannabis indica
tacattgtgtccacgtagatgcatacatggacaatctaatatggcacttaacacctaaaatggacgaaaatattaaattgctaacagaacatgagagttttgtcgcctaaatttaaattttaagagttaagtgcaagcaaagtgaaactattgagaattttgccgcaattaaccctaaatattgttgtgtttcttgattgttactatggtaaacctctgccatgagtgaggtttctaataaatttgggttgaatttcttattaatgtatgtattataccaatattttcttggtattcagtgtatgacttattaaatttcaaaataaaatagatttgtggactatgaagaattaattttaaaatcacgttaaaaatcttcttgtcatttattattattattattatcattatttatttattaaattttagaatttatttattactttaaggcttattaattggttaacgaaaatttacattaatagtttggtgctttcattaagagcctgataagaaaaaatttagaaaaataccctccctgaaacatattcaaaccttccattcatggtagatgatactccttgaaacgaagataatcaaccaagagaaataactcagcgttcagggaaagaacattataatttccataggagaaatacaactgaaattaacttctcgctctgagagagaaaatgttagagaatttgaacaaactaggagtggaatcccataaaggcccatgaggatgcttacgctcctaccagatacgtaccattagtggaattagaaaacagacaactccgataaagattgcctaaatcaaattggagaaatgttgagttagaacgcgaagctgcggctgcaagagctgacacacctcttaaccaaccaaacacatccatcaggaaacctcgaggaagacctagaggctcaaagacctaaagacatggggtaacct

SEQ ID NO: 232801 - DNA, 519 bp, Cannabis indica
ttccacagactgcccatttccacaagaattactctcgcctgtcaaagattgcactggaacaccatctctgcctgttcggcttccccccttcgcacgagctttagactttatggagactttcttacgctgtgtagtcctgcctatattaccttgcggcacaacctcactccccccaatagagaaattctccacacctccgatctcaagttcatcttgctgcacttgtttccctttgctcaatatgcggttcaaagcttcagcctccaccgtgttatcaggacccccatttttcctttttttcttgtcatgttcagcaacgtcataatcctttgaaattctatgagtcttaccattagctgactggtctccaaatgggcttcccatagttaaaacacatcctacattaacactctgggcttccaatccaggcccagtccgattatctaagcccaaacccacctctaaatcatttttcccattttgtggcacgtgcaacaaatgccccccactcttattact

SEQ ID NO: 232802 - DNA, 1514 bp, Cannabis indica
aacaccgttggagccaaaactgatgaaactgaatactaaaaaaacttctaacggttaaaactaccattgaatggtcggtttttatttttggtaataaactgaccaaaaaaaccgaaaccgaccgttatacatatatatatatattaatttattaagtttttttgcatgtattatagttactaataaaatattaaatttaaaagaataagataattagtttttgaacaaataatttgtatgttcatagttgtaaaatgtagaataatgtatttatagaataatttggatcctgtttttttaaaaaaaagttcggtttggacggtttaaaccaactaaaccgaggttcaaaacggtcggttttaagataggatttggattggttggtcggttttttgattgtaccaatccagattaaaaaccaaattttggatttttatatagaaaaaactgaccaaatcgaccgatgctcacccctatttgacttaatcctagcaatggatttcttgtctatgtatggggcaacaatcgactacaagcgaaagatggttgtgtttgagcctgactgtgctaacccagcagtgtttgtgggtataaagttcaagggacgcgcatacctagaataacacttttaagagctaaagatcttatgtgcagaggttctttgggattcctagtcactgcagtggatactagcgaacctgtctcatctggacctgagaatatgagattggtgtgcaaattccttgatgtattttatgaagtcataccgggattaccacctcctcgagaaattgaatttgtgattgagttagttccaagagcggaaccagtatcaaaggcatcataccgaatggctctagcggaattgaaagaattaaagatccaactcgaatagttacttaacgtggggtttattagaccgagttactctcattggggtgctccagtgttgtacatgaagaagaaaaatgggtcactacggatgtgtattgactatcgggaattaaaaagcttgctatcaagaacaagtatcatctaccccaaattgacgacctatttaatcaattgaagggtaagacggtcttttctaagatcgactttcgcttaggttaccatcaactaagaatgcgagaggaagatatcctgaagactgcattccgtactcgatatggacattatgagtttctggtgatgtcttttggactcactaatgccctagcggcatttatggaccttatgaatcgggtattcaaggattaccaagaaaaatgtgtgatcatgtttattaacgatatttaggtttattctgagtcagaagaggaacatgaactacatctcagatcagtattacaacggttatgagatcacaagctatatgctaagttgaagaagtgtgagttctggttatcacatctctcttttctagggcacattgtggataaagatgggatcatggttgatccggccaacatcgaagctgctcgagattggcaacaccaaaatcggctactgaa

SEQ ID NO: 232803 - DNA, 1702 bp, Cannabis indica
agttgttaataaattacatatttatttggtataataataatagacataggaaaaagtcttttataaaaaatttgtaaccccttttgaattatgtcatacacgtttcacatgtcaattgaatgataattgatgttataaattttataactataatatttatttaacataataattattatttatattattattgaataaaaaataaataaaactaataaataaatatgaaaattagaaaaaataggaaagagttaagaaaactcatctaagttgccaccttaactcttaaatgcttttctttatatatatacatatatatttgattgatgattaatgatagcatttacaatgcttactaaacacccttatatagcctataataccatattttcacaggtttttaaacaaatattaatattttaactaatttgaaaatattaaaaaaatatattttattaaaaatttaataaaatattttatttattaaatttttatttttttttaaatattaaaattatttttttaaaattaatattacgtggaccactaaaaaattgccacgtgtacaagtgtgtacacgtggacagtccaccgtggcacttaactgagatttttggacggaggtgtacagagcaaaacggaatgggagtttaggtagtttagccgccaaaaattcggtttatgtggttaagtgttacaaaccgtaaagttcgggtggtttagccgccaatatcccaatgagaataaaaatataagaatagaaataatagaattaaattaaatttaaattttataaaaaaaaaattattttgcatttaaatagttattctttttattataaaataaaatagttattttactaaaatgataaaaatctcatactattatgttatcttaaaatctgtacaaggtggtatgatgtttatttgggtgacacgtgaattattcgttagacttagaaagatacaattctcatctgtatgccgtttgacaaaggtataattgtgcaggttaaacgatacactctgactagagtcgttttcatggtaattttgcacatatcgcccagggtaaatgtataattgttgtattatgaaaagtaattagtttccctttttatttcttatttaatttccctataaaaagtgaagtcatttcattgatttgaaattaattcattcaatagaacacttaagttgctaaaactattgtaagagctttcgaggaagatcaagaacttcttgcttcttccttcacaatttaatatgagaaaaagagagtaggttattaccaccatcacgggtcaaacctttgtaacaatctttgtgttctatttccttaatcattattaatcgtttataattgttttaattgactcattgtcgttagctaaaagcgatatcgacgcattgaaatggcattgccatacttggcgtttgattagaaggaataaaaatttagaaataggaatgtaatgaaataaaataaaatttaaaatgcataaaaaaattcataaaaaaatcactaaattttttctcatgctacattggaatggtctttcttctatttcaaaatagaatagtcattctaccaaaatgatagaaaagtgcattctattggaataatattccaatactttaaaactaaaccaaacaaaataatggaataaaaattatttcctttcatattattactttcaacc

SEQ ID NO: 232804 - DNA, 2702 bp, Cannabis indica
tgaataatggtcccccacatgctgtccttatccgtaagagccttccacgcccatttaaggataaaggctgcattaatagtttcgattcttctgaagccgaggcccccacgcaattttgattgacagagtgaactccaatcaattgtatgccaagtctttttattctccgagtcaccccaccagaagtccctcaactctttgtaaactcttcctactattttctttggaattacatcagaggctgccacatatgtagcgatggaagagcctaccgattgaatgagacaagctcgtcccgcctttgataataaccttgttttccaactttttactcgttgcataactttgtccacaaggaaattcaggtccttagctctcttcaccaatctaaataaaggcaatccgagatacaatgaatctctattcatcctcttcattcctagaatactcatgatctcctctgccttcttgctagggacaccttgggtgaagtgaaccgttgatttttgataattaactgcttgtccagaccaagcgcaataatcttcaaaacccttaaagaagcttttcgcttccctcactgatgctttgccaaacaatattatatcatcggcaaacatcagatgtgtaatggctggtccccctcttctaaccttgaaacctgctatctccccagcctcattcattgccattataagtcgagaaagaacgtccgctgcaataatgaacagggcgggagataaaggatctccttgccttaagccacaagtcggggaaatcactccttgcacagaaccattcagaagtagtcccattctcttgacatcaatacacttcttcacccaccttacaaatcttttgtcaaacttcagtctttgaaggacttgcacaataaaattccagctcatcttgtcgtaagctttctccatgtctggtttaatcatcatgtatccatttttcccccttttctttcccattgaatggactatttcctttgctaccgcagtgttttctgctatgagtcgtccctttacaaaagctgtttgggctggggagatgatgtcgggtaagatgcttctgagcctgagtgctaaaacttttgagatacatttataggcaacattacagagagctatcggcctatagtcgtttactccactggggcactctttttttgggataagcacgatgttggtattatttatacacgggggaagctcagagttgctaaagaagtggttgaccatatctataacatcatctttgactatcgcccagtgctgcaaatagaaccccgtggacattccatcaggtccaaggtctctttcttgtcccattgagcggatgcatctttcaatttctctttcagttgggaaagccttcaattgctcattatcttgactagaaataatacattcctccaggcagttgagagacgggagagctgctatttttctatcaatgtatgtgttgttgaatcttggaatgaacagattagcgatattactgagatttttctcccaccctccgtcctccaaccggacctgctgaatgtagtttcgtctacgacgaatcacagtggtggccatgaagaatttcatgcatctgtctccctgctgcagccacttaacacgagatttttgtctccaaaaaatctcctcccttgcaagggcttcgtttagtttgtctctagcggttgcaaggtcctctccgtttacatgcactctatcttcaagctgctgcagagaagctttcgcctcactaacttggttaccgattaacttaaactgtactttattccacctcgccaagtgttcctttgtatttttgagttttcgataaaagttaatcatagggtgttgatgaagtttatccttccaggcattcttgacaacccagtagcatttaggatctcttccccacattagctcgtacttaaagtgtgatttgttgcagttgattcctccgtttgtatcaagaagaatcggtctgtgatctgaggtagctgcactaagcacatgagtaatggcattcgggtacagcattttccactcaatcgacgccaaaactctatcaagacgagctctttttaatccgcatcccccatttgtagctttcgttttttgaaaccatgtaaactttcctccttgtgaccccaaatctatcatccctgttctagcaaccatacgtcgcaagtcaaaggagtaacgagctgggttcctccaatttgagtaatggagattctcatgatccgcaagggtaccattaagatcaccaatgatcatagaaggattcatgtttttcagaattaaatcaccaatgttgttccaaaaagcttctctccccattatagtaggcaggccataaacacccaataagttccaaggagaaccaggaggttccgactcaatgacaacattaattaagtttttctcttcactcatcacagtacccttcagcccactactctagaaaactccgaaaccccccgctgaaccatcaggatggacataacttccatcaatgaaatgtaacttcaagcatagtctatgacatttctcctttccaattcttgtttccgataaaactatcacatcgggatttgactgacgaatcaaggtcgtcaattgtcgaactgccgcggagttcccgagaccgtgacaattccaagcaaggattttcattgagaacttggagacttt

SEQ ID NO: 232805 - DNA, 875 bp, Cannabis indica
aagctcctcaatattttggatccgtattttcttacaatcggctcaccagtcatgcaaactttttggcatttcgtactcaccatagtctacaaacgcacgattgtcttgtgaaagcacaaattttgtttgcaaaatagttacacattcacattagtacattaattagaaatttaagaataatatacgaaattataaatttgaaaataaattatatcatacctgaagtctgtcccacaatgtgttgatgtcagctctggaaatatcttcccatttgaatttattaatgggcacagacatgcaaaccacctatttgcacatgttgttgaatttttttctatttggaccgactggggtgctcgttttttcatgcaattaaatgtatagtttggcattcggtgttttggaaatctctatcttaatattttcgcctttgtatttacctcttacccctttctttttcgaagagctgtcacctggtgtagacatactatatatatggagaacatatttttagatttaaaatagacaaccatatttaaaacatattaaataagaacatatatgattgtcattgctatttaaatatcattacaattcatcatcatcaccatcatcatcagttacatatacaacattatcatcactatcactctccaaatctaagaaattgtcgtcttggtgatttggaccctcatcgtcctcattgacaatgaaattatctaactgccgagaattcacacgatggatgttagcaactttagttgggtccacatcatgacgaccataattaacatcatctaattatggaagttgaacaactaactaagtttcagctaaattatttttctgtataaaggatgtatccccatcatcgt

SEQ ID NO: 232806 - DNA, 878 bp, Cannabis indica
tttagtcacaatattttaaaatacatttcttgcaataatattttgtttgaatttattatttgaactaacatttatcaataaaacattggttttttttaataaataagcattaatattcatatatatatatatatatttaattttaaattctcaaaaagttttaatcataaatagtacaaattagatttctttagatctttggtaacattaaaaaattgaagcacatgtaatcattgatccaacctcttaagcctatgaacctcaatagtctgtggtataagctcatgagagcatttcccattagaacttggatagtcatacattggtttattggaaatcctattcttagccttattccccttagtcaaccatttcccaaccaacttatcctcaggtccaatttaaggatatttgaagttgaaatccactccacaaggtcccaagaaatcaagtatcccatccctgacatgtactccgaataaggattttggctattgcatggaattacaaaaccataatacaagtccaccctaggcaatggctcgactgacttggcaagtggattgagccgaatgtaaacatcatcgtctgccttcatgacgtagtcgtattttgtaggcaaaatatttggtaaagaagaaaaataagtatatgtttttcctgaatccatattttcggtacaatttaagatgatgatatcattaaatctaataatttctaaagcaacaaacacatattggtcaggacgttgtgagattacaaacgatgaatttcacgtcaattttagccaattgagaagattagataccataaatgagacgaagaaaatggcaatgattgtaattatctggtcgggttaaaattcctatcaagaggct

SEQ ID NO: 232807 - DNA, 2372 bp, Cannabis indica
aaaatatacgtatttatatatatatatatgtatcattttaaaaataaaatgaaaatgggtaatggggtgagaaattctttagggtggcttgtcccaataagaaatcctattgtctccctcgaccatggttgacatttttgaaggcatgtatcactttcaattttgaactgattacaaatttaaagggtcaacaacttgggagctaaatcattattggaaatgggaaaattaacattattgagtcaaaaagtttattaggtggtcatgctaagatatgatgccattgcactgcccactcatggaaattgctcattttccttttgttgtgttttatttagcattcggatcatgacaatgggaatgggatgggcccaatggatagtgcaatgtccaaaaattatcatgcccaaaaatatagataaaaaatgactaattagtaattttttcttctgaactttgacatgtagtaaatcgtgccctttgaacttttttgaccgtcaaaaatttcccccgaactattgagattgttaaatgtaaggacttttgtctaatttcattcaattttactgtttcagtgattgtttatgtactaaaccatgctccccaaactttgatatctaccaaatcatgctcctcaaactttgatatgtactaaataaagccccttgaactttcatccatttaaaattttttactaaaattagacaaaagtctttaaatttaacaatctcaatagttcggggaaatttttaacggtcaaaaaaaattaggaagcacgatttagtacatgtcaaagttcaggtagaaaaattactaattagcctaaaaaaaaataagaagaaagaaatcaacatctcggatcatatttgagattagcacttggccgaattgattgaattattgaatgaaaaatagttacaaatttaccttctattagcaattaccatattcatattatgagattaaggctcaaagacgagcaggacaaaacacaaatacaagtccttttatatgtatatatatataatatatataaatttaattacttcatacacaacatttactccactacttaatgagaaaccgtaaaaggaagcagtagcgcttagcaacccgatatttactccatacatgttagcactatgtaacgtgtcatatcattgttggtacaatatatgtattgggtcttacataatttaataaaataacttctatagaatattgatgaccatttgtaaagcgctacctttagatggtgttttttttaactgtaaatttcattcaactagaccaactcgcccttaacaatattagcaacatcaaaagagagattatactctgaaaaatacgattagcataatataaacaagatgttctagccataagatgagcagtctgattagcagactgtttgacagaatgtaaagaaatatccctaaaagaatatgaaagttgtttacagtcctcaacgacattaccaaaagtagatgacaacacattcaaatttttaacagcttgtaccaatacaagataatccaatttgataatactaacacccaaaaaatcacgcttcaaccatgatatcacttccttgagacttgagagccatggcttcagcaatctatgaaagaacttgcccaatttgcagtcttgtaatcccagccatgaccccacccttgtgatcccgaacaatcccaccaaaactatatcttccctcctcgtcaaaccgtttagctcaatccaaaagatactaagtatcaaacgcagaaaataaacttctttcttgagcttttctctactaatcaagagtgatacgagccaaattgacaacaaattccacccgacttttcctacccttccacaagagttaattttgtgcgaaccaaattgctcaaaccaacatcatcgcctgaacactttgttcctcacccagtcgtgagaataaatgaagaaactagtccccaaatgaccatgcatcaactggaataatagccaaactcgctacccgccaacaattctgtgcaaaatcgcaggcaaactaaacagtacaaaattgattcacctgccccatgacaaatcggacacaacaaatatatatccacatgtttagtcttcaactgaactctcataggaagacacccaatttaaccaccctccatacataattttttgcctttggagtccaaaatgccacaacctccccgtccatactaccctcacagtttgtctgtaataatttaaacgcactcttaactgtatacttgccagaagattcaacctctaataccaataatctttagtaactgaattagaaaggagaataccaagaatattgaccaccacttccttatcaaacaaatctttgacagcat

SEQ ID NO: 232808 - DNA, 756 bp, Cannabis indica
aataacttctatagaatattgatgaccatttgtaaagcgctacctttagatggtgttttttttaactgtaaatttcattcaactagaccaactcgcccttaacaatattagcaacatcaaaagagagattatactctgaaaaatactattagcatataaacaagatgttctagccataagatgagcagtctgattagcagattgtttgacagaatgtaaagaaatatccctaaaagaatatgaaagttgtttacaatcctcaacgacattaccaaaagtagatgacaacacatttaaatttttaagagcttgtaccaatacaagacaatcaaatttgataatactaacacccaaaaaatcacgcttcaaccatgatatcacttccttgagacttgagagtcatggcttcagcaatctatgaaaaaacttgcccaatttgcagtcttgtaatcccagccatgaccccacccttgtgatcccgagcaattccaccaaaactatatcttccctctcgtcaaacagtttagctcaatctgaaagataccaagtataaaacgcagaaaataaacttctttcttcagcttttctctactaatcaagagtgatacgagccaaattgacaacaaatttcacccgaattttcctgcccttccacaagagttaattttgtgtgaaccaaattgcgtaaactaacatcatcgcttgaacactttgttcctcaaccaatcgtgagaataaatgaagaaaccagtcccc

SEQ ID NO: 232809 - DNA, 842 bp, Cannabis indica
tgtgttttttttttgatgaatcagaatttcattgctcacaaacagatattacaaactaaagacttttcaaagtctgtacatgatctatacattctctcttctacttcttttaaacttgtagccttgtatgcactatctaattacaaagagttaaaccactcataatctacttttgctacttttttggacattacacaagtaattctagttttaatctgccactttacttcctggaccagttgctgcacttggctgctacttccctgccatattttgtaatttctggctttccataagtggtacactaaagctgcaatggcagcaacatatacagcttttcaaaacttacttattttagctctgttaatccaccgaagcactctctgcaaggatgtagttgcagctctccaacatagccaatccttgatctgcctgagacattcctgtgaaaatgtgcagcaaaaaaacaagtgaggagctatttcttctgaatcttcacaaagaatgcattgcgcatctgttgtgatttggaacttgactagcctctgtttggtctttaatctgtccaacattgctagccaaaggagaaagctatgtttagggatgttcatcctcgaccaaacttgtgtactccaatgacatgagtcatctgttgctgtcaagactttataaacttcagaaactttgtaattctgagcagtaaattggctgtagtcgacttgttctttccattcatctttgagttcaaccattttcctccagtaccaactactttgagttggggctttgtattcccaccaggactctttgctgatataaacattatgcacccatttcaccca

SEQ ID NO: 232810 - DNA, 729 bp, Cannabis indica
attcttctggaaatgaatccacctctccttcatatccacaaagtgataactcaatcaacaatgggagtctttgtagattccatttcacgcgattctccataagcatatcgcaacttgagatacgtagacgttttaaagtaaagggcaataattccatttctgaaaatgactccaaccttggacaaaaagatatttccaatacttcaagggagggatatgcaatgtccatttgagtactacttgatggaaaaatagtcaccaattcataacaaccgtcaatctcaatctcttccaaagaaggaaaattaccctcaggtagtgccacatttatcttcccacactttattaaatgaaattccttcaaagcagggaaaatcacacacatttgatcatctgtattggcaaccgaccaatccaacgtagttattccaagaagctccaagcttgtcaagaatgaaaatggcttatttagataaaccccacgaaattccatacaaaagatatgaagatatcttagcgaaactagttgctgaaatgataacaatgacaagcaacaatttttacagtctagatcaacttcttccaaattagagtaggatggatgtgttacccaatctggtaagtttgtgcttctataaccttcgattttgagttttttcaaattttcatgtggctggagtgcgataagtacttctctttcctttaccgaatcatctgcttcaccattcc

SEQ ID NO: 232811 - DNA, 1630 bp, Cannabis indica
cacacaaggagatcttgtgtctctaattaagggtctaggttggtatgggtatagattcactgtattttgtaaaagagtgtattgtttacaatattgttggtatttgtaagacacatctttgaatatagtgaaagttattatcctggttcagggaacccaagcactagccgcctagaatgagtttctaaggcagatgaagcttgtaaaattctggtgttgaatcgttaattttgtttttttttaatattcaagcataaatcaagataaaattaatctaagtatgaaaaagataagttagaaaaaaaaattggggtttacatttggtatcagagctgacagtaatggaagatagactgcatatgaagagatgtttactgagtgggaatatatgaccaagcagattagaggtctgaatagtgccaaggagcagatagagtctgaaaaagtcaagttggaggacaatgttaagaatctcaacaaacttcttaatgagaaggactatgagatctacaagctttcagttgaacttataagagctaaacccttcaggaacggctgccatcaatcaaacccttcaacttcaaaaactttatggtgatcgaacctctatcggatacaagatgttgtataagcaaggagataacttgggggtagaagagtccactgcaccagtgatcaacctgtacaaaaaggctaacaaacaatcatcacttcccttgacacttgagtcctcagaccccactggaaaattccatgttccatctagacctaccaaggtgaagttagaaggaaaaagaatttcccaagagaatatatctctgatggagagattcatcccagcgtgtcacttctttaataggaggggtcattttattcgacccagatgttataagctgcagaactacttgaaagctatcatcaatcgacctaagagttttcaaaaacccaacaaaactcgaggggaaggatctcgaagtgagtggaaattgaggtctgattgtgaatcaaatgttgggctggtagctcaagtttcaatgtttgcatttctagaaggacagtggtacttggattgtggttgctctcgacacatgactggcaacaagaaatttttagtcaattacaaagaagcaaaggagggatctgtcacttttggtgatggaaacaagggccaaattattgggacagtagacttggtgatgactagagttgcaccttttactgaagtactatatgtgaaagggctcaaggcaaacctgataagcatcattaacctttgtgatgcaaattacactgtaagtttttctaaaactcattgtttagtttcatctgatgggtgctcagtcttaatagggaagagatctagtgatggtagttatttgttggacaatgttgttctatgtaatagtgcatcattggataaatcagatattaggaattatactgctattccaaaagttctaaccaaaagaaataagagtattaaatcatctcaccttgtctttcaagagctcattcaatattattagtgctatgatgtggtcttctaaaccttatatgattgaataatcttgggtgtaaacaaagaaaggatgatgtttttgtcctgttgtttgctggttttgatcatgtt

SEQ ID NO: 232812 - DNA, 639 bp, Cannabis indica
cgtaatggtattacaatcattttcatagcttaaaagttttgggttcgaacccataatctctccctttttcctaaccctccctcaccactaaactaaccctagtggctttttaaaatcataatttagatataaagagtctcatgtatttacgtaagcttggaagttgatggatccttttcacataaaaataaaaggagttttatttgcaactttttattacaatcacttttttaacttttgtgataaaaaataaatggaaaaatattttttttttctaatttttttcataaacaatattttttatagttacaacattatccttataaaattttgaaatttttgaataatttataataccgacaacagagtttctaatttaagtttaccacgtatagtgttcaaaaaaagttaaacttattttcaacactgtaaactatttgaactttttaaaaatctgtataaataatattgtaactataacgactatcacactactaacaaaataattcaaataataaatgaatgaggtcatctaatatactacctaaaagatactttgattattatattgatatacttcacctactatttttttgttaattagtttttaaaaataacaataatataaattaaaaaaaa

SEQ ID NO: 232813 - DNA, 776 bp, Cannabis indica
gaaaagaccaaattacccttaagttgtattttgagctataatgtttaaaaagggtataatagtcatttcttaggttgtaaatggtttgtcttttagtgaccatttaggctgaaaaataagaagaaaaaaaaggaagttattatttatattaaatattaagttagaaagcctaaaatacaaaactcatatatcactctctctttctcttttctctctctcgagccaaggaaacccagcaagaaatcagggtttttcttgctaattcaaccagttattagcagaggtaataaaggttaggggtcctcaaggtttggaggtaagttcttcactctttgcctttaatttcttaggttttaggttatgttttgattgggtttttatgaattcgaatggttggtgatgattgagttcaaagtatatttataagtttaattaaaggttgtttaagtatatttgtgttattcttgttagctgttaggtttgagtttgaaagaattgagtttatgaactcaaggtccactcaagcatggtgattctgttattttgagttattattgcgttttgaaggtttgaatatattggttttatgttgttggtattatctggaaggtttcattaggtttagaggagttttggttcggttttggagcaaaaaccaagttttcccgtttctacagcagggaaaaccggttaaccggtttcacaggtgttgtgaaaacaagtaaatcggtttaggtagtaggggaagaaaactttggttttagcctcgaaaccag

SEQ ID NO: 232814 - DNA, 667 bp, Cannabis indica
acatgttgcttggaggcattaaaccctgttcatcatattcataaaacatatgacaaaggtctcgaataggaagttcgggaaaatttgatatacaacagataaaataaaaacaaatacagaatgattgataaaaaaaatcaaactaaagcaatagaaacaacatacaacaaaatggttaaaagtaaaggaaaactaacctccaaaaaagacatgggcatattttttacaccttttattttctttcccattacacagtagtcaagtaaatataaacaaaatttttaagtacttgatatatgactccacaataaatatgtttctttattactttgctggaaaaagtagaagaataataattgtatgattcaaattaaatgtaaaaggaaaactaacatttcattaagcaaaataatacaaaactaacatttagagtagcagatagaaaccaaagaccaatccttgatgcagtaaagctaaaaacaagacacaaatagactaaataataacagaaaaatgaattagaacagaggaagcaggatcactacctaaacagaacatataaaaataaataataactcagatggaacatgaatcactgccaaaaccagcaaccagtcatcaagtaagccagccaatgtcaactatgtttctagtagctatctagtac

SEQ ID NO: 232815 - DNA, 1054 bp, Cannabis indica
aagttcagggggcataatttgatacatgtcaaagttcagggacaaagatcctaattaacctatatcatatatcacactcttttctatattctctttctctatgtgaaaactatatcatatatatatctttctcattatggatctttatatatataaatatataggcaagcaaggcagctttgataaacttttgtgagactcttagaaatgaacttggttcaactattggcataacaattgttacacctggtctaattgggactaaaatgacacgtgaacaggtagctatgatatgaacataattaatttggggttatgtttatatgccttctaattacgtaggagtgtttttgattttgtttctatataaataactgtatatattgaactgtacaggacataaaattgagattacttatcctagaagagtcagctgagggatgtgccaaggccaatgtgagaagtgtgtgccgaggagagtcctacttgatggagccgaggtggctctggtggctgtttccggcaaggatgatatttcctgaccttattgactgctgcaactcttttcttcttaatttaattgatcaaaactcatccactaagcagaattgttgaaaatatttaataagatgatattactttgttagctagtagctagtggaagtatttaaattgttatgttaattgtaatagtttagtgtccaagttaattgtaacaaatgtaataatttacactactacaaaaactactattctcgtcggttgctttttcttaaagactattgctaataaaattaagtgtttaaaatcgtcagctatagtggactattcccgatagttttaaacacttgcgtacttttcctgatggtttaaaagagttacaagccaaaaaaagaaacaggattttaaagggcatcccgaagattttaaaccgtcggggattcctctattaatataaaaccccaatatttgcacgctcaaatctcatttcaaattttgaaactcactctctctaccttgttcctaccctctccctccctctctctctctctct

SEQ ID NO: 232816 - DNA, 953 bp, Cannabis indica
aacaattaagatatgggtgctttcagggaataaacaaagccatctagaagttagaatcgggacccagcgtttaggttgacatattgtctacctgggctatttccaaatatttacctcaagatgtcttccgagcatattctctattttcaccaatacttgagatttcaatgttttcgagaatcaaatggttgcatctgatgagaaaaattgggatccaacgcttaggttaatgtcaacctagatttgttccaagtattttttgagaaaagtgttctaggcatcttttccatttttgaaaataatgaagatacaagtgatctcggggagacaatgagattctttggggagccaaaactggacctcagcacccaggttgctgtacaaactggtttgcatgtttctgctcctcaaatacaaattctacttctggcattcttcttattttgatcaaaaatagggtaggagatcttgttcataatcctgaatgccatagaagtatttaaacgaggccctgataaaccccctgaagagcacccagtgcccaggttgacatatagcttgatgtgttgtcttctacttatctgattcagattctatctcgagcatctctgcacttatttttttgtagtaaatgagagctacgacttgtgacaagtcaaattcatactttgatttttcaacattttgacaaagtaaaatatcagtaaaattgggaaattttgagtctacccaattttgcggaaaaatgacatctccgagaattggtgaatagcttcaccaaaactaagaaattgactaagtgatgtcaacatacaacttaggcatcaaaaaatacaagtctgtgaatttttttcactcacacgacatttaggttgaggtcagtatgtcaacttaggcgttggatgtcaacctgagcactgagtgtttaatagcctttagtaaaatagccataa

SEQ ID NO: 232817 - DNA, 873 bp, Cannabis indica
gacacttaacacttaaaatggataaaaattataaattgctaacgggtttgtagttttgaggattttaacgctaaaatttatgttttgaaatttaagtgctagcaaagtgaaagtattaggatttttgctacaattaactcaagataaaattatatttttttcttaagttcttaaaatatttacaagtaatatatatatatacatatacagaaaaattaaaaaaaaaaatctaaaatttaattttataaataaaaaattctgttatctttttttacatttaaaaaaaaaacataaaatattaaaaaaaaaaagatattatactcaagtgttgtcatacatactcccatataaattttactataaaaaattagttataattttgaaaaaattttaatatgtaattgtctaactaattaaattactaattcatttcaacaaaaataatatacttaatacaacattcaattaaagtgaaccaaaataataaaaaataatatatcatgtacatgtatatcgtaaaacaaaaataaatttataaaaaattactaataaatataattaattatcgacaatataaataagacaaaaacaaaaaagaactaaaaaaaataaacttacaaagttatgtataattaaacaaaaagttaaaattttaattaaagtgaacaaagacatgtaacatattaataagtaaaatgctaagagagataccaagcaccaaaagaggtggcataccattattggtgtattttaatattgagtcttataaattttgatttaataaattatatagaaagcccctatttatatatataaaaattactaagaacaattaactatatataaatagtataaataagacaaaaataaaaa

SEQ ID NO: 232818 - DNA, 651 bp, Cannabis indica
ctttattgatgttgaataaaatagattacattgaaatggagttttatttagggcataaaacctaacatctatcacttccacaagtttagctcatacatagacaacattaccaaaaataactgcgaccattaccaccaggaatacttctataccataatccttccatcaagacacatggccttttcaaaagacctgctcctctaattgacatgaagaggagagctaatgccatgttgattgagattgatgcatgggagaactttgttcaataccaaaactctttcaaaggttggactaaaaatgtcttgccagtgagtgtacgtcgatactgacttccctaatgaatctgggataatgccactcaagcaagatgatgaggatgctcaaagtgtaactatcatcttgtctcggacagtgtcagaagatgtgaccttagattgaaatgacacagagtatttaggaagaatatatgtgttcttagaccaggaagatggagaagttaactccactcgaactgctttaaataaggatggggaatcatcaggtggttgatgctccatgttgtgtagtttaactttgttattttgctttccttcagttgtactaaccacttgtattttttgtttgcagacaatatgagcttcttggctg

SEQ ID NO: 232819 - DNA, 2084 bp, Cannabis indica
ttgccttagattttctttgatagactttgcccggctgcatggttgccacaaaatccatcgagtacatcagacaaaagttgtgcagcttcttcttctgtaacacacctgagtaacgacatagagaatccccttctatacatgactccatctaagatgatgtaccgtgcagcctttctcatcattttttgagcttcgtttctattacttgggagttcctcagtgttgaggtaggctgctattggcgtcatccagttcagagatgtgtcaatcatcctaatttcttccgagcaggtgatactaggtttttcaagaaactcgattgggagtaatttagccttatcagttatgttactgcttgcaagtcgggctaaggtgtcagctgttgtattttcatctcttagaattttcttgaggacatagctcttgaattgggcaagcaagtaatgtattttgcttaaataagctatctttttttctcctcgagccttgtactccccagatacatgatttactactaactgtgagtcactgcagatctcaatatgctcggcatgtagttcccaagcaagtttcatgtcgacaatgagggcttcatattctgcttcattgttggatgctctaaacccaaatttgattgccccgtgtaagtgttggcccaggtgtgacaagggcaatccatgcacaagacagttgatctgtacctgaccaatctacatgtaacttccaagtaggtttgtcttcattgttgctcggctgaggttcttgtactggctccagattgttttttgaaatgctttcatctttgcccgtacactcaactacaaaatctattaaagcctgtcctttaattgttgttcggggttggaaaaagatttcgtactggcctaactccactacccatttgagtaattgtccagaggcatcaggtttttgtaatacttggcgtaatggttggtcagtgtatacccgattaggatgagcttgaaagaaaggccttagcttccttgttgctaagattaggcagtaagggagcttttctatcagtggatatcgtcgttcagcttcaacaagtcttttgctgatgtaatagaccgtatgctggatattgttttcttccctgatcagtacgacacttacaacatgctctgtaacagccaggtatatccctaactcttctccgtctagaggttttgagagtacgagaggtttcgcaggttgtctttttagctcttgaaaggcattctcacattcctccatccattcaaatttcttgtttcctcgcaggatgttgaagaacaaaacacacttgtttgatgactttgaaacaaatcaactgagtgcggcaatccgactagttaaactttggacttcttttgttttgtaggaaatttcatatccaggagggcttgaattttttctagattggcttcaatatcttgggtgttaacaataaagccaagaaacttacccaagcttactccgaaggagcactttaatggattgagtttcatgttgtatttcttgaggacattgaaacattcgtccagttcacctatatgcccctagccttcctacatttggcgagcatgtcatcaacgtatacttccatattttgtcgatctggtctttgaacattttgtttaccaatctttggtatgtggctccaacattctttagaccaaatggcatgaccttataacagtatggacccatatctgttcagaaacttctatgttcttggtccgctggatgcattctgatttgattatactccgaataggcgtccatgaagcttaatatctcctgcctgcatgttgcacccatgagctgatctatccgtggaactagaaaacagtctttggggcacgccttgttgaggtcggtgaagtcaagacatactcacctttttttgttgggcttgggtaccagtacgaggttagctacccaagccgggtagaaagcctcaatgatgaagttgttgttgcgcagcttttctacctcttcttttaatgcttgtgcccgttatttgtccaaaaatcttcttttttgctaaacaggcttgaagtttggatcgatgtttaggg

SEQ ID NO: 232820 - DNA, 1463 bp, Cannabis indica
agacttagttgatagtattgcactatcaaattgaagtaattgctatggatcaatcaggtacgcatacctaattattatatattattattgtgttctatgttatatacaaattgatcttgcggtttattattaatttatctaacagtgcgaggatactcgaccagcctccagcatatgtgagcaatttgcatgtactgaccagaggtcacgagttggatatcttcagaggtatatcctatatatcctcaaacttgcaagatacgacactatccctaaattcatgggacaggttcgtagtaataaagaagaaagcaaacatacataatctttcattttgcttattgtaattatagaaagtaaacagatttcccatttaatttcttattgattttgggaaactaatttgatgtaattaatccctataaatagtggactcatctcacattcagggacacgaatttcattcaaagtaaacacacaagaaaaatctagattaagggtaaaatactcagagatcattgtaagagctttcgagaaagatcaagatcttcttgttcatctactaacaagtcaatacaactaaaggggagtaggctattaccatcatcaaggggttggacctctataattcttgtattttctttattttaccttattcatatttgttatttcagttattcttaaatttctttaatttgactcattatcgctggctaaaaacgagatcaatattttggtactttcattgagagcaaagaaacacaagtttttattttaagtcttttttacgacataagatggttacaaacacagaggagaaatcagaatgaaactacggatctaatgactacagatccaaacctccaaacacctacaaaccctagagatctagttaggacggaccccgctccagcttatccttagccactaacaggcccacaaacagtagggaaaggagtgactacccctctggctaggttcactctgggtttgcaagaaactagaaccactagtactcgaaccaagcaaactacccccggtactagaatcccatttgctacaaattcttaaaggccaatcggtgatgacaacgaactacagatttactagctacactagggcaaatacaaggccacaataacactcttcattacgattagcaagatactagagcagctataaaatttgtttttgaagaacaaaggcaccagttcaaggagtggatggatcgagagatggaaatcatgagagcccaacaagaagtgattgacaataattcaaggcaggccaccgtactaatcaagagagcctattaagtcatcgcccaacagcgagtagcagatacttacattcccactataccacagcacgggccagaagggtgtccaataaacacactcagcaaacccaagttaatggatcatccaattcgagtccacaaagtcaaactatgggccacatgg

SEQ ID NO: 232821 - DNA, 1515 bp, Cannabis indica
gataacgagtggtaaggatgctttatgaagcattgagtataagtgattatagtattgtgtaagtagagtgcttaatgaagcactgatattatgcaattacaatgatatatgattagagtgctttacaaagcactgagattatattgcaatggattgaacgaatgtctatttagtggaaaggtgaaattgataattatgagttgctgtgattattcttataatgtgttatgaatgtattcgtatagatgtactgatatgtatatgcatgttgaatatgtagtgatccactaacatgcatactgtgttgtaaatgctaagtacttactatactttttgtctagtagcttttcttgctaagtcattgtgactcacgattgcttcgtggtgcaggtaagaagaattggagttttgttcggccatgagtcaaaggtctcctaacagtgtacatatcaaccgtgttgtcttggcttttgagaagcaggatcaacctttttctaagattggatgtataagtaataacgattttgtaactagtagaaaaaaagatttcgttagcagggaatccccatattacgacaatatttagaacgaacgtttttcttttaatttaattaaaagttttaattaagccacacttttttcctaaactaatagattagttataataagattgtaaaagcacacatgtgacgttcctgagagtcaaggcgttacactatgccacaaagacaagacaaaaactctcaaaactatgtcatcgagataagactaaaacactcaaacccatgtcatataaaaaggttgatgggcctagccagagaaaaaagacaacctctaatatctatagattttgaaacgagaaactaggggtgtacgtcggtcggtttggttggtttacgttccattttattcaacccaacgtaaagatcgagttacaaatatttaaatacaacccgcccaattaagaaaaataaataaacttgtccaaactgagcattaatatttttttttcacattcaattgttatattttagttaattatgataatcagacaaatatatagattgaattaaagtttaaatcaaccaccatgaaaaaatatagtggtttgaaatatgtatatagattatattatatgtaaattatatataataaatatatatatataaaaatcttcttaattgggttggtcgggttagttcgagttgattgggcgagttgatattattttcaacccacttaatataaagattggacgggttatattttcatcaagtttttctgtttgtattatttattgagttatctcgatttggtttgaacaatttgttcggcttaggaagtttacaaaaatttatgtacaactctaggagaaatcctaattttctcctattatttacctttgagagagatgttttatttttttattctaataaatttatatagtagtctaattagattttgggaatatattatatgcatgtctaaaattaatgttggtatgtttaatattaa

SEQ ID NO: 232822 - DNA, 812 bp, Cannabis indica
tttgaatcccatacccattacccactttccaaataagcccagatgccatcaggtccctaccccataaaatgcttcgccatgaaaacgaaggactatgaccagggacagcctcaagaatagaatattgcggaaagtatctagctttaaggatcaagctaagtaaggaattagggttttgaaaaatacgccaagcctgcttagcaagcatggcttgattaaaatgcacaagagacctaaaccccaagccacccctgaacttagactgacacagaaacttccatgatttccaatgtactttcctagcttccccagtagaaccccaccagaatctagccatcgcagcctcaattcccttacagattttaacaggaagcataaaacaggccatagcataagcaggaatagcctgacttacagccttcaaaagaacttcctttccagccctagaaaaacatttagaggaccaacttctcagaacagaagcaactttatcacaaagaaaagtgaaagaatgatatttagagcgagtgagacactgtggaagacctaaatatttacaaccaaaaggccgatcctcaagattaaaagtttgaaaaaacaaagcacgaatatctggatcagtgttaggagagaaaaggatagaagacttagagaaattaattgcctgcccagaagccttagaataaatattaaacacatcctgaagagccaggcaagaattcctatcagcagtacaaaataaaagactatcatccgcaaaaaaataaatgagaaatagcaagggcatggcgagagatagcaataccattaag

SEQ ID NO: 232823 - DNA, 3726 bp, Cannabis indica
aaaagttaaaatgaccgtggacagtacaaataaaaaaaaataataaaggcagtaatgagtgtaaatttcccaataaaaaatactaaaaacacatggaacactaatcgacactttaaagcataaaaattgtccaaaaaataatgaaacagaaaaataattaaagaaaaagagagaataaaaacaacacttaaacacataaaataccaatcaacactttagagcaaaaatgttatccaagaaaataatgaaacaaaacaaacacaaaaaaaacaagtatttttaagaaaactcatcaacaatcagtcacttttttttttataatattataagcaaaataaaaataaatcttgaaatttttgccaaaaaaaaaaatgaacaccatgcccgctttgtctttgttcctaatgaaaatatttaactcataagaatgcacataagttattctaccaagctaacgatgaactagtgtaataaaagcatacaagttttgtaagaaaatgatttaagtcagccaccaaaaatattttaagaaattcaaagagtatgtaatagctttacaaatactattttctaatttataatttttttcaaaaattgtgtcaagcatatgtgtgtaaaagtgaaagcagagaacaatgcccaagttgtcaaaaagactttttctaagtatacgtaaccaatagagactctgtcacactgcctcaatggtagcccttttcaatgatagtgtatcctctacataactcctaattatatagtatcaacttactcagagaagactttcacacattgagataggtagttttattcttccaatggagctcgaacgcaaagtttttattacatttttcaacttttaaaaatggtagcttacataacactgttggaagaactcaaatattcttaggtggagtgaaaacttttcctaaactaaacctgtatgaaaatattatactaaaaacattagcaataaaaataatgactagaattcttttaagtttgggcttttcttctggtttaaaaacaaagacaaagtattatgatcattgagttaaagcaaaaattcaataaccatgaagtgcacaaaaattaaacagtacaaatccctaaagatatccttagagaaataaaacaaaccgagtcaatagctttagtaaaattacaatttgtttgctagtttcaacataatctaagacaaaaattttattttctacaagctctataataatgtgataattgatgtcgatgtgcttagagcaagagtgttgaacaagatttttaaaaatatttatagcactagtgttatcacagaaaatagttaaagttttcaaattaaaactataatatcccatcatttaatttgtttcatccataacagttaggtaaaataactacccaatgtacttagcctctactatagacagggagatcgagttttgcttcttattatgccttgaaatgagattgttttcaagatagaaacatccacaaatagtactttttctatcattcgcattacctgacctatcagcatcactaaaactagccatatcataatttttttttttgataacaaactaaccatattagaattagtgtctttaaaaaaccaaataaagtcacatcattaaacccctaaaaccaaaatgaccattgttgagctaagtttgagttcaaaaactcaaacctagctcaaaccatgctacatccaccaaaatttctcaaaactaacacaaacaatcataactcagaccccaaaacaatcataacaacaacctcaaatcctaagaaaactaaaattcaaactcatgcatcaaaaccaagctttccttcacaaaatcaaagaaaaaagagaactaagacttaccttggattagctagcactttcctcttccaaaaccttactgaattccaaagaattaacatcggattaaattggctgaaacttcttatgtggttcttggggtttctagggccaaaaaagagagggtatgagtgaggagagagtgacttagttatttatttattttttttatgttaatctaactcaattctagttttatttaactcatattattcagcataaagcttctttaattactacaaaatccactaactcgacattattcaattaaagcttaaatggctaaattaccataatgtgcttacttcacctttaagaaacctttaaaatatagaggtaaaataatcataacatatcccgcgtaatcacgatattcaaactatccataaaatttgtcccactaattataagatactaattcgtattgtagtgacactattggctaaatcgtcgaattctactgtaaaatataaaaatattaaaattcataaataacatgcatgacacatttagaattcaataaaatctttgtaattcagaaattatctctctaatgcctatttttaacaatttgtcttatttctactaatgtacatataatcaaaataataattaaatttttaataaactgttaattttttcatgtctaagatatgctgtcaaaatttctcacctgagaggcctcacagttcgttgttgtgcttattgtgtgcattcatcctttggtttatttctcgcaactccgctgccagagtagcggttggatcaacgatccgatttaatgcatttctttcacttgcaaccatagctttctatgcattctttgacactttcttggatcccatcctagactataggctatagcctagttgtgattccataaacaatgctaactgttaatactaaaaattagctcaacaataaatttgtattttcatattgaattctttacactaggattatctcatgcaaagattacaactttgttctattgctcaatttttcctaaatcgatagttgttcccctttcggtttgtgatcttggatttgagaaaaatagtactcttggaggagcaatttagcattgcagagtaattaatgactaggctagtgtggtcaagaatgtcaggatctttaatttatagattggaattagtgtcgcacagtctctattctcttctttgattggtctacgtggctctattctcctattcctttgcacactttcttctgtttcgcttaccaagctctgttgctcaggctgtttcgaacttagtttcactcttatgcttttcctttctaaaaacggacgatttctcctttttttttttctttcatattactttatcaatgtttatgtttatatattgatgaaatcacttttatacactccaattttttttattacattatatattatgtcaaatataattaaggattttttttcaatttaaaccaaaaaaactaataatattacaaaaatacttccagctgaccaaataaacaaatatacaactcaaataaaaaaaaaattacagaaataccacttacacataccttcaactcaggatacatgctttctgggcaactatcgcgcaaccatcgcgcaaccacgcagcaacccaatgcaaccgaaacaaaaattcaactaaaaagagaaccaccattaattttgaaaacttcacctgagaagaataccagaatcaatcaaaataggggttttttgaattcataagaaaagtatagaaaaactactacaaaactaaaattcaactgaaaattcagtttaatttgcataaaactaatgtcctgatttcaatttttaaatccatgaaaggcagatctcaaaaatttgatctgga

SEQ ID NO: 232824 - DNA, 2261 bp, Cannabis indica
caaaagatttgttgcctagcgaccaaatagcaaaagccctgatgtcccaaagatcttacgctccaagcccaactgccccgacatgtacaatcttcacctactcgctctcacggctcctcagctttagccttgcccttacctacacatggaaatagcactgtgagtcgaatgactcagtaagaaaaagcaaagataataacatagcaataacccagattatgatcggaagccatacccccaatcataaccctatccccgtgtcccacatggtgctgagtctagaacgtttgtacgacagtactattgaccatactatcagcttatactcggtacgcaagtcataccctagccgtaccgatgtgatactgtcaagtagtacgatactatcaaccataatatcagcctatactcgatacgctagtcatagtcgagccgtaccgatgtgatactgttaagtagtaaggtaccatcgaccataatatcagcctatactcggtacactagtcatactctagacgtatcgatgtgatactgtcgaatagtataaaagccaacatacatatctaaggtaatctaacaagcttaactaacattcacactagacatgtatatacatatacataccattatactaatcttacctcgtttccgaattcaggtgtgccggccaacctgagtggaaaacctgtgcggcgaattacaggctcctaaattacatcaatcataacataggtaagtgacacgctaaatcactttttggggacttaaacttgaaactaaaagtttccctatcgataaacaacatgacaataccctaaacatcacaaaaatgggaaaaactagggttcccaaaatcgcctcaaccggtagaccggttcccaaccgaaattctggttctacgaggtttcttggggaccaactggaattctagtttgtacaggtacccctgaaccggaattctggttcagtaaaggactcactaaaaaattcataactcactccaatcaacctcaattcacaccaaatcttccagacatgttctatacatcctaaataacattttccgagcaataaaactagtacccaagctcagaaacaagtttcaccattaaagctccaagtttaaattctaaaactcaaaacttggttaaatctactaatagccatccggacaagcttaaatcaacctatctaaacatattttaacttctgaaaacattgtcaaacaacaccagcaactaatatctcaatttcatgcaaaaatctcaaacttaaagctcaagaaaacataaagaggagagtcaaaacctttaccttggctaagatcaccttaaaaaccagctgaaactccttgaattaataaagaacaaaaacaaaccctagctggtctagggggttcgaaaagagagaaagttgaaagagagagatatgagatttttgataattttctatatttttgtaaaaagaagaataacttaagttttattcaattaatttattaattaaaaacataacttaaattcagattatataaattaattaaccttcagtaaaagacaaaacacataaaagcaaaatgaccattttgctctttccacactaaaatctaaaatcccgactattcttgacattctgagtgtctaactttactgtcccgctatactaaaaatactaagatgtgattctaatagagaaacaccgcgttccaatgttgccgggtacaaaacatgcaaaattatgaaatttctatatatgacatataaaatgcattctgaattcaaataaataatcgtaaattaataattcaaggttaataaataatttccataattaaatcctaataatctgctaatttccaaattaaagctaagaagtctttacaattatctcccccttaaatggatttcgtcctcaaaatctaacctgaacaagtctggatattgagctctcatgtcggattctaactcccggatgggttcatccaacttgctatttctacagagtactttgaccaaagctatggtcttgttccgaagaaccttatcctttttgtcaaggatctgaactggctgttcttcatatgacatgtttggttgcagctcaagattttcataactatgtacatgagcagggtctggaacgtacttccttaacatagagccatggaatacgttgtgaactgctgaaagatctagaggcaaagctaatcgatatgccacttgtccaaccttctcaaaaatctcgaaaggtcctgtaaatct

SEQ ID NO: 232825 - DNA, 1084 bp, Cannabis indica
acatttcaacatcaatcgtccaactcttcatgaaccaataccagcaattgttctctccactgtcgctgtaatagtaacaatacaattttcgcatcatacatctttttttttctcaaaatgtaaaaaaaaaatatttacattagtatatataacaaataagataattcataattaaaacttacagtttttttatcgtttaaataattaatgattagggtttacacgtgcgacgatatcacttgtgtatttttcaatacataaaaaccgcatttttagtttttagcttgttttggacaatttgctagtgaaattcttaaccacgtcccaataaacgcatttgatccccttaaatctcgtatgctctattttaaaaattatattaacatttcaattaattaacatatatataacttagttaattaattaaaagatttgttacataaagagtaattaaattattaccttttcaatttgacatgcatttgttggggaattttgtggccctctataaggtctaaatggataattttctctagcgcaacgacctctagcatccaattggacactaaaaaaatatatatacatgtatatataagatagtgtaaataatttcaagttataataaagaaaataattttaaattatctcttaactattatgtttacccgatattccaggaaataaaaaatatttagtgttggctattcatcaatgataaccaatgagtcaatccttctaatgcaacattaaaagactcttccttctctaaattattattaccgtgcactgcgagaagctctaagtcgtaaaacttaaaaattcatctcaaatcatgtaactcctcccaaatcactataagaataataacttactagcacgatacaacttggcatcacaatgggtcgtgcccaatttcttaatattctatacacatgtataaaaacacatttctcaagtcttttctcaaatctctatctttacttttctatctttattattattaaaacaataaaattatataactatatattatatcaaacattgggactgcacgcggctcccacatctctcaaaattttttttc

SEQ ID NO: 232826 - DNA, 1462 bp, Cannabis indica
gtcatgctttctaccacgtcatccttctacttttctttttctataaggaaaatttgacaattcatgtttaaaaattgttcagggtcttttagtaatgcatagaaattttatattctaaaattaattaaatctcaaaatacccgcctcatacattcctctttctctctgtcctctctccctttctctctaactctcaccaaacccaaccgatacccacgaccatagaaccagactgaatcagagccagaccaaacccacaaccaccgcaccaccttcggtaaaacccactccgaagatgaaacataggacaaaatcgaggaggatattgcgaaaccacaaagagaaatcgtgaaacccaaaaccccaaactctatgagctcaaccaccttgaaacccccgaaatccctacccatcgttggagttctcaactcacttatttctgcatttttttttcttctaatttttgacgatgtcgtgaaacatcgctaaatatcgcaaaacattgcaaaatcatgaaatatcgctaaatgtctccaattcacaacatcgctaaacacatcgctaaatatcgcaaaatcatactcaagttttcacgataattagcgatgtttagtgatgtgctgtgtattttttagtctcacatcacaaatacatcgttaatatcatcgcaaaatatcactaaatatgcaaaacatcgccaaatatcagaaatcatcgctaaacttcatccttaacctcagatttgtattatcattgcaaatacatcgctaaatatagcaaaatattgtacaaaaattggtaaactagaagaaagaaacgtaaaaaatgagagagtctgtcagaaaagatgatgatgagggcttgcgactgggttttagggtctgtgtgtttgacggtaggggttctaggtcggggttaatgccggagagtgagagagttagagagaatttttttttaaatgtaagggtatttttggcagaaaaagatattaaaagtatatgtatactatttttaattgggtagtatataaaacaacatattttacatttaaacatattaagttaaatttcttataaaagagaaacttaaaatatggaaatttaatcttcttttatacatatatgacataaaaaagttcataataatgtaaacaataaatgtccataagcccaaaaaattatttaaatatgccataaaaaaaataaacattaaaaaaatctcataattcatgtaatttctactatatatatttaaagtatattttactaataaatgtttttttttttaattgtaaatttcatttcaactagatcaattcagtctcaataatatcagcaacatcaaaagagagattaggttctgaaaaatacaatcaacatatacacgagacgttctaaccataaggtgaacaaatcaattagtatcgtttgataaaacataaaaaaaatattattaaaagaag

SEQ ID NO: 232827 - DNA, 710 bp, Cannabis indica
aggcgagacttgtggccaaagactttaggtaaacctattggaatagattatcaagagatatttgcacctgttacaaaaattaactatatacgaattctactatctttagcagttaattataattggcctttgaaccagttagttatgaataatgctttttttaatggagaccttgaagagaaagtgcatctgagtgtctcgccaagtttcgaaaaaagctttaaagttaaaaaagtgtgtaaattgaagaaatctttgtatggtcttaagtaatctcctagagcttagtttgaacactttggtaaagtattgaagttgtttggttacactcaaagtcaagcggatcacacaatgttctacaaacattcaaagaaagaaatatggctagtctaattgtgtatgtagatgatattgtgataattggggatgctatttatgaagaagagagattaaaaagaagacttggtgaggaattcaaaattaaggacttgggtcctttgaaatcttccttagaatggaatttttaaggtccaaagaaggtatttttgtaagtcagtgtaagaatgagcttgatttacttaatgagacaggtatgatgggttgtaaacctgggaaacacctagtgaatctaatgttaaactacaggctgttgaagatttaaaatgtgtgaaggacagagagatttatcaaagattaattggaggctggtt

SEQ ID NO: 232828 - DNA, 821 bp, Cannabis indica
tgatttccattattattactattactattattattattattattattattagacgtcctcgatatggatggttattaattagctcaacatggtttaactaaattttttttcttttaaattttaaaaatgaaaattttgtatttttaaaataactaaagtctgttatattatatttttttttaaaaaaaaaagcctgttatatatattatattattattattatatgtatgtataataatttaattaaatggttaattaagttttaaatatactaaaacaaattactagcgatataattactactatagttataaataagtttacaattttctgagtcaataatatatataggggaaaaaatatgtgggaacaaagacgaccctgaaatattttgcgattgtaagattaaagtagtgaaagatttgaagtgactattaaaagtctaataagttaatttgattaatgttgggaaacaataacaatctaccaaccttatttattttcttttgttggagattgttattattttccacatcaacctatttccaaaaatattatccattcatcatcaaacctaataaataccaacaaacaactaataatatattttgtgtatatatgtatatatatgtatttatttagattgatcaatatgattaacactggtgtcttttagtatttctcataatatattgacatgcataactaaaacattaattattatatatagttaatttgttgctcattcaatttgttgcgatgatcatattaaaaatatgaaactaagtagatgagtcgtcttttgttaagaaaaagtttta

SEQ ID NO: 232829 - DNA, 2914 bp, Cannabis indica
ggaatttccaaagctcgaacaaaccggtcagagtctatgccaatacgaaactgtagttccacctccaaatgagaaaggagaaaaggaatgccagcatcacaataaataatcaagtgaaaaaattaagcttgaaataaataaatttcaaacaagtacatgtaataatagataaacagaaaaaatgtacactacatcaatgtgcaaatgaatatgtttgtatgtactatgtggcaataaaagaatgatgggaaaggcttccaaatttataccactgcaactcgagtaagctttccttggtcctctactccttcaggtgtaccctctagcccaagtatatgagtacaagcactcacaaaatgccttgcataatcgtgtgtatgaaaactggaagctcaagaatccaccaattaaaattcttatgatctcaagattataacattaagatggtttcggcacccataaacaacataaatctttacaaaaagtgagcaagtatatggcaaaaagttaccccttcaatcaattacactagctagaaagcaccttttggtcttgctatggtttgatctcaagtcaatatataattactaattgctgataaattttaatacaagatagaaagactatcaaattgaccatcctatatggggatagaaggtaaagacaatgctcaagactacgagtgacttcaaaaatagggtggcatatcacctatggctactaaaacaatattgtttccccaagacatcattaataatttaagtaacatattgtaattgtaggagtatcatagaagattatttacaagttatttagattatgatgctataatacaactttacttacccaaccgaatcaacagcaagaacaaatcttaggagctcggattgagatggcagtgtcctatgaatttcagatgaaggaaaggatgtgtggagaaaccaacctatgaagtctcactataatatgctagtattccctaactaaaatatagaataatgatactacacaagtaataaatgatgaatgcaactaaagctgcaagaaaagaaaggtgatgtaaatagcatccaattacgctatgcagtcatcaggaaattctcataccactgtatagatttttgtctttccagcttgttgtctacatctgttgcatctatgtcaactatctgcgcctataaataagaacaaattagaacttagaagtcaaaccaagtagaaaccaataaattatacaaactattgatcacatgtagaattcataatttggctttctcaaaactactataatcaacgtatacaaccaaataattgtgaaaagaagggaaagctcaaatataccttgcttctagcaataagaactgaagtaagtgttggtgctttctttcttaaggcccctcccccaacttctacttctttttccatgttgttcaaaggcttctcaggcttcttcttgactttctctgtgtttgaggatagattaatcacctctatgggcttaggcttaacattaacgatcttattaattttgttggcctctagtgcctcaattcttctcccatcatcaggaaccaccatctgtttctgcatagcatagtttgaaaagagcataacaaatcaattaccagaactctagaaagttgttataaaaattaaaaattttatcaaaatactaaccttgttcttctcagcaactctagcgacttcatcgttagcaaataattacgcataaaaactcttgaagaaaatataaataaaaacttagcaaagacaaacaacacattaagaaaccaaacacatattgttgtacagagagaaagagagaaaaaccttgtcatggggcgattaggtttgccttcaactcctcctctagcagcaggtaccatattcccaatatcaccaagagctctgcgatttttcccatcgtgggccactgggttcttcttgtgcagcttgttttctccaccaccgatgactgcctcacctattccaataacgggattttaaaatcagaaatgttttccgataaagaacttaaatcagaagaaggattgtacccaaaacaaatcatgaatcatgggtctgagaaacaaatacatagtaccccgaaattaaaatagagagttaagagaataaattaaagaatagaaacataccaccgtcaaatcgtctgaaggagctcacgggaggttttgaccatcagaggttttgagggaaggaacacagaaaccaccagaggctgtacgaaggaactcacgggagaagagagaccacagaccaccgtccaatcatctgaagaggaggtggttagggtgaattctcaccgtcgtctgaagaggagatgcggctgaagagaatcgcaagggttttgcgtttagggagagggctgaagaggagatgcggctgaagagaatcatatgaagagagagggtcgaggattttgtgttttttagttttagggatttcacttttttttttgcgtcggttattaattctcactattgtattttgcgtcgtttctaaaagctcgctaatacaatacacgagttttaataatagacgcaaaatgaaacataaatttttaaatttcctacttttttcgtcggtttagtttttagcgtcatatacctaaaagacgcaaataacatattattagtgtcatttttaaagtgacgcctcaattatttgagtactatttacgtcggtcaacgctgtgaatagtagcgttgaccgacgtaaatagtgtattttgtagtagtgatagctcttagtcactattaaaaactagatgaatgatcgagacagaataagaattggattagcacaacccagtgcacctggccatatgtcaacttgggcgcttaatgcaatttttggagctttcgggttgatgttttgatacttccaagattct

SEQ ID NO: 232830 - DNA, 949 bp, Cannabis indica
gctgaagctttttcatcactaataaaacattatgaggttacacatcagatttaaggcattagagttgctaatggtgctcctttcatctcacatatgttgtttgcggacgatagttatgttttttgtcgagccaatgagaatgattctaccaaggtgttgacattgctcaaagactttgaaagagcttctggacagatggtaaatttctcaaaatcttcagtgttctttagtgccaacactcacactattgatcgtatgcaaatatgtcaaagaatgggcattgttgaagcagatgattctagtctctacttgggattaccgtgcattatcagtaggaataagaaggcagtatttggctttctcaaagacaaaatgtgtaagcgaattcagagctgggaaggcaagtttttgtcaaaagctggtaaagaactcctactgaaaaccgtggctcaagccctccctaatcatgctatgtcagtgtttcttttgcctataaacacttgcaagtctttagagagtgtcatgagtaattactggtggaaatcatctaaaaacagccgtggtatttcttggatgagttggaaaaagctgtgcaaacataaaagcaatggtggacttggttttaaagacttaagggattacaatcttgctcttcttgggaagcaggcttggaggttacttgttgctgataatacattggtcagcagagtttttaaagctcgttactttgcttctggttctgtcttgacagcttctcttggaaataaccccagttatgtgtggagaagcatctttgaaactaagcaattccttcttgctggtgtgaggaaaagcattgcaagaggccttgaaactagcattttacccgtggctcccagatggtactgatccttatgttcgttctgtaaatcccggccttgtgaataaaaaggtctcttctttaatgtgt

SEQ ID NO: 232831 - DNA, 1055 bp, Cannabis indica
ctcatttgtgtcttcaaaaaccgccccatccacattaatttttaactgaccagcagccggtttggaccagtaatctcttgtgtcagtgcgattggcagccagagacaccgagcccagccgcttagactgagcactcgtccattgtcgaagagtggtacgagccagccaaataacatcagcagcactacagcttctaccattccaaagcatatcattctgagccttccaaattgcccaaccaaccatgacggcttcttccaccaaccccatattgcccactgccaacacttccataaaccagtcaaaaaaattgtttgctgtggaatggccaacacctaacgcagatcggagccaacatgaatgagcaaaggggcattgaaccaaaacatggaaaattgactcgtccccatagctgcacaacacacaatgtaactccaccgaaacatgtttactagaaagttgagtacgcgtaggcaaacaacccgaaagagctttccaaacaaaatgtaaaaccttaggaggggctttaatcttccacaacatcttccaaacatcatcctccatagaggagttccaactaccattgaccgactaaagatgattacaggaacttttgacagtgaaaaacccagttggatccttgttccaaaaccaactatcactcgcaagattaacactcaaaggcacctgtttgatgagctcaacatcacgggaatcaaacaagtcctactatctactacctggcttcatgagttgagacactttacaattggtcagtgccggatgataaagaccacacactgattatcctcaaacaaaagccaaggcgtgttaagcacctcagtagatgaaccaggtcctattctactacgagcaccatctttgagcaacgtttgtgacttaaagacactacgccatataaagctcggattgccaccaaactcggcttctaagaatgtacagttagaaaaatatcgagccttatatatccgacccacaagggagtcctgatacactagtaaccgccaaccatgcttacccaacaaagacagatt

SEQ ID NO: 232832 - DNA, 1338 bp, Cannabis indica
ctctctaaagtgtaaaagagatcccaacccaaatctgactgatctcatctgaagcctctcaagactcgagtgtcgctgcccaaattcaaccacccctggaagaaaaagtagaagaagaagaactatacatttttggattacttgagaaaagaaattaggatttaatttttagattttttgtttttcttaattttaaattatttttatttttatttttacattaatttaataatgtttaaatatattaaattatgtggacttagtgagaccaatataaacatgacacctgtatatgagtatacacataagcagtctatatcgataattaacaatagtaaatggatgacaccttaaatttgaaaattgtttaatagttttgaaggttttaccaccaagatttgagtttggagagttaaatgcaagtgaaataataattgagatggtttagccaccaaaaactcaaataatatagtgaagaaaagtatcaacaatatttttcttaaaaaaaaaaaacatcgaagccgttaaaagagataatttcaaagctaaacagctcaacttttctttcatccatgctcaaaaagtagactatgcagctaacatttgggacaagttgttactctcaaaacacagatttatagggtggcagattgttaacaatcagttactgacgagagacaacctaagcatgtctttacttttatcttctgatttatgcccagtttgtgcaactgtcactaagacacactcccatatatttgttaactactcccatactcttaaagtgatcagcgagatatccaattggtgtggaaattttacttggccaaccaacatcaaagattggttgtcgagacccccttctagctttcggatagagtcttgaatactgtagtcatggcaactttgtactgtatttggatcaatagaaattgttatgtttttgatttgaaatgtaatactgccacttttatcagcagggaggtaaaaagggtagttaaaattaggatcctgaattgctgtacagggagtaaaaacaagttagagaggtatattattaatgtaatctcttactagtagtgtgggttgtgtggctgctgccgctatattgtttgttgcttctttggctgttttgaataaagatattctcttcttaaaaaaaaaacatgtttatatctactcacatcatatcaaatatttcataatagaaacttttttaaagaaaaaattaaagaatcaaactaaaaatacgccacatcagatgtttacaattcttttttttttattttttttttaaataatctattcatactctatattaatagaatattattcaat

SEQ ID NO: 232833 - DNA, 605 bp, Cannabis indica
tgaagttggcttacacatactctagggctatgtttgctgcttccaagaacgcagctttgtccagcacaatgagggcggaggtggacttggccaggaaggatgctgatgacaccagggtggaacttgaagctgttcggatggagctgggtgaagccaacataaagctttttaccgtccagaaaaaaatagctgagctgattaaggatctcgaggcttctgaccgacttgaagaaaccatcgagactttatctgctaaagtgaacagcctttaagatgaaaggacatatcttcgagtggtccttcgtcgggtggaggaggagaagaagtctaaggaggaggagcttatggctgaggtaacgaggctgagagagaaagttcatgccctagagacagccgatcttaagctcttctatgacttttggaaggctaatcctcaggcaaactttgactacttgggtgaagccaattacatgtacctcgagttctgcacttcccaagtggcttatggtgaaatcgaggtggctgcttctacctccaaccagaatgctgatgtacctcccgttcaaacaacagatcctccaactcctgccggcccagaagacccg

SEQ ID NO: 232834 - DNA, 1887 bp, Cannabis indica
gtggtaatttatattatgaagataatcacattacgaaaatgattggcagtgcacagtatgaatccaatgttgattcagtgtaacttcaaactgtttaagaagatactgaaaatcttatttatccaaattataatagatttactaaattatttgcacttgttaaattatacaataattagagtcaacaacctttgtaagcagccacaatggcaattctcacaatcatctcaagctttttattagccataagtcagaccacaactagcaccacaaggtccacaagtgaatgaacctgatgctcaatctagccaatttatgattgagacaaaggtatctattcatagttagggaatcaaatttgtcagttgacaaatcaagttcaaggcaatttttttagtactacaaagttgaatcgtaaagagcagtatgaaatcactttgaggagtggtaaggagttggaagaaccaatgaagaagtctatgtcggagccaaaggttgatgttgagaatgagatgaagctggaagaaaaagttattgtggaccttgacaagaagcagccacaagtgagtatttatcatcacatcaaaatttcatactcttagtggcttcaaaagaagacacttgacaagcaattttctaaattttagaagtcttttacaaagattcacatcaataatttatttgccgaggcgcttaaaaaaattctaacttgcttgaaatatttgaagaagaatttgtcaaagaagagaaacttagaagaatatgaaattttaacacttactgaggagtgaaacataattttacataagaaactactttccaagcttaaatatcttaatagtttcgctattctttactcagtaagagacactgttatgaccaaggcttggtgtgatttagaggagagtgtgactttaatgctcctatttatttttcagaagctaaaattaggagaagcttgctccacaactgtctccttaaaaatgatggatcgctctgttaagaatccttgtggaatgattgaagatgtcttggtaatgattggtaaatttatcttccctgatgatttccttattctagacatggagaaaaatgttgaggattattttaccatgatctagatttactactatgtatgttgtttaacatcctaaacatgattttctaaaacattgaaatttaaacacatataaagttcaagaaaccttacattggtttgaaaggaggcgcttaacccctgcgatcgaggccaaacccttgcctcgcacagaaggatccgacttgcctgtaagagcaccagcttccagctccatagtattgctactaagagctagacctccacagcttggggcagtggtattgatttgagtgggaaaagcttccgtcatggactcagagcacgcaaggtttgttctatcagcaaccgaaatagaatcagtggagtaggagctgaaagtagaagggtttgaggaagaaccaatacctgacctactaaaaggtggaatcatcccaacaacattggggttaagaggtgtagggatcatgacaactaaagattggtgggaaggggtaaaatggaaactagaagtaacctgttagtaaggaacgaaggaaatctaatggttggccccagagaacccctagcaggaatattaaggttagcaggaggaatatcaagcaaagttattacaggtgggtgtgggtattggaaaggcacactcttgtcaaagattatctctttacccctcaataaaatggtaaaacgacagagaggttcagagagagtttcatcgcatttctacaagaaagcatggcaatactgttgggttttatgccctaaataaaactccatttcaatgtaacctattttattcaacatcaataaag

SEQ ID NO: 232835 - DNA, 938 bp, Cannabis indica
taatctgcaactgagcataattttcaatacaacaacatgaataaaatatacacatacacataatacatatatagctactatagacccctataaggctatcatttttttccctaaaaaagtaaactaacattccattttctagccaaacaaacagaatacccagataacaaaaatgccaaaatgtaatataacatatatcgtattcaactaagcataatttcaatttcaataaagtcagatttttttcaaacaaagttgactaatttcctattttccagccaagaaaacacgtgcccagataaaaatccaatattttcaaagccaaaatcaaaaacccaaaccgcacctgatgaaagctaatatcgctaaggtaacccaaattcctgacactcaaagcgagctccgtacaagtcttgaactgatcggatactgagtcaggaaacgaggtgggaaacgacgccgtttggtggatgatattgagagactgagctgagatggagaccaagtcggagggagtgaggtctttgattgaagaaatttcgggtgagagatgtaccccagaattgatgatggatttgagaagtaattgctgaaattcatcctccattgttgatcagattgatcttcttgctgttgttattgagaaaattttggattttgatgaatgaattttcttttcttctcctttgttcgtcttcttcgttttgtgtttactgtgaaaaaaattatagtgttcgatgaaaacgagtcagagaaggggaaaacgacaatgtttgataaaacaacaaaaattattaaaaacgacaatatttgataaaacgacacaaattatgtgaaaataatggaaaaacgacaggttttgttggaaacgacacaaattctagatcataatctgttgaaactaaaaacgacaataattctaataaacgacacaaatt

SEQ ID NO: 232836 - DNA, 772 bp, Cannabis indica
gaaacagattcagttgacgatgcacagttgaatgagcctttttcatgcgaggacctggtctcgcgagttaccaaatctgacttgcatacatttgtatggttgaattttttgcgactcggaaccatgcgtccttcagcatcgcaaagacctcatctccctttcaccaatcccacaatcatccctgcagaggacgtggttatctctgtccccattcttcgttgtggggtctctttaccctttcatcctttcataaaagctatcctcagactctacaatgcctatcccttccaattaaccccgaatagttatcgcatagttctaggattctatgcgatgtatatggaatatgttcgaagggaaccctcaatggaggattttagctattttataatataaaaagagtgggtcacaacaatggcttttactgcttcagtaaatgggctacctctgagagtaacggggtagaaggcatggtttctaatatgggggattggaaatctaagtggttttacgtattcaaagtaccaggagttagggcagatttcaatcatctacctagtacgtcgtgtatcccaatgcttagtttatatttttgtcaccttgtgaagtcactaatgtttgttttttgttgattgtagatagaccggttcgacgtcttctggatctcactcgtaaagagatcgctgaggttctcggtagcttacccgttcaagatcgcgattggcgattgttgtgcacgattgccaaactcgagaatagctaatccccgagg

SEQ ID NO: 232837 - DNA, 4641 bp, Cannabis indica
gagattgggataattgactgcttcagcgttatctgcgggatcaataatttgattggaaactgaaaattacattcttaatagaaattagaaatgattgttgagggcggcgaataacctttaactagtttctcatatcgtattctttactttaaatttgttcttttctttaattcttattattgaaatttttattctaatcttcaaaacccctcttttttataattcttgttactaatgtgtgaataattaaataaacatagttctcgtgggatcaacccttaatcacgattatactaaaataattggaagtattagaattaaaaaaatagtaaatttgttgtggcttacgacacgaatcacataacaaatgattcttttaacatttgttacatgagactccatgggatttccttggtacctggcacacagaccaacactataactgaagtcaggcctactagcagtaagataaagaagactacaaatcatgctcctatacaatgtaggatctactttgacaccgttctcatctttggacaacttcacagttgttcccattggaattttggcaatccttgaactttcaagtccaaactttttcaccaaattcatagcatattttctttgagaaacaaatataccatcatctaactgcctgacttgtaaaccaaaaaattagttcaactctcaccacatactcatctcaaattcctctttcatctgcttcacaaacacctacacctcattgttagatgtagaaccaaaaacaagatcatctacatagatctgagcaatgattatgttagatttattattttttataaataaatttttatctactcgtcccctcttgtaactgtgagaaactagaaactgaattagtctctcataagaagcccgtggggcttgtttcaaaccataaagagttttctccaatttgtaaacatgatcaggtgcatgaggatcctcaaatcccttcagttgttcaacatagactttttcattctagattccattgagaaatgttgatttgacatccatttggaataacctgaaactaatcaaacaagcaatagacaataataatataattgattcaagtctagcaataggtgcaaaggtttcatcaaagtctattccctctacttgtgtatacccttgtgcgacaagttttgcttcattccgaacaatcgtgccaaactcatcagttttgttcatgtaaatccatttggtactaatgatattgatatacaatgctctaggaacaagaatccacactttgtttataaaaaattgctttaactcttcctgcatagctttactcaaaaattcatcagttaaagcttctttcaaatttttagggtcaatcaaggaaaaaaacaaacaaattgagcaacactactaaatattcttcttgttatcatgctatcttttggatttccaagaattaagtgtgctggatgattcaatttaactggactagagggctctttctggatttcatctgagatgatatttagaaacttcttttctgtcttctcagtatctgtttctcagatccatgatctgttggaacagactccttagttgttacaacaggagagtcactgacagtattgttttcttgatttttagcaggtgcatcaataaacctatcaatattttcttcagaggaaaacttagaaaaattcctgcaatcatcaataacaacattagcagactccattacagtttgggttctcatgttgtgcacatgataagccctactgttagtggagtatcgaataaaataccctcatcacttttggcatcgaacttaccaagattctctctatctcttaaaatgaaacaagcacaagcaaagacatgaaaataagctacacttggttttttacctttccagattttatatgatgtttttgaagtatttggatagagaaaaacatgattaatgatatagcaagcaatgttaaaagccccgacccacaatcgtttggtaagtttcttgctatttagcatcactctagccatttcgtgaagggtgcaatttttcctttcaactactccattctgctgaggagttttgggtcctgaaaactcatgagaaatacctacagacttataaaaatcatcatacacggagttttcaaattctttaccatgatcacttcttatgcacaaaatctttctaatattgcaatccttttcaacattcaatttcaaacaaagagttttaaaagcattaaaggtatcagatttttctcttaagaaatctacctaggtaaatctaaaaaaagcatccacacaaataaatatatacctttttccatttaaactctcaatttaattggacccacaagatccatatgaagcaattctaaaacatttgaagtgtttatatcagaaatacttttatgaatgatttttaattgctttccaagttgacaagacttgcacttaccatcagattctttaccaagtttaggtaaaccacgaacaatgcctgcatgtgacaactttttcaaagtttcgaaattaatattaccaagcttagcatgccacacatcaatattgtcatttacaacagattgacacataattgaaggcaacatggtatagcagttgtcattagatctaaaaccttcaagcacattctcaccatttttgttcaaaacaaaaaaattgtctttatcaaagttaacagtgtaaccttgatcacatatttgacttattctaagtaaataagctttaagtccttccacaagaagcaccattttgatcttaggaaacccttcaaagctaagagtacctattccaagaacattaccttcaactccatttccaaaggttatagatctacaatgcataggtcgtatgtctgtaagaatagacctatcacctatcatatatctcgagcacgcactgtcaaaataccaaaaacgtgaagaacctattctatcatattcagaactaaaaccagcaaatcatttattctttttaacccatgatttttgaatattttccctttttactctctttgttttttcaaaatatttgaatctttcaaaaagttcatttttggcaaagttctttagagtaaaacacttatgtcgaatatgaccttttctcccacaaaaaggacccgttggaatgaacttttcaagcttaccattaatttaaccttctagttgtaattgatctattaacataatagagccaattgatgcaacaactttctgagaagttggaacagtcatactagcaggcagaattccaccagaaacaagcacgtttttttttttgaaaattgagactttgatgctccaagtcccacatgatttctttgacttaaattctgtatctcctcaaaaaccaagattaagtattcttacatttttctcaagtgcatttaaatattttgacaacttactaatttaatcattttttaaattatttattctttaaatttttcatttaactcagaaaattgtttgattataaatgacaattttttattcttgcttgccaaggatcaattttcagaacaaaatttcaaccacgaatcatacatctccttgtaagattcacttaaagatgaattaaagattcatcagtcaattcagattcatcactatctgaattttcttcatctttgggagtattattcaaacatgcaaaattcttacttttagatacataattcgccataatagaagttaaagcaacattaccttcctcatcttcactactctcggagtcattatcattccaagaagctatcataccttttctattcctcttcaaggtgtttgcacattctgactggatatgaccaaatccctcacacaacctgcactgaatattttttctgttagattgaaaaggtttaagagaagaagtaatacctcttgaagtcttaacattagacttcttatttccaattttcttcaagtattttttgaaaattctttgcaagaaaggccatgtcattatcaccaacttcatttgacgcttcctttccagtacttttgaaagaaatagtcttttccttttccttggagatactcggtttctcatttgaacggatttattgattttattcaaaggtacgaagagaccctgtcattttttctactttcatagtattgaaattcttagcgtcttccatagccgcgagctttacaatgaacctctaaggaagtacttgtactatctttctcaccacaacagaatcatcaagtttctcaccaagggcaaaatattcactataaatgcagataacctttcatagaattcagatagtatttcagactcagtcattcttagatcatcaaacctagtttgtaacatgataaatctagatcttttaacatcttcagttccttcaaactgagttcgaagaatagtccatgcatatttagcagaaatacaagtagaaacatgtttgatgaaactttgaccaacaccattaaagatagcatgaagagctttattgttataactagacaacttctcttctttagtagtcaataaatgtttagatataacctttgtgctaccatcattgttgttctctatgggaggtgaccatccagacaaaattaatttccatgctttttcatcttgagctttgatgaaagc

SEQ ID NO: 232838 - DNA, 1146 bp, Cannabis indica
ataggtggagggatagtctccaaccaagtacaagtctcatccacccctaatgcaaacttagcaaggccatgagccgcgtaaaagactaacaacatcaattattaaatctgaaaatgctgagtttgaattgaagggagcttttaaagcattggataccatgagtgcatctgtctcaatgtgcgtaaatggcaattgatattggatagcccaattgagactgtgaaagagggctttggcttccatctcatcaaacttgaaattcccaatgattggcattgcaagagcagccgtaacaagtccagcagaatcctgaagaaccactcccacaccagtggtgaatgtagaggcattgattgctgcatctatattaagcttaaaagctccaactggtggtgagggccatggaacaggggctggtgggatttgggaagtcacggtctggtgcacatttgcaaaaggagcaacaactggttgtgattttttttttgagctgctctacaattctgcaggaaaacagtagcaaaaacagcaagagcattggctgatctcgctatcttaccgtggactaccttgtttcgttcagtccaaatcgcccaaagtgtacaaaagagttgctcaagttcagctttgttgtagactgatgagagatggatcaagtaatcaccatttctcattgaagtacacccataccaatcaaagttgtagttgagagatctccaaactgctttagcgtacttacagctaaatagagagtgtcccgttatttcccaagcttgtttgtggatagagcatgtggaatcagtgataattttccttcgaacaagtgaggtggccacgggaagagcatcatgagtgatacgccaagcaaaaatcttgaccttttgagggatttgaagtgaccagaacagtttcgaccaagctaattctgatgtggagcttgaactgagattttcgtcagcaagcgatgtagtaagatgataggcactttgaacagtgaaaatacccgaggattgataatgccatatcaatttatctctagtgctgaagtagctcaaaggaattgtgagaatcctctccaaatcaagttggcaaaaatactgctgcaataaagggatattccattgtctctcttcggtgatgagattc

SEQ ID NO: 232839 - DNA, 1654 bp, Cannabis indica
ctgcacatgttattgataatttattattaaaatatatatttaaaaaattataacttttagtttttatatataaatgaaaaacacatgatttattaagaattaattaagaaaaagatttagagatgggaaagatgaacgtgaacatagacctttgttctccaagaaaaattctatagaaattctattttctttagcaatagaattttttgatctgtaagttactgttagaaattatatttagatatacatatgaatcttaaactcatgtcaaaatataagattatgaaacaataagatggaacacaaacatgattccgtgatgttggatacgagatgagattgtgggtatatggtcttccaaagactaatcttctctctatgggttgagattagtcttaggggtcaaaccctaatattctttatatagcaaactaattagagccccataaaccctaataagtttactattgggtattacacattacaaagcccataccaaataagatatttattgagctcatttaatttgatcacttatttagcccaatttaaaatattagctcaaataattgtcttaatttgtaagctcaaatattaaattattaaaaataatccaacaatctcccacctgggctctaaattaattctaatgacaattacatttgataacttcatgtgcgcacaaacttgctatctattctctaaacatctccttaaacaatcttgtccaactcctataccaatatgagaccaaagtgaccttcgtcgttatatttatcgtaactagacgcatcaatgatcaccatatcaaatatattcaatgacatagatcaagtatggatgtgtaactagaaattacatgcaattactcatgcctatttccaatcgtcatttattccttagtgagatcaatccttaatctttcaaactttatgtcaaaccacaattaaaagatagcacatccagaataataaaaataataaaactatgaattttattttgtagaaacttaacctactcaaagtagggtaatagtgtcaatcatcaaagtaactaatattgaaaacaaactcccactgaaactgcacatcctcaaataaaataacacccatgtaagctatatgctcatgaaagaccttgggtgttaaagctttagttagtgggtctgctagcaataagtttgttcctatatactcaataaatactatcttactgatttgaactctatctttaacaactagaaacgtaatgtctatgtgttaagactttgataagattctattgtcatctaaatatagaactgctaatagattatcaaaatatacctttagtggtctttcaattccttacacaacctgtagccaagggataaaatttgcagccatattgcattattagttgtttcataacaatctatgaatttcgttgccatgataggatgagatgtgagtgtctacttagtactttttcatgatgttgaccgaggttttcggcaactaataaaatattataaagttagtgagctgtaagaaattgagagaaggatttttacgtggttggggcgttaatgagccttagtccacgagtctttgttatttatggatgtctttaatacagagaatgtatttggggagtgtttcactcttataaatac

SEQ ID NO: 232840 - DNA, 1940 bp, Cannabis indica
gtgttttttcctattaagatggataagaaggagaactcatgtttgaagagatacaaccttcctactcaacagaaaccgtctaaaggataaaaataaggaacggttgggtagttattagatattatcccatgtgtgaataaatgaaatatggggaatgtcaacgtttcattaatagttgtaaataaatcaatcccaaaaagaaaaattgtcaacctatattcctataaatatgggcaaaatgtatgggaaaagggacgatagatttgagagagaaaatctgatcatttcaaatattgagattgcattttgtatccaaaaaatatcccaaataataaggactcgtggagtatgtagattttaactacaaaaccacataaaatatctggtgtcatttatttctatagagtattttattgcaaaaaaggctatttatttagttaacgaaaatctcctttaacagtttggtgctttcattgagagccttggtgataaaattcaaaaaaatccctcctcataaacacaatctacctatattaaatggctgataacagtcaacataacgataatcgtcttgagataacaacacgtcgtcctggcaaagaacctatgggatcttaaagacctaacacatctaaaacaccacgtttaaggaggaacgatggtaatttcaatgttgatggtgatcaaatctagtgagtatgcctatgatcctaccagatacgtaccattagtagaattaaagaatatgaaacttcaataatggttggctgaattaaactgatgaaatgctgagttggagaaaaaagctacagcagccaaggctacatagagaacaaatcctcaaaaccatcctgatcctattgtaaggagacctcgaggctcaaagactagcagacaagaagtaaaccaagggaatccaccaaatactcaagaggaacaacttgggaatacaaggaatcaagaacatcgacgagatgttccacaaacttcccatggatttgctaaccaagggaatgaaccaactagcatgccagactcatcttgtatgaatgaagaggtaaggtagcctcgaccagggaaccagggatttcctcgtgataatgaaaaaaaaccatagaaactaaccaaggtaaagtggtcttctactgagacatcctcagcgtccttctcacgcagatagagaaaatgtgcacacatatttaagcagagggcatgtgtccaatctcttccaaagaagaagaccaacacgagatgaagtaagctcaagcacaggacaatcgcaatcccgcgaacatagtaggtcaagtagacaaacccgagatgggagtaggtctcagcgttactatgctgaccaggaaagcataagtaactcacatagttatcagttcgagagctactcagaaactagatctgtaaataactatgaacaaaggcatcgtgaacttaatttatgcgagagatcaaatcgaaggcaacatgaccttcgcgagcacctaaatcgaaatgcgcctgatttgtataattaacttaaccaaaatgtaaatcagcagctagtggatcccatccaattactagtaattcaattagaggataaattcaaaaaatatcaagatgaagaataaggcaagttgccaaattacgacttagacaaagaaattgagccatttcaccaaaatatcttcaattcaaaatttccttagggatttaagaacctgcatgtctcgtaatacgatgggaccatagattcggtccctcatttaaacaattttaatactactattcgagcaagtgatgtctcaaataacttgcgttgcattttattaccaacctccttcacaggggtcgcgagcaattggtttgataaattcgcaaatctttccataaaatcctaggaacagttgtcgagggactttaaaaagcagtttgaggctgcaagagac

SEQ ID NO: 232841 - DNA, 773 bp, Cannabis indica
catcatcatcatcaccatcacgagcaaaaaattttctttttttttttctgttgttgttgttgtttgttcttgatgataattgttgatattttgattcaagaaatgccaatgtgagttttggggtttcttgaaaatttagaaattttttgttgattttggtaaattttgttttttgattggtttattcatgtttttatggatttcaattatgtctattatgttagtacttcatttcctaattgcacaccattattcaccttctttgtttttttatggcttttttgttgttgataataattgttgagattttgattcaaaaattgctataaaaaaattgattcaaaaaatgcaaatggggggttttttgatgttcttgaaaatcagaaatttttttgttgattttggtaaattttgttttttgattggtggattttgttggttgttttgattggtttattcatgtgtttatggatttcaattatgtctaatgtgttaatgcttcatttcctaattgcacaccatttttcattttctctgttttttatggcttttttttattgttgataataattcttgagattttgattcaaaaaacacaaatgtgggtttttgaggttcttgacattcagaaattttttggttggttttaataaattttgatttttgattggtgggttttcgttcttgttttgattcttaatgttcaatttggtttattcatgtttttatggaattcaattatgttaatcttcatttcctaattaggtgacttt

SEQ ID NO: 232842 - DNA, 1007 bp, Cannabis indica
ttggaaggtaaaatatcagaccagactttccataggaccagcttcaaacgagggtgaatattagactgccataatctctcccagaccttgaggggtctcttaaatctgccacattgacttacccaatagccacttttcaccgtgaaatgcccagacttggaccccttccaaaaggtgatatctccactgctcaacaacggcctgatgcctagaatagccgaggccacatcttcatcaaagctagctctaataagctcttcattccacactctcgaaccttctaagaataagtccgagactttgacaaaagcatgtctccgagtatagtggaagccattccgaacctcttccatagatttaccaggaacccaaggccgctcccaaagagcagtctccccatcaccaattaggacaccagccccctcaatacaaacatgtcttgcctcaagaattcccctccaagctctcgaatccccagaccttttatccacttgccaagcatctaatccttgacagtacttcgactcaaggagtcttacccaaggtttgttaacacccgtaagcaccatccatcccaacttagctaataaggctatattaatctcgctgaaccttcttaacccaaggcccccgcaacgtttaggttgacatatctcattccaactcttgtacgcccgataacgctgtttttccgagtttcctatccaccaaaacttggccaccaatctatcaagatcctcacaaaccgactttggaaccagagccgttgacatgaaataacccgggatactttgaaggaccgagttaaccaaagtagttcgacccgcttgagaaagattcttagccttccacccctcaagccgagatacaatcttctccttcaaaaacttaaagtcactgcgcttattagccgaaaagaagaacggattacccaagtatttctcttgaggcccgagcccattcatacccagcatagattttagttcatctttattcctttgaggggt

SEQ ID NO: 232843 - DNA, 1454 bp, Cannabis indica
ccaatacgacacctaaccccacttcgaaccatctcctgagtttccataatgctacgccacacaaagctcggattacaccccaaatctgcagatagaaaactaccacttctataataacgggctttgaaaatgcggctcaccaaggaatcaggctgacttaacaaacgccaaccttgtttgcttaaaaggctcaagttaaaatctcgcagatttctaaaccccattccgcccttagacttatgtactgttaacttctcccaactcttccaatgtatccctttattattccttgttgaagcttgccaccagaatttgcacattagttgctccatttcctgacaagtttccacaggtaaaaggaaaacattcatggcatagcttggtaaggattgagccacacttttaattagcaactcttttcctgctttagacaaaaaatttccttcccaactctgaattctttttctcattttatccttcaagaaaccaagcattgaagtcttgttgcggcccaaagtgtttggaaggcccaaataaaagctattctccccagcttcaccgattcccatcaaagaacaaattgtattcttgacattcggggttgtatttggactgaagaaaatagtggacttctaatgattaacttgctaacccgaggcttcttgaaaacattgtaagagttccatcacatttctagcaccctcctctgtcgcttgacaatagatataactatcgtctgcaaataacatatgagacaccaaaggagccccccttgcaactctacaacctcaaattctgcctcttctctcataatcattcaacaatgccgagaaaccttcagcacacaagatgaagagataaggtgacaatggatcaccttgtctcagccctctagtaggtacaatcggccctacctcttgtcccccagcgacaaacttataagaaactgagcaaacacatgtcaatagaagccgaatacaatgttcttgaaatcccaactttctcaacatagcttccaaaaaaccccactcaatcctatcatacgccttgctcatgtccaatttcaaagccatgaaaccttgcttacctttttgcttccgcttaagataatgcataatctcatacgaaaccaaaatattgtcagtaataaggcgtcctggtaagaaagcgctctgagtctcagaaataacactggggagacatcccttcaacctatttgccaaaacttttgacgcaatcttatagagaacattacataaagcaataggacgcaaatcactcatgctttcagggtgagtctttttcgggattaaaacaatattagtatggattaagtgatcaggaaactcaccgacactgaagaagtgttggaccatacttgtgacatcctttcccacaatatcccaatgcttctggtaaaacccggggttgaaaccatccggacctggagattt

SEQ ID NO: 232844 - DNA, 791 bp, Cannabis indica
tcttggctctgcagcatatattgcacctcttgtaaagtgacttggtcatgtcttgaggttaggttcacaacaacagcttcatactcatgaccaagacctcctaagatgtataaaatgagatcatcatctgaaagtaattgtcctgcagcagataaaccatcagttatatttttcatttttaaaatgtaatcatgtatatcagcatcttggatatccttaacaaattgggctgcctttgggcctttcatttcagcaaatatcaaggtcagtacaattttctcattcaaaacatcatttattattttgttttctagctaatactgattcttttaaaattaattcatgttttgtgtggattttgaattatgctgaaagtgtttgctagaattcttttaattcatatgatattgggaaaattttgtttcttgtagtgagttaagaatctgtaatagttatcattgactttggagcgataaattattgttatggattcgattcggttgctttccatggcaaaggtactagtaataccctaatagggtgtcgttggattggataggtttgtttgtgtaagagagatgagttcattggtgtcacatttttatggaaacaacagtaactacgtattaaatttgtatgttagtgtgataaattcatatacaattggtggtggtgctatgcacactatgttattgtggtgtcctaggtacaataacaatgatatgttactactatctatggtagatcatacttaaaaatctgtaaggactctcaatatttgtagtgatgtt

SEQ ID NO: 232845 - DNA, 747 bp, Cannabis indica
ttgaatctttcttgaagatcatgccacatatcggtggcaagatcgaaatacatgatactttgtgctatttcaggtgacacagagtttatgagccaagacattaccatattattacagtgattccaagagttaagaagggcgttaccagattcgggtcgaggaagagtgccatctatgaaggcagatttgttctctgcattcaaagccattgttatacctcttttccaagattgataatttgttccattgagaacggtggacacaaggattaggcctggctgatcggctgaactgagaaaaaaaggactggaaatgtcctcatgagccaatcgatcaagaagtgaacgccgccttggttgagatgaatcagctggtggaactggagatgaatgaacaggttcttggttgtcttcctcagtttgagatctgaatcgagagctcagaatgcgagttgaagccatgggattgttggctacaggtgcggaagtagaatcggggtgaagatccgatcggttgagtttagaagcaggtggatgaataccatcatgcgatcgtgaggagggcctcgccatggaagagtggccaaggttgtctactgataccatatgaggaacagagcgagagagaagaaaagagagaaactcagagaaaagaaaagtactattttattgaataatactctgttgatttacacagtacaaaacaagggtttatatagcagtatgaaacctagctgcattagtttag

SEQ ID NO: 232846 - DNA, 866 bp, Cannabis indica
atctctaatcattccataccccaaatgaaagctattcttatctatatagtctttggttcaaaaattatcccattccactaacctagaattacagtagtacccttcataaaaagactctcctagaataaaaccttgaggctttttcttgtattaagtttatcatgaagttcttctggctttctttgaacttcaagaactaagaaaaatgggaaagaagcagttatgtgctttgaccagctgtaaatatggaataaactgtgacaatttacatccttttattcagaacgaagtgcaaaagtctatacaaattaggagcatgttatttgtgtactattggtgtataaagttgaaagaatagctataagttagtatgttctcattgtcaccctctgcataaagttcaatatctttttagatattttatcatgatgcaaattaaagaagttcagattttttttttaaaagagacggaggtgtctaagactgatctcctcccaaatttattagggaggccctcacttttggtggaggaaaactgtggtaacaaaacaaactataacattagaatgcttgacataacacatcaaaatgcgtaggcctaaagatcttaaagcatcattcgaacacaaatagcaatatagctattaagcaaaagtaaaagtaccttggtggagaatacatccccaatctctgttgaggtcttggaaagatagaacttcaaatcctttttctcttataaacccaagttgcagcccaaaattaaagaagataggattggttataattaattaactcgaaatattttggatttttttagtagttatagttttcgatatgttttgagttcttagaattagtattctagt

SEQ ID NO: 232847 - DNA, 642 bp, Cannabis indica
aaaataaaaaatcttctacctattaaaataaattcaatcaagagtaatttgtaataaaaatacctaagtttaacttctagttgtaaataaatatctaaatttaatttttggcagtaataatacataagttataattttgatatttctgaaggtacctaattgttaagtgaagtaaattttcacgtggtaatccctaattagtctaggtcattatttttttttaaaaaaattagtttgaatatatcaataagaaaatgacacgtaaataattacttgaaatttaatagtaggtacttacggagttccaaaaatataacttaagtattattaccgcaaaaaattaaactcaagtatttatttgccatcaagagttaaacctaagtatttttaccgcaaattattcttcaattaattaccacatttcctaatattaattagtataaattaatatcaaatcacgcatattttattttaagatttttaaagtgataacatgactttgatttttttgtagtgttaattgctaaaaagttgctaaaattaaaatatagttgctaaaaatgtactaaagatatctaggacgacttgagagtgtcactgattttttaatttaataattattatcaaaaaaaaaaatactaa

SEQ ID NO: 232848 - DNA, 656 bp, Cannabis indica
ggtcttttgtgaatgaaactgtactggtttgatatattacattcattgattgtgccatgttgctcaagaattaaataataaaatataattttcaaaaatttaattaaataattaattaagtatcttggataaatcaacataatttgaaaaatattctattttaagttgttatacagcataaatatattttctaagaaaatctatacaactaagtatctagaaaaatctacctaattatcaatttcaaaaaaaaaatattcttatttaagctggtcttaagaaaaaaaattcaatttaaatatattttctaagaaacttaaaataattaagtatctaaaaatatctaactagttattagtttcttcatttaattaaatatcaaaaaaatacatatagtttatcttgaattttatttcattaaactaagcgtatttttcttaaattaatttcaaaataatctgatgaaagatgaatttcatatatttcgaaaattatttgtttggaatattttactaggatctagatttactaaaaagtatgtttattaacatcttaaatttgaattctctaaaacaatgacataaacacataagggttaaagaaaaccttacattgattgcagtggaatataatgactccttccgttcaagatctct

SEQ ID NO: 232849 - DNA, 1234 bp, Cannabis indica
ttattgatgattatgattatgttattaaccattttgttaatcatttttgcaattttttgggcaacaaaagtgcagctaacaggaagatagatttggattgcctaaattagggtcacaagttgagcattcagtggcaagtaaacatgatcagacccttcacaaagaaagatgtcaaggctgcattatttgatatacactcttttaaaagcctaggaccggatggctttgggtcgaggttctttaaaggttaatggaatcagataggggatgagataacagaggcaattctctatttttttcatgataggaagttgcctagtgacctcaataaaacagttatctctcttatacctaagaaagataatctggcaactgcagctgactataggcctattgcttgttgtaatactttatacaaatgcatttccaaaatgctttgttctcatcagaagtgctcccttctctgatccacaacaaccaatgagcatttatcaaagacaaattattggctcacaatatcttaacttttcaagacattctcaagggtatgctaaaaaaaatatctatgcaaggtgcttcttcaaaatagacctttgtaaagcctatggcatggtggattggcgctttattttgaatttacttgagggtctatgtcttccatcacaatttatcaagtgggttctggtttgtttaaagggtacttcttactcgctcatgatcgatggcatgcttcatggagctttcaaaggagagaaatttttttcccaaggtgaccctagatctcctttgctctttgttttgattatggaatatctaacccggctgctcctccaagcttcgatgatgaccttattatcttttgtaaaggtaatatcaactttatccagatcatcaatcaaattattatcgatttttgtgtaccaacaggtcttactataaacaaggacaagtctcaggcctattttggtggtatcaaggaggattgcaagactcttctcttagacttaatcaagatggaagaaggaatgtttcctctaagcaatatttaggggttcacttgagactaacaaaatggaaagcagctgactgtggtgagattttagataagatccagaggaggcttcataactgggcaagtgaaaacctctcttttgctggcagagcttagcttattcattcggttttactgggtattaaaaacttttggatgagtatattttttctccctcaaaaa

SEQ ID NO: 232850 - DNA, 1461 bp, Cannabis indica
aagttcaaacataaacataagcatccaaagtcaaagaaattacaatcatccaaagtcttaaaacattaaaattacaatcatccaaagtcttaaaacattaaaatcatccataacaaacttgaacaaaataaaataagttctcatgtaggcctcaatcaacaatgtcaataatactctttgggtagtattcaaggtagtgtttggatcatgcaattcacctaattgagaagaagttggtacaataaacttatccatcatggctgccaaaaaaaattatataaacaattaagcaacatattaaaacaataacacaaaatcactagcaaaaaaaattatactttatttcatacataaaaaataaaattatttctaagataaacatggaaaataaatacttaatttatgcaaaattatttagtttggagctaatttttctctgtgtgtattattgttagagaagggaatcaatgaatacatgaacatcataacatagaaatgcttcaacatgagaatggccctacagttcctattatcacataaatagttttcttctctttcaactaaacccatcacataaatttgtttttgttgtattttgttaatttgttgttaattttttattattcatatattaatttttgttattattttgatattattttcctattacttttatgtaatttttttattattttaatattatttctataaaaaactgtaaaaatgtaaaaacaaatttattaaatatataaatgtaaaaaagtaatttgttttacaaaaaatagtactaattatccctaacattaatttgatctccaaattaatttcattatcactacaaaaaattgttacttttagtgacaattttttagtcacaacataaattttttgtgactaaatgtgacttttagtcccaacaaaaaaattacttgtgactaaaatatagtatttagttacaagttgtaactaatttaattagttttaatcacaagaaatgtattgtgactaaaaatatatttagtcacaacaaattgtaatttttgtgaccaatagtacttttagccacgaaccttttagtcacaactataatgataatttataattagtcataacttttttatctttagtcacaaattttattgtgattaagagtaaaattttttatagtgtaggtgtgttgaatatgatttctaaacaagagaatgaattatgggtttataattattttttttgtataatagagtcatagagctgttacccaaattttgctattatgaatttaaagtagaaaaggaaaaataaatagaagaagaagataaatagtaatgagaagtatgaacttctctgtcaacaattaatattgctctttatgatgaatggcaatgaagaagaggaatagtaatgaaaactaaaaaataaatagtcttttcttaaacaataaaaagtacgaacaatttttaa

SEQ ID NO: 232851 - DNA, 2811 bp, Cannabis indica
tacaagaaggggaggatgaggggggaaatgtttttattgagggagaggaagagattattttgtcatatgatgcgactgaaacgagtggggaggattatgatgatcgatggtgtattgtaggcagatttttaactaatagagctgttgattttgatgttatgcagcatttgatggcatcgctttgacaactagggaaaggaatgttcgttaaagaattggatacgaatcgatatatattccagttctaccatgagttggatatacagagtatgattgatcgacgtccatggccactcaacaagtcgttattggtatttaaaagactgcagaggggtgaggatccgaaagaagttcaactaaaagaggctgagttttggttcaattgcatgatcttcgtgcagggtttaaaactgatacagtagctaaggacttagctaattacattggaaagtttgtggcttcggatgagaagaattttttggggttatggagggattaccttcgagttcgggtctcgatagatatcataaagccgcttaaacgccggatgaagttacgtaatacggatggggttgaattttggagtaatttcaaatatgaacacatccccacgttctgttttgtttgtggcattgtgggacattcagagaggttttgtccaaagaggtttgaggttcgagatggaaagcttttaaagccatatggggaatggttgagagttaaaccccaacgtagaaatcaattgattggaactaaatggttgaaacaattcatggcccctttggaggaacaccaagctgcaagtgctcaactagcttctgtcatgactagcagattctgatcagatgcttctggggagcgagggacaatcccagctggagatgttaattctcctatgatggtggagacttttgtgggtcaacaatatgggaagatagcagcttctaatgggagtaatgatgttccaagattgaagggtgatgagaagttgaccattccaaataaggaaatgtctgttgatgacttaattgatgaaagttgtctcttagtattagattcaaaaaggagaaggattgaaatgggccttactgatggtatgttgaacgaaatgatgactccagttcagcccaatcgatcaataatccaaaaaactccaatatggtgggtgctggtctccaggcccaccgttcattatgaatcttttatcttggaattgccatgggcttgggagcccatgggctttacaattcttaaaggatgtggtaatccaaaagaagcccaatatagttttcctttgcgaaactctttgtaaccgagtgcagatggagagagttcgaaataatctggtttcgaaggtttgctagtggttgatgtgcaaggtagaagtggtggtttggcacttttgtggaggaatgaggatgaggtttctttactggatttttctaactcttacattgatgtcaaagtcactgttgagggtgaggtggagtggaggtttactggtgtttatggggagccaaatagagctcacagaaggactatgtgggatcttttacgcactttggcagtcagttcaaaccttccatggtgtgttatgggagatttgaataatgtattgtctcatgatgataaaaaaaaagggtcgtcgttatcctgattttttaattcaaggatttcaacaagcattgaatgagagtgggttacaagatatggaatcgtgtggctatccatacacttgggaaaggggtcagggaactccaaactggacggagggtcggttggatagaagtcttgttaatcaaggttggcttactatgtttaatacgactaagctttataatttggaggtttctacctctgatcattctccaatccttatggagcttacctcatcttttgtggagccaagagttcgacgtttcctctttgagaatgcttggttgcgggaaccgttatgtatgcgagttgtaaaagacaactaagagctgaggagtgaggaagatatccaatcgaaaattagcttttgtggacaacaattgttcttatggggcagagaatatactggagattttaaaaagcgtattgctatttgtaaagatgaaattccgaagtggaagttggggagtgatgaaaactctacagcaaactataaattggctaataaacaagtatctgaagtatacattcagcaagaagtttttttgcgtcaacggtccaaacaactatggttgcaagaggaggataacaatagcaaattttgtcatgcttcggctacttctcgacaacgaaataacttgatctctaagctcaaagacaattcggggaggtgggtggattggaattctggtttgccccagctcatgattgattacttctcaaatctttttaccacttctagcaatgattggagggaagtaactagttgtgttcaggctcttgtggttagtataaattttacatttctccccgtagagatagtgcctccatatttcagcgcaaaatctactactgccaactttagatcgtatgtcgggtacctctattcatactccttaagttgtcttgaggcatacactactaccttgtcattttgcattagcacgcatcccaacccttgttttgatgcatcacagtaaaccaaaaaaacttatccttgttattaggaacacataatatatgggttgttattagtttttccttaagtgtttgaaagctatcctcacacttgtctggccagacaaacttctgcgtctttcgagtcaagttggttagaggaattgcgatagcatctgtagtaaccaactagaccca

SEQ ID NO: 232852 - DNA, 1231 bp, Cannabis indica
ttttctttgctgaagggacaagcaaggatttaaagagaaataaaagaaagggttttttttttggggattattatatctgtgattgatttccataaaagaagattaaaataaaagatatgtgattgattgaaaagagagagggtcgcgtatgtatgacatgtctttttttttattattattcattatgtctgtcacgtatagtgacgctccatgcgggtttggaaatgttttcacagttgtgagtttggggacacaaagactaattatttttgaaaattacagaaataaataattttagtgacacacaaggcatgttgggacacgtttacccaatcacaccttgtaggtcactataggtcaatattttttctaaaaagaattatgagagttactttttagtgagtcttcatatttttagtgacccacattgtaagacactaacactgtgtttttagagtctttttgtgtaggtctctaaagatcactcctaaccttttagtgaccaacacatttgtgcaagtcattaaagagttacactaaacgctaggtttttagaagtgatgtgttctacttccacttagggagcgttaatggttataataaccctgctgatttttgatgttctactttgatctattgacaagttaggcacttggacacatattctactacatcttacttcattccacactaccaatagtagggtttcaagtcctggtacattttggtggttcctagatgcaacgaataaggcatattatgagcctcatcaagtatttcttttgtgagctcatcactgctcgaagcacaatcctaagccttataaagtaacatttcattatttgagattgagaagtccttaggctgacctgccaatacttcctcttgaatcttgaccagctcagaatcttcaaactgcagttttcttatccttttaacaaatttgattaaagtttcaagttatgtagtttcctaactatgaactcaattcattctttaaccgtgtctgacgccaagtgagatgatattactttagtattaaaaacctactcgagatcttgtctgctcaaactgtctactactacattggcttttccaggatgatataaaatctcacagtgaaaatccttgagtaattctaaccaccatctctgtctcatatttaagtctttttgggtgaagaaatacttgagactcttgtggtctgtatagatctcacacttctccccgt

SEQ ID NO: 232853 - DNA, 942 bp, Cannabis indica
ctcctgatctgatggatgcatcttctatttcttggctttagataaggccaagttgtaatagtgacgggcagatttctgatctcctcttgaaatcttacctcatgccttgctgggagttttaggtagaggtggtagttggatgttgtgccttcaagttgaatggactggttagcctatcatggtgttgagagacaagggaacattgattacaacgaactgcaccatcagagttctggtggttggaatttctctaatagtgaggggtaatctgatatacacaatgggtgcgatgccttggccaaagaggccatacatcacttgattacagggtgccaagttagcaacttggagctgtgttgattttgaaaagaatgttgggaaggctccattgtccaccatgtatcttgctgcaattatcatgggagacggtgcgccatctttcacgtacatgtcccttaggttgaggtacttgttgagcatggctgtctcagtagtcctcttgcccgttttgagggggtcaaggcaagtcttgacttggaaggggattgggaggtgcttccctttgtcatgacctctttctggggcctggttgatatggtgctggtgcattagtatgtggaggctcaggatgccttattggtgatggggagaacgtgattggtgaaggagggttctgaacatagtctttccctcccccccccccctcccatcaacaccaatatctctaagtgctggagatggttgagatggtcgaactctattattgagtgttgtgcccctctcctcacggtagcttcctcgtgggggatgtgtagcattgcctcgtggggcagtaggtccttggcgtccctcctagtttattgtcgtgtaggaaggggtgcattgttccttctattatcatgacccaaggttgttactcgttgtcattgttgtgatggagga

SEQ ID NO: 232854 - DNA, 2590 bp, Cannabis indica
aaattaagaacctgttgatttattggtgctcctccataagcaacaacaaccctgacaccagtttgatatgaaaactttttagcttcgtcatgtatctgcaagacagatacaacaaaaatagcaactatattaagcagcgaaagaaagacagctcttataggaataccattttacacaatacagcctaaagtatcaattctgaatctcacctggctagataactcccttgtaggggagagaataagagcaaaaggaaaagcagtacgagttccacgaggcctctgaatattagactcccgcatgattccactaatgattgggaaacaaaatgcagccgtctttccagatccggtctgagcacatgccattaagtctcgcccagctagagaaatgggaattgcatgtcgttgaacaggagttggcttcacatacttgcacctccgaatattattattcaatgcatcccccaaatctatttcggcaaaagtattcacaggcggtggcacattacccccacttgtctccactggaatatcctcataagcatcaaagttgattcctgtgttctcttgctcggtaaaagaaggttctgctgcatcatcttcggttccaaatggatttacctcacgctcccttccacggtcccacccggaccctcctctgcctctattgctgttccagccaccaccggaactatatccagggcgcccaacatcctgccgcggaccaccgttccagcgagacccagtcgatggtacaccatagccagtgccggcttgcgatggagcagaatttgagacagcaggtgcatcagatgaggctggtctgttacgaagatgtggtggaacatatgatgatcttgaaggacgagagggagcactgttatcaaatgaaccagcagctgcactctcagattgagagttagcaacagaatcagcccatgaagtgctcatcgctacaaataccccttcttctccaaaacgatatgctcgaacaatgtaaatgaaaaatcctaatgcactaaacacccgaaagcaaaaatcgaatcttcaaaggaaaattatcttgttcctatgctcaataacttcagtcgatcaaaaccctgattcaaacattacaagattgcaatcaatcaataaagaaaagggaagaaaaatagtacagtacatgcaaactcttaaagaaaaatcaaccaaagatcttaaacatattccgccaaaacctagaacttgttgatttaaccaccaaaacaaaatcatgcacaaaagtacagcaaatcctataataaaataattcagaaaattaaaaatcaagcaacgcaaaataaataaataaaaggtactcagttccataaactagattggattggagatgtacatatatcgagcatgcattgaaatcggcgtttaaaagaaatgcaaagcattataaacatgcttcaaaccctagtttagagaaagatagaggcaaaaccttgagataaaataaaatccgtgagcgtagcaagataaatggaagattaaaaaccctaaaattcagcaaaagcctatctttttttcagaaagaaggagaagctggatcggacacgcagagtagaaatcggtttgacctaccacaactagatcttcgtaatttcctttttctctctctatctgagattattgaaattttctcttcacaaaatgtatattttccttttacctttttatttttttctccttaaccaaacgagagatggagagaaaaagaatgaaagaaaataattttttgtaatgaaaataaataataaataaagaaaatatctgaaaagcaacggcgtacgtgagaagttggacgctgccgtcaatattttgggttgtttgaaattccaattaaaatccacaacttatgaagaagttagtgctggcgtattctcattcgccaatttatgtttaaaatctttattttttttttattgtatgattattaagtgttaagtaaattaagacgtaataatttttaattaatttagtttataaaatttttattcaaaaaaattattttaatatactaataaaaaataatatgtagtagttacgaaaattgtaaaaatataatttaagtattattatcgctaaaaattaaacttaggtatttatttgtagcagagagttaaacttaaatatttatgccacaaattagtcaacttgaaaacgtttacactccctttttgatgtttaccaaaaaatatggtaggtcaaaaactcaattaggggaaaaatagtacagtgtatgttaactccccttattttgccattcttagagatcttatataatcagcgtagtctcgttttatgtatcatcttctcaaaatgttcatgttggtaataattttgtgaataaaatttgtaaagtcacttaattgaagttgttgaacattgatattaccactctattgaaattgcgattaaagaataatttggatgaaatgggtttaatttcatctccttcaatgtatcatcattttaattgcgtgatacaaacgttctagacttagtgtgcgttggagactggatagggtcgtgattaggtgtatgtgttggaaattatt

SEQ ID NO: 232855 - DNA, 1213 bp, Cannabis indica
aaaaataaaatattataaaattaaaagtattatagttaaagtaaaattataattaacaacaaattttaaatattattatattttcttttaataaataacacttaacttaaacatttattaataaaaaataatattttttaatgaataacgtaaaaataataattatacattctaaaaatatacataactaaaataaaaattaaaaacataactaaatatacgtgcatttataatattaatctcatttatatatatgaaaaaacgatgtaatttgtgaaactcaaaattaatgccttttttttttaaattaaattttggataattgtatatggtagattattttaaaaaagtggatcatctaatacaatacttatctatttttgtagaaaaaaaaggagagaaatttttttaattctattttttcaattattgtgtacgtttaatttatttaaaatcattgtatgtaaaattttacaaatgttgaataatttaaagtataaaaatggatgttgcataattgttttttttttatttataataatttcttagactttatttttaattaatattataaattattcaaaattatttaaaaatttacctagtctttaaataagtaaaatgtacatataaaaaatatatatattaaaaatctttattgcatgagtagaaagatagcaagtgtaccaaacaaatttatacaaaatattacattaatttatagtgataggctgtatattttacatttattcatttttaccaattcaattaattgtgtctactcccccaccacttcgagctctatctttctttctttctttttttttcaatgttaatttcttttcttcaatccgtagtagtgagctcgatcaaaaatggtgggttgaaagaaagttcatgtcactttaagttatttatatataactctttttttttttgctagagagtctctctttgttgtggattagctacgtagatggagttttgtagagagagatgaatcgtgagaaggttgttgatgattgtagggaagagagagcatcactttggtgtgtgtatatatatgactatttcttttttaattttatatgtatttattttttcttacataatataaaattataataagattgataaaagttgtgagttgggtgcatggaggagttacaagtgtgataggaaagtttagggatcacatgagaaaattttagaa

SEQ ID NO: 232856 - DNA, 1419 bp, Cannabis indica
gatctgaaacgaattgtcatacccctacgcaagggcttggtgatgtccagcagaacacgaatcctgagaaaggggccagaattctcaaggagagaaaggggataggtttcaatgaggtcacccaattcatcagctatgaactgggctaactgaaggctccttctaccaaaaggaattcggtgaacttggatccagaaaggggtatatcttatgctttcaggggtgggagtaggagaaacatcaggatgagtgaagacaataaggaatttgtcaaaatgccatggctgttcctccaggactcgtcgacgatccccatcgcattggaaggtggctaagaaaaggccagaatggtactcggagatttggacagggaagcggagggtccaggcttcagacattgccttttcaatccaagcgggcttagcagtgcgaggagataaggttttgaagataaggcagaaagagttggggtcagaggacgaagagagggagatgtgatcaaagtcatggatgaggctttcttcttcagagagaggggtgaggatgttagggttggtggaagaggaagccattgaggtagtggaaggagagagagcagcaatggtgataacagagggagaaggtgccgaacaacacaaagcttggaggattaaatagacagaggaagtaagagaaagagaaagaagatacctggatatagaaaggcgcgtcgagggaggagagtggctctgaaccatcgcttcgattgctggggcggctatctgcagaggcggaggaggaatgattgcaaaggagtaaatgcttgaggcgatggataagatggtgtgggttgatttagggggctggagaaggaagagaagaagagagaaagtctgggcaaacattaaatgcccaaaagagggtgccgtcagaattaaatgtaactgagagaggaggagagcattaaatatggactgagcacgaaaaattcggaggctttttgcaatgattaaggatgacatagggcaatttaatgcagacaagaggttgaaaagtgagatttaggggggagaagacgagacggagatgctcgttcactataccagagacacgcctggatggaagcttcaagaagaagacttaaataaaaaggtatagtgtgagttcctagttatttcgatagtttggggtgcctttaaaacttttggggtgtaaataaaattggaaaattctttaatagagacccttaagatagatatattaatacctccattataaagcaatttaattggtgcacctataaaatgaaaagaaatatactatgaatattgatgtattgaatcaatacccggttagatgggatgtattggtatacaccctaatttttttcaattgatcctccttgataaatgggtgaaaaaactgtaaagtgcttcgttt

SEQ ID NO: 232857 - DNA, 1071 bp, Cannabis indica
gaggctgaaggtgaagaggaagagggggtagcttgggtgctgccctttggtggcttcaatggaaaggaaacctgtttcggagacaagtgatgtcctggaagctggtcgggaatacgtcgaggaggagtacaccaaggctcatcctgtaaataggagaggtcaagggaaactcgatggatttctccaccatccatcctgaccatgaagagattgactaatcttttcgaagatggtctcttggggactttcaaatgcttccttccctcccccgattagataactaccgaccttggagagggttattttgcttggtcagagcctcaaatcaaatagggtgcaatgctgcctttgtatccttacttcaagaagatggccaattattaccatatcagtccaacccaattcatacccaccggccttaagtatctatctgccctattcgtgttatatccctctcaaggatggggtcagccatcccctaacaatactaactggctattcaacctgaagtcgagacctaagcaaagtaggtcagggtatttttatttttcttagatcaaggagtcgtggctaaacgataccacgaatactgaggtgaccaagataggtggcttcaaggaggactattactttctcaagggaatggacacctataccaatttctaacatattccatcttactgccaacctccattcacgctggaacttaggaagatggctcaagaaattctccaactccctttagatgattgaaacatctctctcatggcaattgaagctaattttgtcaagtacaagctctacccatatgactgtgtaccaaggatcgaggaggtagcaggggaggttgtacccgaacagaggctccgagcaagaagaaaaagaagaggaaggctcctctaagtggtcaagtacctattgagcgggcaagaagcaaactttaattatctcaatgaaaacaaagaggcatatcttagtttttgtgaggcccaaaaagacaaagaagaatctgaggcagccaacattgatgctccgaccaaccaaagcgatgataacccaaccgctgacggt

SEQ ID NO: 232858 - DNA, 1826 bp, Cannabis indica
tcttagatcaaggagtcgtggctgaacgataacacgaatactgaggggaggactattactttgtcaagggaatggacacatataccagtttctaacatattccatcttactgccaacctccattcacgctggaacttaggaagagggctcaagaaattctccaactccctttagatgatcaaaaaatctctctcatggccattgaagctaattttttcaagtacaagctctacccatatgactttgtaccaaggaccgaggaggcagcaggggaggttgtacccgaacagaggctccgagcaagaagaaaaagaagaggaaggctcctctaagtggccaagtacctattgagcgggcaagaagcaaactttaattacctcaatgaaaacaaagaggcatatcttagtttttgtgaggcccaaaaagacaaagaagaatctgacgcagccaacatcgatgctccgaccaaccaaagcaatgataacccaaccgctgacggtacctctgacccgtacaaagagctgaggactccacccatttgaagtttcttttttttttttttttatcatttttcattttttttcttttttagttcggcccatgggcctttttcagtacaatatggccgaccaagtggcttttaagttttgtaatatttcattttgtttcaagataagtagctaaccgaggagcttttaatcccaaagttatcatgctttgttatcctttaaaataaatattttctcttcagttaaataattgcacatgcacatgtttttctgtttttcgagcttgttatttacctatgctttgtactggtatagttgccccccaagagaccgagtagacttatgactcttggtcacttgtattgcacaagtttgattttgtctttttggataccgggttcaagcaaaccctttgtacacatttttaagtgtaattacataacttgctattgaaaagaaaataatagacacaattagaatgataattataatatatttatccatttattagtttggatattttgttaccgtagtaacatacatttcttaaattataaaagctattatatgaactaattgatctttagctaattaaaacataaaacaattgtttttctagacggattgtactttaaagatggtcatccgacctgagtgccagtcattttttctgaacctttgagcgaggtctgctcggaaggccatctatttaagaatagatgtttgagcattgtaaactgtgtaggagtcatcagaccttgtacactttttggtagtattttcttaaatgcttcccattccaatacattggtaccagaaccagttccatgttttcattataccgaccaagtttatatgctctagaatttgtgacttctcttacttgatatggtccttcctagttaggtctgaacatgccagccgcactatcttttgtgtttaagaagactcttctcaggaccataccccccacaaagaattttctccccctcacttgcttgttgaagtaccgagccaccttttgctgatgagctactagctttaggtttgatgaagttcttttatctttaatttcatcaagtgattctaccaagagggcgtgattggtttcttgatcataagtttgtcttatgtgggatggaggctctaactcaacgggaaacattgcctcataaccataagccatgacaaatggtgtttgcacgattgttatccttcctattattcggtacgaccacaatacttctggtagttcctccgaccaattccctttggcctcttcaagccatttttcatggtatctttgagtatcttatt

SEQ ID NO: 232859 - DNA, 1114 bp, Cannabis indica
atgtactcaacccatcgtgcatgtctcctattgagcttgtgtttccccttcaaatagtgttgcaattaaggccaactccacctaggttttcgctaaagtatgcaagggctttcccaacctgcataagaactgtgtcaatacgtatactagatgcatcacattcaatttcaaatgtgttagaaaaattaggcaaagctagtaccggagcttgactaagcttgtgtttaagcagctgaaatgcttcctcttattttgcttgcgagtttaatgctcgtctggtgactagtgcaagcatgtcaccgtgctctagcccatactcttcatcttctatagaagcatcttctaatggtggcatgtcaacaagctcttcttcatcttcagaatctacctcgccattttcttgaatcaccataacactcttgtttggacattggctagctatgtgtcatcgcccctgacatttaaaacactttatctcactagaacgagatgaaataggggatgttgttccttggggggttgtaattgtggtggctggtttgggtgtagaggatgaactaggttagtcttcattcttcgggaagtttgacatccaaggtgttgtatttggattgtgtcaacttggccttggctttgagctcgaactacccttattgagtttcctttcaactttgattgtcatatgcaccaaatcttccaattccacaaaatggtgtagttcaactgcattagcaatctcttaattcaatccattcaaaaaccttgccattattgcctcctgatattcttccacattggctccaatcatagccatctccatctccttgaaatactcatgaacattcttgtaaccttgacgaagaccttgcaacttgaggtacaagtctcaataatagtgagatggtacaaaacgccgcctcatcaccctcttcatagcctcccaagagtcaatatctcattctccattccgcctcttgttgatgcacaactaatcactcttccatctttttcatctttttatttcccatataattatctacttggttcccagcttctctatccttaccatatctcctatggttacccgatgacatcccatcaaactcttcatcag

SEQ ID NO: 232860 - DNA, 684 bp, Cannabis indica
gagtgcttagaactgattatatagtcatatttgacttttttaaattgacgtaatttttttaaatttactttctcccgttacttttgttattagcgtctaattagcaacaaacataaataatatttttaagtgacagtttgaaacacttgcacaaatacatgacttactattcatgtcggtcaataaaattaaaagtagcattgactgacatgaatagtataatttgtaatagtgatttaataaaaggttggggagttattcttttttattagtgtgcaaatatttagtatctattgtaaccattgagggagagaactaggctctcgaaatcctagaaactattgaaaggctttcaggcatttctatctcatcttatctactcttgtttttactattctaattaatttttatagggaatccctattagattggtatcagagctcaaagacatggaatttaataaggatgttattatggaattactggggcagaaattagaatcgatgaactctaaactacacagggccatcacggaggttcgagattagctaggcaaagaaatcgcagatactcgtgcatagcaggacagagaacagacaaaggtgcacactctgcgattaggtatccaaaagatgttaaagatcatgatggcacaatggacgtgattcttgggatcgggaaaag

SEQ ID NO: 232861 - DNA, 1229 bp, Cannabis indica
gtgtcccctcttgactggtccacgtattttgggcaaattttggagcaacaagtatcatccatcttcgatttcgaatgagctccgtacagactttccaaggctctccaaagtgatgcagatgtggtgcaacccatcacctccgttgcaatagcttctgtcatagagctataaagccagcccattagaagctggtcactcacgatccagtgttcaaaatctgggttgatttgaacagcagcttcggttccttcttcccctgcatcaatatcaacagaaataaattcagtaggacaaacacgtgttccgtgaacaaagccatcgagtctatgccctctgatgatggtagacaccatcgttttccagagggtatagttgtttctgtcgagtttcagtgggaatggttggtttagggtgttaaatggttgggtgaagttgctggtgtgactcggttgtgccgaaggtctgtttgtggtaatttctgggttactggagagagggattccattattggttccaggagttggtggattgggagtctgagattggttggtcgacatggccggagaacgatacgcccgctctgataccaagatagaaaaaccagaaatactaaaaaggataaactcagctcaaattgatactgaggcattgtattgaatttatagatgaaaattacaaacagagatgaatacaaattggacagatgtcagctaacaattgggacaatcataacagaaaagatttgggaaaatcatgagcaaatgattgtagtaggatccaataaaaccgttggggagaatattctctgcacaaggattgctgaggtgtacagtaggataaatgttactctgtagtgatggtgcagcaatgtaacagtgagctcatgtcttaacataaggttcctgatactttatatgtgtttaattcatatcgttttagaagttcatatttaggatgttaataacatacttgttagtaaatctagatcttggtaaaataattctaacaataaatataataaatataaaggtgtatatttttaaataggtcattatcatgttattttcgggttatgcatatcaatccaaaataacttgtttaataaacagactagtcatgtcaacttaaaaataatccaaaaatttatctatatatataaagaaaaagtatgaggccgtcacatgttattctaaaatttctctaataaatattatttgttctctccttaa

SEQ ID NO: 232862 - DNA, 760 bp, Cannabis indica
taaaacaacaaaatagattaattaaaacaacagtggaacaactaaaaaacaaccatgaaaacttaacactgtacacagtataaaatttacagaatttttttttaaaaaatacagcatttttgaaaaaaattatatcctatagtaaaaaagtaaacaagttaaaaatttcagtatatggtataaaaattctattaataaaatatatttagagcaatgaataatattttataaatacagaacacgaatagtaaattttaaagaaactttaaaatagagaagagtttacatttgatgtaagtatttttagtttaattatttaaatattttaaaaaatcttcattttttttttgaaaaaaaaaataataaaataataaataatatctaatgtgaatcataaaagtatatcttttaagcaaaataataaattgattctcatacttacattcattttcaatcttaagtgattagatgtgtacttaaaaaaagttattttgatagttacattaactaataggatgcaaatatttttattaaatgaattccttaatagaaactcaaaattttatatttactatgttctatattgttattaatgaatgttttacgagtgttgtaattaatgattgtagacttttattttctaaacttagttatgctttcttgagttttattaagcgcaaataaaatcacttataattttgcacgagcttcttacattaagttaactacatatatattgagagtaaaatttcgctaatta

SEQ ID NO: 232863 - DNA, 1390 bp, Cannabis indica
tttcccattcttacccgcccccaggagagcatctcggttaatgatctctctgagtctcaagattttcttgaaataccagctgctatcctgtttaaaagtcagcaaccagaagtcttgaccctttagataaatagaattaatccacttaacccaaaggttatcttgtttctccgagatagcccaaatgtttttgtctatcaaagcaacatttcacttctttccctcttggaagctaattcctccaagcttttttgggagacaattttttttcctaagaaggtaaatggaacttacttcgatttccattgaaccccaaaggaaatccctgcaacttttgtcaatggcagccgtcactttcttgggaagaataaatagggtcatccaaaagttccttatccccaaaagaaccgaatgaattaattgcgccctccctacaaaagaaagatttcttctagcccaattattaagcttcaaattccccttatccaaaatgcaaccacaatccgaagtcttccatttattaggtcgaagttttactcccagatatctgagagggaaagagccttcttccatattcatcaagttcagaatagcccttttattagcttcattgactcctccaaagtagatagtagacttgttcatatatattagtatatatatattagggtcggtcttgagttcaaatgggccatagataaaaattttttttggacctttactataaagataaattacatttttaaaaattattaaaaataatatatattttttaaaaggtaattttttttatttgggttcctaaaatgagtgggccctaggcacgggcctagcccgcctatgcctaaggctaacctttataaaaaagagatatgaagagtgacgtgacactttaaaattattccaaacactttaaattattctcttcttaattctctcactttttaattttttatttagtttataaatattaatgaatgaattaaataaaaaaatattataataattaattaatattatataaataataaattttttatttttgttgcctcgagtttttttcaaaattacgtggccacgactatgtatgacatgtggacctaaatgacacctcacccgggaacaagtgtagttcggggaacgagcccccggagcagtacaaaaagcatgccctcctctctgggagctaaagatgtagttagtcatctccgagacgaaaagggcctattcgaacagtcatctcgcatttaatgcagcatgggggaaagcatttgggaacgcccataagagacatgtcagacatcgtaagccttatttaaggcgataacacaataatcgaaggggctagtgacgactccattatgaagatcacatcaatcaaggaaggatg

SEQ ID NO: 232864 - DNA, 1874 bp, Cannabis indica
agtacgtgaaaagatagggccatggatacaaccaccccagtttgtctaataacccaaacaacttggggttaaaacctcttccggttgaaggagaggacatcctagttatttttggagtgccacatatggcaaaggaaagaaataacacccagaaaagatatgtgaaagagataaagaatgcgtagtcggcctttgccccagaaccttccaacaaggtgaaaaccgaggaacctcccattgtattcacagaggaagacgagaaaagtgtgaggtatcctcacgtcgatccattggtgattaccattcaactcgcaagtaaaaggatcaagagtgtattaatagacaatgggagctcggtaaatatcctttataaggagactctacgaaaaatggcgctcgaaaaagccaaattgaggacttgtatggtgaacctttgcgagttcacaggagacagcattgccagtcttagcataatcaagctcacattaaccttaggcgaggcacccttatctactactgttatgcaagacttcttagttttcgacctgccatcagcttataacatattgttgggtcatcctgcgctgatcggactgcgggcagtcaattcgatgaagcacctatccttgaaattccaaacactagatggtgtgggagtggtgcgcggtgaccaaatgctggctcgcgattgctatggcatagagctatagcataggaaagtgggtcatcagttgatgacaatcttggcagaaaaaaaggaaaagtaagacgaagatctcgacccccgagtttaagatgaggaaatctattaaaaccaattcaggaattggaggaggttattctcgatccaagaagtcccacaaagtgtgtatacattgggaagaacctgaacgagcagctcaaatagcaactaataagctttttgaagacgaactaggataagttcccctagagccatggatatatgatagggatcgaccctaatattatcggccatcatttaaatgttgatccaagcaacccagcgaagagacagaaaaagagacccttggattcctagaggcaagatgcactaaaacaggaagtggacaagttgttagtcaacgactttatacgcgaggtattgtgtccctcatggataactattcctgttcttttcccgaatcctaacagaacttcgagaacttgtattgacttctttgatctgaataaggcgtgtccaaaggattgttttccacttcctaggatcgaccagttggtggatgcaactattgggcacgagcttatgtcatttattgacgcatattctatatataaccagataaaaatgtatgttccacatcaagaacatacaagcttcgtaaccaacatgggactctattgttataaagttatgtcgtttggactgaagaatgatggggcaacgtatcagcgattggtaaacaaaatgttcacaaaccaaatagatcgaaacatggaggtttacttcgatgatatgttggtaaaatcaataaaaagtaaggatcatacctcagacctcgcagaatgctttaagacattaaagaagtataacatgaagctaaaaacccgaaaatatgttcctttggagtttcctcaagaaagtttttgggattcatagttaacccgagaggtattgaagcaaatcctcaaaaaatcaaggcattgatatatatgtcatcaccgaaaaagcctaaagaagtacaaaccttgacaagaagaatggccacacttaactgattcatttcgaagtcaactgataagtgtgtgccatttttcaacatattgcgaggcataaaaaagtttgagtggaaaaaagaatgcgaagatgcctttagaacataaaaaggcatcta

SEQ ID NO: 232865 - DNA, 1104 bp, Cannabis indica
tttcttaaacctttgacaaggttttatgagtttaaatcatcaaaccaggttcttcaacaacctgtgattttgccccaatacaaaagacttggagggttttttcgcactactctcccacagtgattcatctcccttatgatcgtaaagtgaacttatgcttcagcaccaatcacacaagcaataacctactacatctcaacaggggtctatctggctaatagcagataacttcaacatacaaacttcaaagtttttcaccctagttactaagagattaatggtgggggacaagagcagtcaagttcaaacagtatcaacgaaatttcaaacataatggcgacaaaggtaatggttaatgattgagcatcagcaaatattctaatcaaaacagaccttgaaaagaatgggtcactccctaagaaatctagagccatgcaagcaactcatgtatggtttcaagtgagccgacattgctccctgtgataaaatcaaattaacactcccagtcaaaattgccctggggccaacatcactatgataaccttcatagtgaccgacaccaagtctcattggaaagatttacacccaacaacctttggccatctcacttatctaccacctgtctagtcaagtactcaacaaaagttggtatcaaccgtctctttggcaaccaaagagtagcatgcaaatgtcacaacacatcggtgatattggcaaagaagacctcatccactgtgctaacagttgaggggatgagtcaccaagaagacctcctctgctgtaaagatgaggcgatgatgaagatctcctctgctttaaagctaaggagatgatgaaggcctcctctactgtaaagttgaggggatgttaaaggcctccttcgatgtaaagctaaggagatcataaaggcctcctatgttgtaaagctaaggagttgacgaaggcctcctctattatcaaatcgaggagataaataagaccaccttcactagtcgagggaatgctaaagaacttcaaggctacaacccaagagaatgttggaaatattttaccaggatctagatttactaccatgtatgtttcattaatatcctaatatgaatt

SEQ ID NO: 232866 - DNA, 728 bp, Cannabis indica
taagctgtagcttaaattcgtaaaatcttgagagggaaatttagagttgataacatcaaaattgaaattagattgtgtggcatgacttgatagatcattgaaatattttcaaaacacaagttaaattgcgtcaattggatcactatcgagtgagttatggctattttactaaaggttgtcctcaacccaacgcctaggttaacatccagcacccaattttacatgcatagtcaacctggacattggctaagtaggaaaacgtgtcagggatatttttgattcctataagtgatatttggacaccacttagccagtttctttattttagtagtgaagttggttaccagctctcagagcaccttatttatataagtttcttgagaaagtgctaatattctccgctttctatctctatagattttaatgcccaaataaagagtgcaaaaatcgagtcgtcagaatctgactcgggatcagttgatagtggctgtttgacgagaccaataggttgaaagagttgattgtcggtttaagcctttgaagatcgaaaatcagatgacgactcaacatattgtgtaacccttgaaagtctctctttagtatcttctgcactagacatgtacacctgagactatcaaagtaaaacaagttagtaaagaaaattaaatatgaataataaaataaaacaatagtccccaacaacgtcgccaaaaatttaatgtgtgtcg

SEQ ID NO: 232867 - DNA, 862 bp, Cannabis indica
aggagtcccaggctcttggtaagtatcgactaggtctgaaagagccagaggatcatcagtctggacggaaggagcgtcaatgttctggtcggtgggagcattggaaatggtcactttggggttctcattggctgcctgggccgtgcagtaataaagtacatatccttggaagcactgaggtaatcaaagttccctttaggattggccttccagaatcgtaaaaaaacctcgagactagctgtctccaaggtatccacctctgtctcaagctcctccaccatggactttttaccctcaatctccttcttgagtccttcaaattctgccttaagttccttctccctggtcttcatatttttagcatcctcctccaacctgcgaagaagagttcggagaccctccctctcatcctggaggctggtaacttcttgggacaaagaaacattgtctgcctcaagctacgcggtcgagggcatatcttgcagctccttggtaagctcggcaaccttggcctcggcagtaagaagtttattatttgcctctctaagttccttccacatgacctcgagctaggcccgcgcatcttcaacgtccttcttggccaagtccacatctctttgcatcgtgctggaggtggcaagattcttgacaacagctgacttagctcgagagtaggtataggccatattcacaccagcctgtacggaaaatgttttaaaatccaaactattcaaagaagaatgaaagaaaaaggatagagagaacttactcaagaaatctccttcaggactcctcctacgaccaactccaaggaaaattcactgttcactccggtcagatgttcactcacttcaggaagcga

SEQ ID NO: 232868 - DNA, 891 bp, Cannabis indica
taataatataattcctcaattatacataattatctagttagggttttgctaatccatttcttaattccgggtattacaacaaccgtcccccaagggacgcgagaaggcttattttgcacgaacacctcaatcaaagacaacctgatttgagggaacatcagaacagaaggcaaaacccaattccaccagtggcaaataacaaccataatatcaatgggggacattagaataacatcccctaagctggccatggtgaggaaggacaagtgaataatcctaggctcaatgctttagaacaaattatacaacaattaatggtgaccaaaaccttactctccttgaatataggccttaccatatccgcaagggtttaagatgccaaccacaaccaagtacaatgggagtacagatccttgagtatacataagtgacttcaacacacttatgcgtgcgcaccaagtggttgatgacttgagatgtgtgttatttcctgtaacacttactggagcagccaagacttggttcaagaaatttaaaaggaactccattacctcatgggaccaactatcacctgacttcaagaaagaattttgtgccgccaaggccagaaaattagaatgttcctcccttgccaatgtgaagcaacaaccaggcgaaagcttaaagacctatatagaccgttttagtgtcgaggtcgctaaggccagagacgttgatggtagtggaagacttatggaactggggatcaaaaacactaagaaagggagcactaaccaccctctttataccatcttcatgttagaattgttttaccatgatcttagatttactaacaagtatgttattaacatcctaaatatgaacttccaaaacgatatgaaataaacacat

SEQ ID NO: 232869 - DNA, 613 bp, Cannabis indica
caaaacttctcaaattagcataatcgggtaactcatcaaaaagtaattcgtaaggagttttgtttccaagattaggagtgggagttcggttgatgagaaacacagctgtcattaaacaatctgtccaaaaccgaataggaactttagattgaaaatataaagcacgggcaacatttaaaaggtgttgatgttttcgttcggcaatagcgttttgttcgggtgtttctacacaagtgaaatcatgcatgatgccatgttttaaaaaaagatctttaaaaactaattcaggcgcattatcggatctgaattttttgaaaacacaattgaattgtgtttgaagataatgtaaaaattgtggtatgatagtggtaacatcagacttatgttgaagcaaatatatccatgtaaaacgagtatgatcatcaacaagagtgagaaagtatttatgattagaataagaaggaatatggtaaggaccccaaatatcacaatgtattaagtcaaatttatggggagaaaaagtagtattattggaaaaaggcaattttctttgtttagctaagggacaaacataacatggcagttttttatgcaaagaatcaaaattacaatt

SEQ ID NO: 232870 - DNA, 868 bp, Cannabis indica
ttaccatttttaccttttttccaaaaataggaaagctagacaactttccttttaagtttgaatacaccaaataggaaaccatattaaagtataccagccgaaattatacaaagaataataaaatatttttgccaaaaatggaattaacagatatttctcattacccaataaaatgagaaaaagtggtatttgtacaaagtggtaaaaacttaaacaaagcccaaaataaaaataaacccaatataagctaaatcctaatatgaagctcttgtaattaatgtagcactttgtaattgattagcgattttttatattatttattaaattcaaatatgtgaaattttaagtaaaattgaaccaataataatatatcagctctttttgtggagacgttaagatattgcttagctttttttcattgaaataagatattatgtccatttcaaaaaaaaaagacatctatgtctattatctaagccatacttatgcatggtaacaagctcaaatcttatgttcatgattttcgcacaaagtatgaaagaaaatatctcatgattgattgattttctttattaaattaagaaaattaataaataaataaacaatgcacatgtctcaagtttccttcatgtacatatacataagaactctaagtttactacctaatctaataaaattaatgtattattatgattaatatatttttatatactaacaattattagtaaggaaaatgttattgggcatcttaacatgtcaaacataataagaggtagtatattattataatacagtttaatttgttgctgaagtttctctaaaagagaaaacacatactaatcaacaagcaaccataaaaaaaaaaaaa

SEQ ID NO: 232871 - DNA, 1381 bp, Cannabis indica
atgcagtggaaatccgactggaccgagctatggttactcaaagttggctagatgttttcaatgaggtatctcttactaatcttggtttttcattatctgatcattcccctttatttttactccctgaaattactgctggtattatctccactgcttcttttcgttatgaaaacgcatggcaaagagagccattatgccatcaaattgtgtctaatgtctggtactccaacccgactgaagatattatgggaaaaattgctatttgtggtaagcaactagctgattggggtcgaaacctgactggaaacttaaagtctcggttgaagaaaagcaagaagcttcttgctcagtacaaaaattctgccaatgaatttgatgctgaaaacttcatggtggaaaagaacaattatttcgagattctagcgcaacaagaactctattggaaacaacgctctaaacagttttggttacattcgggggacaaaaataataaatacttccatactacggctagtgcttgaaaaagatcgaaccaaatccagcaattgcaagatgttaacaacacttggcaatgttggaatacagatattgcaactgtgataaatcagtattttgaggaactctatcagttcacggattcattttctcctctaattattgacaatgttagaaactatgtcacaatatctcacaacgaagccctcttgcaaccgatccttgatgaagaagtaaaagtggctgtgttctctatgcaccctgacaaagcccttgagcttgatggtatgggacctggtttctttaaacaccattgggatattgttggttcggatgttactaatttagtgaaagagttttttgcaaccgaggttttacctgaagggctcaatgatgccaatcttgttttgattcctaaaaagaaaaactttattacaatgagcgatcttagaccgatatcattgtgtaatgttctttacaagatcatttcgaaagttttggctaatagaatgagagacttgattgactgtgttatctctgaaactcaaagtgcttttattccaggttgcctaatctatgataatgttatggttgcctttgaagttatgcactatctgaagcgaaagaaaagcggtaaaaaaggtttcatggctttaaaactcgacatgagtaaagcctacgatcacgttgaatggagtttccttagagaaatgatggctcgtatggggtttgctagcaaatggattgatctcatcatggcatgtgtctctacggttcggtacagagttgttcataatggccatgttcttgatcctatctctccgtctagaggaattcgtcaaggtgaccccctctccacttacctgttcattatatgtgctgaagg

SEQ ID NO: 232872 - DNA, 1165 bp, Cannabis indica
gaggaagatgggacacgtaacttagagttcagagtgagacccaccagttggatttgttgaccgtttgaaaaggagtcttgtgttactctcatacgtgcttttgtgtctttgtggccttgaagtacactatggcccattaatgtatggagttgaaaagtagattatttaatggttggacatcttaataggctctaaatggaatatgtttgtgcctttggattttggacgtggcaccaaacatgaaacttggtgccacagtggggtctaaatggaatatgtttgcaccttaagatagaccgcactttcgattctatcaactcagcctcaaaggtgacattggggtcgtggggagtctttgatgtacatggcttgggaggcataatttcaaaatccaagtcacctagtttaaaaacaatcgtgacgttgggtaaaaacaaaggctttgccacatgaataaaggacacgatggaaggttccggccagtctgcttcttgtaagaatcggtgtttgccttcggagatttcttgcaagaaatgcctgtagcgactagcgatatcttcctggtgggttctcactacgtgttccctaaccctagtatcgttcaactctaatttggaggtgggctttgaagggttgggtttatacgggatagctaattctgtagggaactcaaactctaaatcttctggacaataaattcctgagccagagtgggacattactgcaggcaaaaagcagtcctaatccctggagagaattttatcaaactcgaaggtaatgagttggagatcttaaaacaacctacatatttcctgaaccctagtatgggcctatataaaatttaaccgtaaaaactaccaaaactagatgagatgacaatgatacaaacaaactaagtaataaatccacacaatgtaacaaacatgagaaagaagaaagcaacttactgtttgaagttaaggcttggggcaatgattggtactctgtatgcaaatcttcgaacgaagcaaggatcacattgagaggatgaagtcggaagaaactcgtagaaaaaaggtcaaggacaaagatggcatgcaagtcctcggaaaaactaaatggtgatccttgatgaagaagcttaagagttttttcagactttttaaaatgaaggaaataatgcaaa

SEQ ID NO: 232873 - DNA, 1440 bp, Cannabis indica
cccattccctattaatagtggattcaaaattttaagttgatgactccttcagttatttcctttgatttgagatgccgtgaaatcatgtcgacattggaatgttagcatttactctaatcttctattgttgtcttagcattgaatctcttgtcacactatctatttatgtatatatcgatgtagtctttgtcttctgttaagttgtggtcttgttcatcttctttgtatgatagcagaggaggccttcatcaattccttagctttacagataggaggccttcaacatcccctgaactttgtagcggaggaggccttcatcatttcctcgacttcacaatgggagaggtcttcatcatctcctcaactttacagcggaagaggtcttcatcatctctttggctttatagcagaggaggtcttcttgacgactgtcaatgatgtgtcgtaacagtcactgactattccttggtcaactaaggatgtgactaactccttaattaatatgctcaagatgggggtgatgtcttccccgtctcgggtgcaccttagagtgattgtaggtgtgatctccatttcatccttggtatttaagcttagaggtctttgttgcccgttctgttgtattcacaatggaagatggcttcttcatctccttggctatcttgacatcgaaggaggtcttccacttccccttgattgttatcatagggaaagaggtcttcctcatcccctcggcatagtcgaggaagtcttttaggtgaatgtcaacgatgtgttgtaaaatttgcattctactctttggttgccaaggagacggtcgataccaattgctgtcgagaacttaacagacaagtggtagacgagtgagatggctcgaaggtcgctaggtgttgacctaccaaggagacttgatgtcgatcactatgaaggtagtcatagtgatgtttgccacgaggcactttcaactgtgagtggtgatctaattctaccacagggagcaatgtcggctcacctaaaaccatacataagatgcttgcatggcttcatatctcttagggagtgacccactctgttttaggatctattttgattagaacagttggtgatgcttgattattaaccatcaccttcgtgccacgatgtttggaatttcattgacactgtctgagcttgactgctcttgccctccagcgttgatctctttgtgactggggtgaaaaactttgaagtttctctgttgaagctatcttctgtgagtgagataaacctgttgaggtgtagtgggttatttcttgtgtggttggtgctcaagcatgagctcactttatgatcataaaagagacgaatcatcgtcgatgagtagtgcgggaaaacccgcgcagatcttctgcataggggcaaaatcacaggttgttggagaacctagtttgatgatttcaa

SEQ ID NO: 232874 - DNA, 798 bp, Cannabis indica
tagtaattgcaagcaccaatgctactgaggtgaccaaattcaaggcattccttaattctaaatttcagcttaaggaccttggccatttacggttctttctcggcctcaaaattgctcgatccaaggcagggatttctgtttctcaacgtccttttctgcttcaacttttaaatgaaacaggtcttctcggttccaaggctgtctccacaccaatggatgccaatttgtctctcagtaaagaaattggtccccctgttaatgatgccacttcatatcgcagtcttattggaaagcttttgttcttaactatcacaagacctgacattagctatgctgtcaatagactaagtcagtacctcagtgatcctcgtcaacctcacctcaaagccgcctatcgcattgttcaatacctcaaaggcacccctggccagggactcatgttccattctaatagtcagctacaacttcttgccgatcggttatttcatcttcaggccttctctgatgcagactggggcacatgtcctgatactcgccggtccattactggtttctatatcttcatcggtcaatctcttatatcctggaagtccaagaaacaatccacagtctccaaatcatcggctgaagctgagtaccggtcacttgccaacactacatgcgaaattttatggctacgcaacatcctctctgactttggcattaaatctgttcaaccaaccacagttcattgcgacaaccaagctgcaattcacatctctgagaatgttgtttttcacgaacgaacaaaacatgttg

SEQ ID NO: 232875 - DNA, 688 bp, Cannabis indica
taatgaagaaagcaatggatgaagttgattctgtagttggaaaaacaagactagtagaagaatcagatgtggtcaactttccttatattcaagctatagtgaaagagacactaagacttcacccacctggcccaatattaagcagagtagcctctgaaacatgtgctattgatggctatgagattaaggagaatacaagattgttgatcaatgtttgggccatcagcagagacccaaatcactgggaaagcccacttgagtttaagccagagagattctataatgaacaaggaagtgaaaatttcaagcaagttgatgttagaggacaacatttccaacttttgccatttgggagtggaagaagagtgtgccctggtaccactcttgggttacaaattgttcatacaactcttgcttcaatgctccaatgctttgagtggaaagctactaatggagttgttgacatggatgagggacctggcttaactctccctagggctcattctctagtctctactcccaaggccaggcttagtccattacccctatgattttagttttcatccttgttatgaatcttttattatattactgtctttagattatttatttttatttttatgtgatttgttgcttagaaaaggattgaatggtaaaatttattctgtgttacattgtaagaaattga

SEQ ID NO: 232876 - DNA, 793 bp, Cannabis indica
aatcttcataatataattaaataccgttactgtatgggtgggtctcgttgtgaaagacctattactggataattatgggtagagccaaagagtgtgaactgtacaagttaacaataacattgattaaatgagggaagaggctccggtgtatagagaggaccttaccgtttaagaagtaaccatagaaacgatggaacccactatacctatttattatatttactacttttttagttactatgttttatagtatcaatacaatttcttatttctaggtgagaggtctagaaaaaaaagaaaaaatcgtggttgggaaggttatagtagcaaaagccattggaatttttattttatacattggaagaatccgttttcttattaatagactagaaaagggaaggacaataactgaaagaaaagaaatcaattagttattcatcaaagtttcatttagtcaatgactagaattaaacgaggatatatagctcgaagacgtagaacaaaaattcgtttatttgcatcaagctttcgaggggctcattcaagacttactcgtactattaatcaacagaaaataagagctttggtttcggctcatcaggatagaggtaagcaaaagagatattttcgtcgtttgtggatcactcggctaaatgcagtaatacgagactataaggtatactacagttatagtagatttatacacaatctgtacaagaagcagttgcttcttaatcgtaaaatacttgcacaaatagctatattaaataggaattgtctttatatgatttcc

SEQ ID NO: 232877 - DNA, 964 bp, Cannabis indica
tttaaattatatattttttaaatatttatatcatttataggtacctatataacactacttcaagggtttaactatgattatgtgtctagcttctctagggtgtctcttctagagtattattttcgattattatttttaaattatcaatactttaaaacattaagatatatccatgagtgtacctctagatttaacatcttcaagacaaatcaaatgaatatttattaatcatttttacattgttcattaacactttaagtattttagactcattctaactcaactttgaataatattaatttacagttgccatacataattttgaactatatcgttcttatacactttgtgctaggattattttttaaaaaaattcatcgatcccaactgcatttctctcccatgattgagaagattttttaaaattgtgaaatctaataatattaatacacatgtagaaatttaaatatatcataataaattaatatttatttaaatctatatatactatatggcacataaatatgttttaaatttgtgtataatttatgtatgcatatcttattattattaaaatattaataatattttgtgtatgtacatattaaaatattgttaaacacaaacatacaaataataaaaatgaacctattctattcgcctactaagcttaatctagctcctagtaggagatgctatgaggtgttaaattatattagtgtaatttaatattaagtattttactttaataataattataaaaattgttaagtatttatagaatgtgataatggaattacacacaatgatactttattgcaatgcatctactatcctagtagtatataatatatttaatggcttaaggctaattgaaagcaacttgtctttccactttcctaccaattataccatgaacaatcacacaaagtttgtgatggatacaaattggatatgtccttat

SEQ ID NO: 232878 - DNA, 906 bp, Cannabis indica
aaaatttaaatttggtaaaattttgtgtaaaatctttctattggagacacgtctagaactaaaatttattaaaataagtcaaataattggtcgtctaactttcagattgtttgacaaaaaaattaaaataaaattagatgaaaaaaattgcagcatcgcaattatgctgaagattagatctaaaaatacacatgaattttaaactcatgtcaaattatcaagattactttatgaatcaattagggaatagatagcaaagaagacaaaatagaacctaactcctcaacagaaatcctcccatctttatctctatcaaacacatcaaaagcctccttcaaatcctcttcattttcaaacaagctttcattcccattcacttcatctttcccttgctcaccaccaccaccagtcatggactcacaaagcaaaccaaactcttcaaagtcaatcaaatcatctcctttagcatccaattttaacaacatttcttctacctctttttctgtcatgaagattcttatgttcctcagagattctgtcagctcttgctttgttatgaacccattactgttcttatcaaaggtggcacatacttttctaagctcatccttcttgttgttgttgaccatcttcttctctttgttgggagataacaatgatttatcaattgaagtttttgatgaagcaatactacttctacatgtggcaaacatcagatctatacgacctcgtcgtcggttgatcaatttttgagatcaacaatcaccttaaagtattttaagttataatctaccataatataatttaaaaataactaattagttactaagatgtatacaaataagtttttagagagtaagcaaaatatatttcatgttatatgataaaaataaagttttttatata

SEQ ID NO: 232879 - DNA, 602 bp, Cannabis indica
ttgaagttctcgaacacttctaatttctccaagaaataagcccatacttttcttgaaaatcatcaataaagagaaggaagtatttactcttaccaaatgagtttggtttaattgggctacatacatcagtgtgtatgagctcaagtgactttgtggctcttgatagtgactcctttggaaaacttcttcgagattgctttctaagcaaacatccttcacaaagttgatctggttggttattgcatggaaggcctctcaccatctcattcttctctaagagtttaagcccaccaaaattgagatgtccaaagcgtagataccaaagtcatgatgactcatttgtagcaggcctttaaacacttcggaacatcatgttgaatattctagagaaatattctattctttgttatgggaactttggcgatcaaattacttttatcatctcttaagaaaaagttattttcttttaagtgaatgtcatagctttctctagtaattgactcaaactcaaaatattatttttcatgttgggcacaattaaagtaaacatttgagctgaattgatgatctttattttttcaagcgtataagaatcttacctt

SEQ ID NO: 232880 - DNA, 1001 bp, Cannabis indica
aaaaatattgtgtaagttttagactgtgtattgtgttaagttttcactgttgttccacagttgttttttagttgttctactattatttttaattgttctattttgttgttttagagttattttataaaaagacagtatttttataaaaagttttatggcagtaaaattgtagacttttgtccaaaatctagtatttttgtaaaagtctaaaaataaagaagtaaattgaaaaatacctcttttatttatcaattaaccaaatttatctctaatttatatttaattgaaacatatctctttttatatgtactgtactcaaaatacgttaacataagggaatcacataaagaatattttaaagtaacataggcaaaattagtacagtatttataaaaaaataataataaacttaaaaaaaaaggataaaaattaaagagaaaaatattaaaaaaaatatataaaatctaatttactcaaaaataaaattaccaaaatctcgtggaaaccctgcgcaatacatgtcacttctgcattgatttgtggggtccatttattgtgctttgtgtgaatgacgctgctcttctcatctaattgcatacaaaataaaaaaataaatatataagtaagcgatataatctatatcaaatatatatatatataaagtaaagcatattagagttgatgtggcagcttaatagagttttttaatcccttatttgatttctcaaattttctcatttaaatatatattttaatccaatcttatatgatttattatataaatgttgaccatttaatgatttaagcctaaatgatgacctttcagcaattgatcatcaatacaataagagtttacaacgtacccttcaatacaattgttactccatatactatatacgttaacactacattgattgtgtattatatgaccaagccatgataatattagtaccggtgatgttttatattcccttcctcaacaacaataataataaaaataa

SEQ ID NO: 232881 - DNA, 1116 bp, Cannabis indica
cacgggaggtctcactgatttgaacaccgtcaattcaccgaatcctacagatccatccaataccactaatcttgttgatcctactaactcggtgaatcctaatgctgcccagaatagatattctagtagcccctcgagcagaaggtcttgtcaacacagaacaacctctacggagcgtaactaggactattcctcggtattatgcaagggagatagggtaaggaatcggtaaactggctattggtagcctcatgtggacctgggagaggatattgagctggctaggctctaagaagctgtaggccaggtcacctacacagaagaaccacgtcttgttggttgtgatgcttttgcctaacagagatgcgaattcctaagatagatggacaactaggaggctatcctctaggcccatcaagtggagctagactgccgtaacatggaggttggtgacctgataaggcagttcaatgagagaactgttggaagaggctaatatctaataagagatcatttgcaaggaagactaatcaacagttcaggtagggcctatgggaaaacatccttaagcacgaggacagacctttccttgcccaaagacggtcaaatcttgtcaaacagaccatatgggaggagtagtcagcccctggcaccatgaggtgtttggggacagccagacattcttagaatagaagcatcactaatcggacagcatagtgatgctgcttcttggaatattcaggaaaaagtcattttaaggcctatttttaataagcttcgtcctgggatgagtagaaacacacatgacaacttcaactcgaggagcgagaactaaagtgactttgttgtgccactgaacaataatttagttaggtggacctgccaaatccaacttactggtacggtcaacctctcattaataaacaagctgatttggccagccaagggagagcaaccaaccagaagatacccaacctagagctagccagcaatagccaactgccaagcctagggatgaccgaccaaggctagtactgttgggttttgtaccctaaataaaacccatttcaatataataagatttattaattaataaagatcagaaatcacatttta

SEQ ID NO: 232882 - DNA, 1691 bp, Cannabis indica
cgtatcaacagctgggatggcagtttctttctagtgccagtaaagaaattctactcaaaacagtgatccaatctctgcctacatatgcaatgagtgtttttttaatccctgtaagcatttgtgaggacattaagaagcttatggatggatttggtggaagacttcctcaagcaaaggccgtggtatcacctagatgtcttgggagtgaatgacagtttcaaaagatgagggtggtatgggttttcaacaccttcaagatttcaaccttcctatgcttgctaaatagggctagagattattatgtcaccccgagtccttagtggggcgtgttttcaaggaaaaatattttccctatactgattatctctcggccgaccttggtaacaattccagttttgtatggcgtagcatttggggcgcccaaagtgtggtctgagctggtgctattcgaactattgggaacggtctcaccacaaacatactttcccacccttggcttacacatatgtcaaatatgtttgtctcatcaactcattctgccttatatggacaaacagttgactctcttttcttaatcgaggatcgaagatgggatgctgaaattgtctatgatttgttcaatcatcaagatgctactttgatactagcagatgttgatttttggtcctggccgggagatcgctcaggcactttctctgttaaaagtgcctacactcttttgcaaaatggtaaatctaagcgtgcgggagctgataactctggtttctggcacaaactgtggcatttaaagatcccccccaaggttaagaattttttgtggtatgctacttctgaatgccttccaacttgtgttaaaacacgtgagaatctcatctactttcccaacctgaaattattgttcatgctttacaaaactgccatcttgcttcgcattgttggtcaacattatggcattaccatcctctttcggcagttggctagaagaagtttttcacaagtttgatgagaatcaagtaggtcatgctgcaatgttgtgttgggctttgtggaaggcccgaaatgctactttttggaataaaaaattgtcttctcacactgagattctggcgtcggctagtacaactcttgatcattggcgaaaagctcagggtaacacttgtctattctctttgttttttgaaagaaaaggtgatggcgctgagctttggactaaaccggactccaacaacatcaatgtcaatgtcgatgctgccctatttgcacaggaaaattcttatggatttgaaattgtagctcgtgacagccatggaaagttaattgaggctaaatcttgttaccaaggaggtgagtatcctgcaaaaactatcgaagccattggtatcaaggaggctctcaggtgggtgaaaaataaacaatggcaaaatgtacagatcgagacggatagcatgcttactatccaaagtattcgcagtaatcaaaagatgaactccactttcagacttgttattcaggattgccaactcttactatcctctctacaaaatgtaaatttctattttatcagacgatcaacaaatcgagttgctcatgctgtgacaagacactctcgatctttccctagtcatagtatttttgagcataatgtttgggctgacttaaaagctctcgtgtactctgaatgctaatatttc

SEQ ID NO: 232883 - DNA, 646 bp, Cannabis indica
caaacccgaacaaagaaaagaaggagaaaatgtatattacaggtctattcattaaaataatttaaaattagtattggcattaaaactgcataaagattttatttattgaaattttcattgatatgtgattgtattaaaaatgttttggctttgttctgaaataaattttgggtttaacccctaaaatagtatttttaatatttatatagattgtcataactttacctcttattattttataaaataattgtgaattagtaaatactgaattaatgctaatgggaatcaatattaaaataatataatattagtacagcaaatagaaatcaacagacacaaacttttcttttaatacatttatatatatatataatttaatattaatacaattaatagaaatcaatagactcaaacttttcttttttatacatttatatacaaaaataataaaccataaaatatacttgaattaataaagactatttatttggcctattcataaattcgtatgatgaattgggcagtttaaattttgttttaaaagcttaatattattgttttttgtatttattgatttcaatgtgtgtaatcatatgtgttatatatagaaagaatacatttctatgtattctattgtattcaattt

SEQ ID NO: 232884 - DNA, 1587 bp, Cannabis indica
ctagcaactaaggatgagtgcctagaacagtttagaatttggaaaactcaggtggaaaaccaaataaatcttaaaataaagaaccttatgacgaataatgggttgtagtttattaattttgaatttgacaagttgtgtcaagaatttggaatcactaggcatagaaccgtagtgaagactccagagcaaaatggtgttgctgaaaggatgaaccgaaccctattaaacaaagttcgatgtttacagttcagttctgaattagaaaaacctttttgggcggaagctctagcaactgcaacctacgttataaatagaagcccaaaaacagtgatagacttaaaaataccttatgagaaatggtacaacagaacccccaacctaatgaatttaagaacttttgggtgtacaacatatgtacatcaatctattgacaagttggaacctagatctgtgaagggaactttcctaggttatgccttaggaaccaaggggtatagaatctacatttccaagaagggtaagctaaattttgtgattgctagaaatgtgattttcaatgagttggaatatcctcatttgacctttaggaaaggtagtgtgtttccatgtaaatgcaggtaaaacaggaaaaaaaaatactacgtgcatggaagtggattacggaacgaagctcccggaagaagggtcacagatgaaagctagtgtaaaactgaaaggtatagcgcgcaaccacaagcttatactgagcaggaagataacaaagaccaaacagaggttccggaaggatttagatagaaaggtcaggaaggttatcagttggcgcgtgataaaacttgaagaaagattcatcctccagtaaggttcgtggaagtagacttaactgcattttcactggcggtaggacaacaaactaaaattgaagaactcgaaagctacaaagaggcaatttcaggtgaaaataagtcaaaatggcttcaggccatggatgaggagatggattcacttcggaagaacaagacttgggttgctgtaccaaatcttgagaacaagtagatcatggaatgcaaatggattctcaaggtgaaagagagaatcaaagaaaatgaaccactgagattcaaagccaggttagtggctaagggctttactcaggtagaaggtatagactacactgaaatctattcacctatggttaaacacaaaatgttaagattgagcatctctgatggagtttgaaattgaagagcttgatgttaagactgactttctcaatggattcttgtatgaagtgatctacatgaagcaaccacttgggtttcaggtgaaagggaaagaagttgaattgatgtgcaagcttaacaggtatttacatggcactactacaaaattgggctttagaggcggtttttaagagctttcagcgtcggtattggcaaaattcgctatcgacgctgtttcaggtgatgctaaagtgttaaaaacaaccgacgccggttattatgaaataaccgacgccatagggtcttcctatggtttttttttcatatttacaattttgtattttagcataatttatatatattattt

SEQ ID NO: 232885 - DNA, 1157 bp, Cannabis indica
ctttatccctacttgactgatgtgattcctcataaagtagtcctcactaggcttattaatcatagcgtaatagctgcagaagaggggttacgccgtcagacttaatacttatggcagttccaatgcgccttctcccatgcggcattaaatgcgaggtgactgttcaaatggagtttggggcttcccagaggtgctttgctatagctctgctctccgggagtacgtggacccctcatctcttctctgggaggtattttctttgttgataatcttgatctaaaaagacttagttaaattatctcgaaaccatattcctcaaatccacgtttcgcggtcgcattggcccacgtattttgggaaaaatgaagggcaacaatttactttcatgaaatatgaattaaaacaatgttatgtgttgatttggatggtttcatgttggtttatgttttacttgatgaatgtacgtgttggacgaaatttttccatgaaaaatattttttctgtttctgaaaatattttatttggattccttgtgaaaaattaagcaattctcatttttacggaactcaattccaataaaaattgaaaaagatatgaagttttgaaaattggtttgagttggtgcatcgggtgcaccaggcgctcggacaagacaccctacacgcgcgcgcatcttcagacaaaatcttgtctgaagcgctgacacgtctctcgcttggctgatgcacgcccacgaagaccctgcaggcaccgagttttctcggcgggacaccctgcaaagctccttcgtccgtgggcgtaagggttgttggcagcctctcctgcgctgcaggtgcagcccactggcagccaacccacaatttcaaattttcatgggattttttcccaaattctgatttttttccgattttcaaaccccaaatttaaaataaaatattatttttgaatatatttgaacttaaatatcattttttaaattaataatatttatttttcaatagattattgttaattttgatattttgaggtttaaatttacaaatttattattttattttttaaattatggtcatatttaaaaatttgttaacttttttaatatttatatattatttaattataagatcaaatattttgatatttaacatattttaaat

SEQ ID NO: 232886 - DNA, 795 bp, Cannabis indica
tacttgaaaaatataatatgaaactcaaccctgccaagtgttcttttagtgtttcctcaggtaaatttctaagatacttggtgacaaagcgaggagttgaagcaaacccatatcaaatacgttccatacaaaacattcaatcactaaaatcaatcaaggacgtccaacgctttacagggaggatagcagttttatttcaaaatcttttgaacgttgtcacttgttcttctcaacactaagaaaagcgaaggactttgagtggacaaaagaatgtgaagatgcacttagacaacttaaagaatatctcgcctcacctttgctcttagcgaaacctgaagatggagaagcactctacatatacctagcagtctttgaaacaacaatcagcgctgtgctaatcatagaagaggaaggaaggcaacaacatgtctactatgtctcaaagactcttctagaaacaaaaacaagatatagccaacttgagaaactgcactagcacttatcacagcaggacacaaactcagaccatattttcaatgccactctattattgtgttgacacaatatccacttcatagcatcctacacaagctagatctttcaagaagactcaccaagtgggcagtagaactcagtgattacgacatcacattccaaccaaggacagcgatcaaatctcaggtattagctgactttattgctgacttttctagtgatatgcgggtaaaagcagaaaaagagttattgtgcttgaaaaagacttcagttcaaccacttattcttcttttcaataat

SEQ ID NO: 232887 - DNA, 990 bp, Cannabis indica
acttaaaaaaaaattattttaatcatcatttatatgttgtgattaaaaaattagtgactaaatgtattttataaaagtaagagactaagactatgactgaaatgacgtaaaaatatctgacgtgacaagagactaagacttaaaacaatcacaacaaacacaaatgtctagacataactgacataatttatcaaataaaaaacttggttcttacaattttttatataaaaattcatttaaatatacaaaaaaaaaaaaaaatgacacgtggatattgacttatgacttagaaattattatcgagaaaaattaaatttaagtatttgaccattgctattgggcactattagtgccaacaccttttataggtgacactctttgatcagttagcgatattccctaaaatttaaaatatgcatttagtcacgaactttttaatcacaattactttcaagattacgttataccatgagtgatatcttttaacatttctctaagtatttatacgcaactcgaagttaaactcagtatgcgttagggttgaacatttagacccgtaaacccgaaaaacttgaccacccgccccgacccgctgccaaaaaactgaaaacttaaaaacctgtgtggtcgggtcgggttcaacccgaaaatactccacacgggtttcaggttcaggtatggaaaatattgtattttttgatcgggttgtaacccgtaacccgagatgtggtaaccatcgtgacttaatagattgattgggctgggcgcttgttagttattactgggctgtttatttcttttttttttatatgtaatatgaacatatcattgattatctcttttttttttaataaaaaaagaacattgattgttcattaaaacaagtagttgggaatcacaggggaccctccctttgacatcaaccagccatatggccattagttcttacatccttagccaacctatcagcattagggctgtacatcggtc

SEQ ID NO: 232888 - DNA, 1279 bp, Cannabis indica
aaaaggactagattgaccgtcatattttgtcttcatcccctattttaagaataagttagaaaccaaacaaacttacaatttttgaatatatttaaaagtaattagtttacataatctcatattttttttggcatactcgttgacaaactcgtctgtgcccttctttgtatgacaaactttccaattctcaatgcgacccatgttttgctgataaatataaattgtataaaaattgcaattaaattaaaattcataaaataaatagtatatttatattaacttacatttttatgaagggtctcaaccatagttatggacccttatgttgaaggaaatttcatattctgctaattgagagcatttcgctttgaacgagtagtaaactcaggagacgtgaagaactgacatattagccgtcattgttcttcattgagttcattgggtgggggtcttgactgcaatttcaatgtcttctggatttttgtaaaattctttgaaatgtacgagtctaatgttctttctcatcttatattttttggccatttcagctaacgaaatagctagtaattttggatgactttcaatttggtaataatatagcatttgacaaaaaaatattgtaataacatactgataatttcatttattaatttagatatacatttcaaaaagtttacccaaagtttggttaaaatgaggtgttcgtattgcactgagacacttgcccaactaggattatgtctaggaacatgcaatgtaacctcattctatacaaaacgagggaaggctttactctccaaccctacaattctattggagacgttgccaaattctaatggcaacggcatccgatctttttttctactatcttgcaagttagtcaaaacattcctccagcggccttttctagattcaccagaggtctcgcacgaggcaggtacactagtaagagctaacaggtcatctccaccgccatctccaccatgataactagcaatatttaccgacattttatgctaaaaagaataacgaaattatatgagcccttagtcaaaacaactaatcaacttagattaagcaataatagtacaattagtcattcctcgaaacaaaataacattagaaaaactagtcatcaatacaaacaatatccaatacattaatcataatcatcatcactaatccaatttgataacgcaatcacttgttctaatatgtcgaaacaagtaaattgtcttagaggacatctcttctcaacatttccatcaaattcacggtc

SEQ ID NO: 232889 - DNA, 2317 bp, Cannabis indica
gttggccatccaactatgcaaatatgtatttacaaaaaagggccacaaagggcaaaccattgtctcggccatatggccattttcctaaagtaaaaaaaaactaaaaaccaagcctacatagtaggagacttggatggttcttcttctttttctcccgctgcctcagcctcctcctctgccttcttgacttgctcgtagtaggcaaggacttccttcattttcacaggaaactcaaatccatttctggattcaccatccaaactcagtagatggagtgcttggtaatggtgttgcatcattctttggtgttggcctcaaccccctcgagctttgcgctggctgcactgagttcttcctagagtttttggcacagatcgaagttgtccttggcctccttctgaggtgcctcaagttcagctttgttagccctcttcacctcctcagcctctttgtttaggcatgaaatctctgactgagcctcattccattccctagccacggcctaacgcttcccaatggtcttctaaagctcgctctccagttgtctcatcctatcgagaccccgatgttgggtgacaaaagaaataaaggtttgctaaaaacaaataaacaaaaatgtacaagtattttttagggtttgctaaaaacaaataaacaaaaatgcacttggcttgaagaggttgtaaccttacttattttgggtaccatactgctcggcaatcccatagtaggagttagaacagctaagctgaacgtagaattctgggtaccaactatcaaaaagacactagagtggtacgctcggccctaaacactatgggcgaccatccacattgattacctcaggatgctccttctttagcttcttgagggactgcattctaaaggtaatgcgcccgagccacatagtcttgagtctcctcgtcagttgggagtgggacctgctgccatgatgcatacttgggatacttataatcgcaagtatacttgttttcggcgagtagtccaacagatctcagattggcctcgttcaggagaaactcagctgatcggagaccgaatggaagacctagcagaagcctgcgtcgcttggccatctcgggagtaggggctggtcttttcgagacaactaaaaaaaagtaaaattacaagtcagtgaggccaaaattaaggacatggaataatctaaaaccatgtttggagcatatttacttacatattatacgaaaggtggttgtgttgattggggagagaccacttgcctagaagaaatcttctttgaaagcggtcttatttggcaacccaacaatgatcttacaatcgtttgtgtgagtcctaagataataaaagcccctacaacattcttcctcgcagggactgccttaaccaagtaaaggtagactatttccaagggagtggggcactctcatcctaattttttttttacaaaacccttaagcttgcaaggattctgtaagaaataggaaccaattggaatggggcgattctgagatggtagaagtccttaagtaatctcgtagggggagaattggtccacccctgatatgctcgaggctccaagcgcctatccctgtcgagccactcgtacttgccttgccactagtccactcgagtgccttgcgagtaagccgttctagtgggtaacaactaaactcaccaggggctacagatcttacctggcatttccatttttggtcaatgccacaagtccttaggatgctacctacatagtccctgatggctcgtaccctcaacttgataagttcagcctcgaaggtaaggttggggtcttagggagtctttgatttacgaggcttggaagacataattttgaagtccaggtcacctggcgaaaaagcaattgtgactctgggtaaaaacaagggcttagtcaaagtaatagctgataaattgggaggttcaggccaagcagcatctcgcaagaaacaacgtttaccctctgttatttcttgtaagaaatgcctatggtgactaacaatatcatcctgatcggtttttattaaatggtctctaatttttgcatcttttatttctaatttggacttgggttttgaagttctgggtttgtatgggatggaaagttcattaggacactcgatttctaaagattctctgggataaacttttgaaccaaattgggacatttttacaaaaaaaaaaaggtaatcctaattcctggattaaagtttatcaaaccagaaatttacaaatatgagaaacctaaaaacctgtactttgcctaaaccctaaaaaattacccagacaattttaaacc

SEQ ID NO: 232890 - DNA, 1455 bp, Cannabis indica
cgaggtcgacgatgtatatctggcatcgatcgcagttcttatcctcaaagatttcttcgaggctcatttgaacgctatcttctggctcatcaggattgtaagccttgttcacgctaatgggatgaagttatatgaagtcttcccataacgcacctcacttacttgttcttgagccgattcgacttttacacttaatttgttcattgtacgctaaggactttcgcgattaatacgtgtcgctttctttggggcctcgatattcacatttagcaatatatggtttctcgctaatatactaagtgccagtttgtacattgattactcgcctaagaccttacagtcagcggtttacaaatataatctgatacttacgtaattaatgagttattccataagaagcaattacatcgattcacattccctttatcttgacacgtgtcctccagccaaatttcgggtataagaggtttcaaaatgaagagaattgttttttgcgtcacctaaaaaatgtcgcaaataaaaaactatttgcaactatggcatatatgtcggttttgtagattgacgcaaaatctttatatgtcaattaaaaactgatgaaaatattcctttttgtagtaatgcaattagaaaatattctataggttggcctcctgaagcaatagcaaacatatcttatgtcttttagtatgacttgttaaatcaaagaaatgacttaagttgacatctactaatagcgagtgtactcaggtacttatctgcgagtctatctttaccaatgaaatgttggactttcatcttgcatctagtgctcatcaccctccacccatccactctacttgtttactatgattgttgattaaaatttccagattaacgaaaatggtggaatggtcaaaagtattgggcgataccaacacaaataataactacccctccccccatccccgcccccgcaaaaaaaaaaaattcttcaagagtttaaggattatctacccttacaatccaagagagtaacaacgaggaagcaccaaaaccacatcatgaaaataagcctaaaacgacttcagttggctagccaaaaaggaattgaagagacactttaagaaataatactatgcctgaaaataagaaggatgcctcgatcaaaaatataaactaataagagcatgactagctcattgggccaagacgtccttaggcataccaaaaaataagaggatgattggcccatagggtcgaggcatccttagcctggcccatatggtcgatgtatccttagctgtcaggcccataaggtcgatgcatcattaaaaaaagattgagactgttctaagagtcaataccccctcaaggaaatggtaatgacacgtcaaaaggttgagaaaagttcaaggaaataaaactcccttacacctaaatataaagagtggtaactaagaagaggttgagact

SEQ ID NO: 232891 - DNA, 2831 bp, Cannabis indica
ttttgctcttccaacccttcctttggtaatgctctatctaaccttattgctccttgtatttctggtgatatgaattctgattcgtctagagtcccttccccggaggaggttcgccttttggtttggtcgatgggtccgctgaaatcccctggtccggatggtatgccgggatgctttgatcggtttcattgggatactgtgggagagtccgtcgttgatacggttagagaatttttcatgacggggtattttgtgcaaagtctgaatagaacgttcatagttttgattcccaagaaggtgaacgctgtggggtttgatgattttaggcctatttctctgtgtaatttcgtctataaggtcatctccaagattcttgctaatcggcttaaaatcattctcccggacttgatttctcctttccaatcggctttcgttccaggccggtggatcgctgaaaatggcattatggcccatgaaattatggattctttcttaaagaagacgggaaaggcgactttcgttggtgtaaaacttgacatgtccaaagcctatgatagaatggaatggagttatctggacaaggttttagaagccttcgggtttgattcttttttcagaagactggtggcaaagtgcatccactctgttagtttttcgatcttactcaatgggggtcctttaaaacatttcaagccatcccgtgggtgcgtcagggggatccgctttctccgttcttattcattcttggtagcaatgttctggctcgtcttttggctcaaaaggaagatagtgggctgattcatggctttaaggtttgtccccaaagtccttctgtttcccatttaatgtttgcggatgatacctttcttttttgtaaagctaatatgtgtgaagtggaaaatctacgtgaatgtttgaatctttattattcctggtctggcccaatgattaatgcttctaaatcggctttggtgttttcaaagaatactgatctggttagcaggaatgatattaccgatgcccttaggtttcgtttgatgacttcggaggataaatttcttgggaatcctttgttctttacgaaaagcaagatccaggattttagttttgtgattgagaaggttaaaaatcggttagaggggtggcgtagcaaattgctttcccaagctgggcgtacaaccttgattaattctgtcatctctagcattcctatgtataccatgtcctcgtaattgctgccggtctcaatttgcaatctcttggataaattatctcgcaagttttggtggattggaaattgtgataaacaacggtatctttctctcttgagttgggacgagatttataatcccaaagaggtgggtggtctcggtttgaagaaatcccatgacctgaatttggcctttattgctaagttggggtgggctttggctaagggggattcgtctccgtggtgtaaggttttcttggctaagtattgtaagagagatctttccttttggaatgctccggtccctcccttggcttcttggggtgctaggggaatctttgcttctcgtgatcttattcgtaaggaaagttgttggatgttggggaatggcttaagtattgatctttggagttctccgtgggttccgtggcttgagtgggacgagtttctagctgccttcaatccaatgatccgtcccaagcagtcgatctctttggcgtagttcttgttggggaatggggagttgaatatctattcattgtcttgttggctgagactctctttcttggatcggctgaagtctctgccccgtctcccccctacttagcaagatatcatgttttggaaagactctcaggatgggaagttctctattaaggctgcgtatcgattgattactaagaataggcatggtggggttgatcgtctttacaagaccctgtggaaatctccctttggtgaaagagttaaactctttctcgggaaggttgggagagatatcatcccttatgggcagaggcttcagtccctgtttgggaatgcctcctcttgtgctctatgtgatggtgattccgactccttagtccacttttttttccattgtcctgtggctgagttttgttggtttaggagttcgcggggtattcgaagtgatcttcttcagttcaactcctcgagggatattgtcgaatggattctcttccctccttttcctgacaatgtggatttagataggttctctatctttgctgctcttctttgttatcatatgtggtccacccggaataagtgcttccatgaaggggtgcgtgatcctcccgaggttattttcaaggggatccttcattctgtgagttcttttgatcccaaggattgcgaagttcctcccacggtggcatgtgaccctcctgcttttttttgatcttggctcagtcaatcgggtcaacctatttgtggatgctgcggtgagagacaatatgggggttctatgttgttcttgctatcgatagctcgggtaaggttttggaggcgtatgcggggaggagttgtgtctcgcccctggatgctgaggtgcgagctatcctcaatgcattctcgagatgcctttattgtggttggccgacggtaatgatcttttcggattgcaaggtggcggtggatgctattctagcgagtacatgtcccttcttggcagttgtatcctaacctttgtgcatcttttccatttgtgtaatctttgtagtttttgtaatgtttcctggatttcccgtgtgaacaatggtgacagcccataagcttgctgcctgggctgcatcctagaatttctgtggttttttttgat

SEQ ID NO: 232892 - DNA, 701 bp, Cannabis indica
aactcaaacttggttgaaaaaaaataaacattaaagtcatatatatttattttataattattttgtttgatctattacaataaaaatttgaatgttaccgttattttgtcccatatagtttgaatgaccgtatcctcaacgtcctcgaactcaaacttattcaaaggaatggtattgtaaacaaaaagcttgatataattcttgaacttattgccatagtcgtctattggggccccagtcccaatatgaaatctaaattttaatttctgacctgtaggttgcttagttcttgttcaatattttccccttatactttctcttaactctctttttcttactgttgcttgcacctgtatcagccattctacacatacaagttacgaataattaattaatcaagctactaacaaaaaaacatgtatttgatttaattaaaggtgagtttaaatattacaataccttaaagtctgcaagtcatcacaattatcatcatcatcattaacaggtacattattttcattatcattatcgctagtgccttcatcattactataaataatgaaaccatctaaatcttcacagttaggctgctcacagtccctgttggtcactttaattgggtcaacatcatcactgacatattcgacattgtccagttgtgccagtttaacaactaatgggattcctgaagagtttctttc

SEQ ID NO: 232893 - DNA, 545 bp, Cannabis indica
tctccctaatgttgggaaaagttcatcattaaagtgacatttagcaaaacgttcattaaaacttaagaggtgaaacacaattcctcaaccctaaaccctacctcaagtgagagtaaagaagaagaagaagcactacctcaagcacctccaatgcctcaagttcctcatttcaacatcgaagaggtattttctcgtattcacaccttggttggcactcagtttcaaaacttaagaggtgaaatgaacacacaatttaccaacctctacaacgaaatgaccactttgaggggagacatagagcaaggttttgacaacatccaaggcgaaatgacacaatagaaagcttacatggaccgctttggacccccaccatcttagtcccttgcatcatgttttagcatcattcttcatgttcattttttttgcttagtatgcttgactttctatgtgttagtgtgttatgctttagttatttgtattccctttttatgtttggatggtatgtgtttgaacttaaatatctgtttatggttctatgtttcaaa

SEQ ID NO: 232894 - DNA, 665 bp, Cannabis indica
tagacatggatctagatacaaacctagactcgaacccagacgtggacccatacccagactaggtttgaaacgtgggacctggatcttgagcgagacccagacccaaacctggacccgtacccaagacttggactcggactcagacctggatccaaacccagaccaagatcgggatttgaacttggacccagacccaacacaaaactcggaccaagactcagaccccgacctagactcggacccgtacccgaagccaaacacggaattgaaatgagaattgggactaggacacgaacccaaacatggaccctgactgggaccaaggacccgtacctggatgggggaccttgacccgggcctcggaactcgggtaaagatcgaaaccttagactaagactcgcactagcatctggactcaaacccagatcttgacctaaactgggattggaaacaagaacctgaactcggacaaggacttgaaccctaacttggtcctagactcggagtgggacctaggacccagacctggatggggaacctagactcgggacccgggcttcggaactagcactgagaccctggacctgaccccggacccacacactgaactaggacctagaccagaaccttgacccaaagtggaactagactaggacccgagacca

SEQ ID NO: 232895 - DNA, 1152 bp, Cannabis indica
ggtggttggttgaatctattcagtttgaatagttttctaattaaagttttattctgttttttgatattttttcaggttagaacttcagtattttattgagttgggagcgttgttagaagatgttatagctttattgtctaaatttccgggggcagttttgtcccatggggctcgctcttagattttagcggcctatggttggcaaagcatgctatgcggttagacgatgagctatcttggttcgaggaggttccagcgccggtggcgaacgtgggcgtcgtaaattcatgagtgattttaatcactttatacaaaaaaaaaaaaaaaaaaaaaaaaaaaaaaacattgggtgccataatattataacttttatagatatcgttaactaatcacaagatatcatctttaagtgatgttaagtactattgatgcttgtgtcggtagtagcttaatataattagatacaaatttattggatttaaatattagaaccgtttcgaatttttcttccttaatttgatctcattgaaccatgtgtaagtgttaatactatattgtagttttcttcaagtagtaccaaaaaggccccacaaataaataaaagagttgaaaaatagttaaggtataatcagctacacgtacttagtcacctaaatcttttagggtgaacaatcacgtgaatatgtttccattattattttttttgatctaatgtgcaattacaaattctctccatatcagtggggccaccccccactttacctatatcatcgggcatttttaggcgagttaatttctcgatatatctctagttttagaaacttttttcggtaacattggtcgtcgtttcagtttattatgttagacttttatttacgcttacattaaattttattagttttattaaaacttaagttgattagatagttctttgatctgttagccgatattgttgttgatcaatagttaatagatttagggtcgattcggcacagctgcgctgtgagaaaaagcaactgtagctgtgctatgagaaaaattaaccgtaactgtactgtgagaaaaagctaactgatgagtatttggtataatataatttcaaaatatctgtgagttggaaaagttgcagataagtatttggtaagctagcta

SEQ ID NO: 232896 - DNA, 1307 bp, Cannabis indica
gatgccttgagacaagatataagcaaaagaaaggaatgaatcgcaagaactcaccgcagccagggcagcgctgatgtcctgaacctggtaaacaaagttcactgaggcgcaagcttcgtatctcttggctgggaattgagtcagatgggagacaaactggctggtcatcttagaggcgaagggggcgagggtaggaccgacgaagcgattgaaccagtccgtcaggcgatccatgttcaggtcccagggattcctgaaggcgtcctcacgcaaggtgttctattgctccttcctcaagatcttcttcaaggcttccacctcagcatgtccccggctgaactcgtctagggcatagttatgtttggtgattcagagcatttgcctctcttcgtctgcgtggactggggtgtgaacaatgccatgcggcacggtgtactcctccacttcggaagggatccccgagtcggtgctaacagccggagtgtccctcctcctggacctcttggaagactcagcctcaaccatcttaccctttcgcttacgatcaaggaaagccgcgatctcaccctcctcctcctcgacttccccttcctcgtctatcaagactattgtgcctaagggggcactggatgacgacctctcggggttcaccagttgggatgaagccagaggcagagaaggatccgggctgtaggcctcggcaagggtcgccaagagatcttccattggcttggctgctgcaacaaagaaagaagaaaagtgttagaataactataagaaagtatgcgcccaacaacaaagcgataaagctaatcctaccccgactctccaattcagccctagcaaagtcttgaactacattgctggcttcgtcatccccaagaaagccgtccgaggggagaaaccagctggaggacaagtgggctgaatgaactagaggaatgggtgcaggaggtccagagcccatccgggatcgacccaagaaatggcccaagtgggaaaaatagaagtctttggcatgatccccccaccgagtggaaggcatcctaagcttacaaaggcactcatcaaatcctatgggcctacattgggtatactctcgaacaaaggggacatggtgaattattaaatgagacttatcggaccctgaagtactggcatttggagcaccagtgttaggaacttggaccgaaggcttaggcctggcgggcctccgatccgtgccagcttccagacgaagggtcctcccacctgcagcctgggcctgtttaaaatattttactaggaagtatgtttcattaacatcc

SEQ ID NO: 232897 - DNA, 1037 bp, Cannabis indica
tataaacatttaaacattgatgatttttttattggtcttgttcaaagtttggataaagataatattggtatattgttttgtttcttgtgggctttatggaatcagagaaataactttttttacaatcaaacatctcttcccccacgggaagtgtatgactggagtctcaatttcttttttaagtttctagatgtgcagcaagctcaggcaacaggtcccaaatttgctactcatgcaacatcagtgcaacaaacaccttcaggtcgcttcagaattttcacagatgcaaccactgattcctacaaccgcaaacacagtatcagagtggtggttatggatgcttgtaatagagttttagcgggtttcgcaaccccttttcctggtttagtgccgcctgttgttgcggaagcaaaggctatctgccaagccatggaatgggctcaattgattaatcttcctgtagatgtgcttttgaccgattgtaaatctatagtggataggcttgtttcttgtaattggaataatagtgttctagatgatgttctaattcagattaagaacttgttatctttcagtccaagtctagttatctcttatattcctagggattgtaatgtgattgctcataagattgctaagctaggtcttggattagataatgagttagtttggaatagttctttaccttccttgtaacttgttgctttgcatgttttcctttttaatgaagcacaagtttttttcaaaaaaaaaaaacaattttttttaaaatgatatccataatttaaaaagtactttttattcaaaaaaaatatgatataaaagttatctaaacgttaaaattaagttaaagtttatactaattttatacttttaattttaaataaaagtaacagtttagcagccaaacaggactaataaatttgtagacaaattcatatggtaaaagatgaagaacaaaatgttaagcattctttagcacttatttactttaaaaagaaaacaatgatgtaattgttagtttctttatcactcat

SEQ ID NO: 232898 - DNA, 1189 bp, Cannabis indica
ctctcaaacttgaaaaagattagacttttggaaagaaaatggagatagaagagaatagtggttatcatgggaatggtgggtagttggacatatatagcatttgaaaataaatacccaaaatcaaaaaaaaaaaaaaaggaaagtaacttcctcaccttggtcaccacgtgaggagagaaaaaggaaaccaaaacaaaatgtttcaaaatatagttaaaagttaccaaaaatacaaaaaggaaaaaacaataattctcacaaaatctaaaaaataaaacacaatacaccaacctatattcgaaaatgtcaccaaaaaggaaaccaacaaaataattaataacacaaaacgtgtttcctaaaagcatagaataaaagaaaatccccataaaaaataaaaagaaaaacaataaataaaatgcaataaaaacttgtttccataaaagaaaaacaacctaaaaaatcgaaaaatatgccctcttttttaatgaattttttcaaataagccaatttttggtatattttttttattttgtaaaaaaacaaaaaagacaacatacgaaaaatatataaagcaccaataacaactttagagcaaaaatatgtgactacaaaaatagtgaaacataagaaagaaaataacaagaatttttaagaaagcgcaattgaaaatgtcagtcacacattttttatttttttattttattttttttaaatgaaaaacagattaataaataaccttgatatttttttcaacaaaaagtaaagaatatccgcttgtctttatccctgatgaaaaaattaaactcataagaatagtcagaaattattttatcaagctaatgaactaatggaatgaggtcataccgattacgcagaaaaattgttgactcaaccaccaagaatattaaaggcaaattaaacagtatgtaaccgttttatgagaccatttttgaatatatgaaaattttacaacaaactgtgccaagcataagtatgtgaaagtgtaagcagggaacattgcccaatttgttaaaaaagactttttttggtagattgtaaccataggagacgatgttccactatctcaatggtagccctttataatggcagtgtatcctctacataactcccaattacatagttttaatttactcatagacgactttcacacattgagatagatagctct

SEQ ID NO: 232899 - DNA, 1131 bp, Cannabis indica
atagggctcacagacagggacctacgcctagtggttcacagctcacatgggttaatgggatgacattcatcccaatgggggaagtaaggcttcttgtcaccctgtgtcctgacaccccacaaagcactttcaagtattgcacctttttgtggtagattgtcccaccgcctacaatgccatccttggtcgaccggccttggttgattttagagcgatcacctccattcgacacttatgccttaattccctactcaagaagctagagtgggaacggtgagggggaaccaaggagaggtgagacaatgttacaatgttgaagtacatttgtcagttttagtggtacaaagggatgaagagcccattatgacagaacaagacgagttggatccccatgtgggatccaaaacaactatagaatctatggaggacatcaaggaagtaagtatgtgcgacctcgactccactaaaattatccgcctaggaaaaaacctagagccggaggaaagaagtaagatcatagatacgttaagggcagctacggatgtctttgcgtggtgacacagggatatgactagaataagcccccacatgatcacccatgtcctaaatgtcaaccttgacatgcctctagtacagcaaaaaagacgctctcttgatctagtaaaagccgacgccttggagtaagaggtggataagttgctgaccaatggcctcatgtgggatgtgtattatctgaagtggctagccaatctggtgttggtgcctaaactgaacaggacgtggcctgtctacatagacttcatcgaccttaacaggcctaccggaaggactacttcccattgcctcaaatagaccaaatggtggatgccacctcaggatttaagcggctgtccttcatggatgcctactccgggaacaaccaaattaaaatacatgtcgcagatcaggaatgtactagcttcaggaccgacaagagggtatactgctacctggtcatgcctttcggattaaagaacgtcaaagcaacctatcaacgtatggttaatcggatgtttaaaggcctcatggaaagaaacatggaagtatacatagatgacatgctagttaaatccaaaacatgcatgggccatg

SEQ ID NO: 232900 - DNA, 522 bp, Cannabis indica
gtttgtaattaagtcagttaattatgttttgctagtaaaagtctattagggggttagttttgtcttttcctttttctgcctaatcttgtaactatataaactgtatccaacactttcataattaatgagaatcaatctttgttaattcatttcgtttaacatggtatcagagcgcagcatggttctcattcatcattcgaatcttgttgttgaataattgttgtcttcttcttcgttgatctaccatggattcctcaccagctctctcctctacaaccagccaaaacagagctactggttctggtggttcttcgttcactcccgttgtgtttcctcacaaattggccacaaagcttgatcatgactactaccttttgtggaaacctcagattttttctgccattagagttcacaagctccaacagtacatctccaactcgttcactcctcctcctcagttcctttcagaacagatcgcatctctgaaatcatcaatcccgacttcatggattgggatcaaca

SEQ ID NO: 232901 - DNA, 1398 bp, Cannabis indica
taagataactcatcgtttaaccaaaaaaatatatttttgctaaaccacactgcctcccacagctaaccatatttcttgttatttaattgtccacaaattaaaatatgtttcattagaaaaaagaaacagttatataatagctaaagtacctcacaaatagcattattaataaactaaaaatacaagcttttatcaaagccataaaaagttttgtaaaccaaaaacaaccacaataattttttttatgacttgcaatataaaagtcctattatttccctcaccaaattgtagggaaaaaaacacaaagaagaagaagagaagaaagtattattgtaaacattttgttgtcaattccaatgagtatggaaactaatattcaaaagatccatccaagaactcggggaaggcggctcgcaattcgctgtctcgatccaaaattgcatccacaaatgatgaattttcgggttgaagatgatgatgacgatgatcattgttgatcatctgagcaaattgaccctcttgaatgtttgaaccattttgatcactaccatttccattacttaactttgaagagttagtatgtgatgatgatgatgatgacaataaaaaaccctccaaatcattctcctttgcttgatcttcagtgttgtcaccaagaaaaaactcactccaattattggaattacaaggaggcagaggcagaggcggaggcagagccggcggggcgaaaagaactacttgtggtgagcttaagtcagtgacatgagaagaagatgatgaagaacaaggggaagttacttcattgaaaaagtgtggttgaacattactattattattattgttaaagaggttttggttagtcattacttgaaattgatggcttgttccaatattgttattgttattattgtagaaaattctagcaggagttgtagtagtagtagtactactgatcatatttgtggatgggatatgatgattattaggaagaccactgatgtttccaaattcagaaagaatttgagaaattggtttgtgagttacagggtcaattcccattgtgtacagcttctttctaagctttgtattccaatagtttttcacatcattatctgttcttccaggaagctgttttgctataagagaccacctttacatatataaatataaatcaatttaattctaatcttttataaaaaaaaaatccataaaatgaaaaaataaaattaattacctgcttcctatagcttggtgaaggttaataataagatcttcttcttgaggagtgaaagtgtcatgttttagatcaggcctgaggtaattagtccatctcaatctacaacttttcccacatctattaagacctgtaattgtgtatgtaaattcatacaaaattaa

SEQ ID NO: 232902 - DNA, 648 bp, Cannabis indica
attaattttataacaatacaactccattagatgctctaatagttttattctaaaacatgtataacaaatttgaaatagtgtatttttagtttcgaactataaatatattgtaataaagttcctaagtgctataagaaaaagattatagattcacttataaaaagaaaaaagattatagattgaagagtgtaggttgggccggtgacgatggttttagctttaggcggctcaatgctctttcgttcatatttatttcattatttatcattcacacacagacaccacaaaaccataattagttaaaaggtattattagtaggtatttttatcagtgttagtgttgtattattattgatataattaagtattagatcttaaaaacatttacaagagatgctataaaaaaaatatttgatgatataaatacattttagcatttttaattgatggttacttttaaaatgaaaaagaatgctacaaacaaaatatcatactataatatcttttacatattctagttcttattttttttattattatttcacttctgttaactcataaatatagacacgtggagtgtttagattcattacatttatttatttaattttaaaatttaatatctttaatatcaaaaactaaatgcta

SEQ ID NO: 232903 - DNA, 1129 bp, Cannabis indica
gggtaattcccttactttaaaaataatgaggcaaggatactactggccgacatagcgagcagatgtgtctagttttgctaaaaaatgcgaaaaatgtcagcagatagctacatatgtaaacaaaccaccaagccagctaaattctatcacaagtcccggacctttcgcggtctggggcatagatttgactggagaattaccgaaagggaaaggaggagtaaaatacgccatagtcgttgtcgattacttcacgaaatgggatgaagccaagcctttgggatgcgcgaggatgcatggtactgagtcgcaataaattcaacctcatgaatgtatggaggtccgatttggtaactcgcgagaccaggtcctcacatgaaaaaggttcgttcagctaggcattgtcaactgaatcgctctcgcttccctcgacattctcttcttcccctgactcgcgatcaggaacctcccaatcttcccccatctcctcgacttcgatgtcaggggcatgcctcagatgagtaagatgctcttgggcagacaccgtggattcactatcgcgaatctcgattgtccttggtttagcgagttcctgaaccattctccctatctcgtcagaagatagtgaacccagacccgcagctctggcaacaggaacctcctcctcagagattgaggttggtatgaagttgtcgcttttattctgttcgtcagtgaaagcccacctcttgagtcgagcatttggctatatgacaggtcgctcatctgaaagatagaagatcttttcagtgtggtctaagtgtgagaacaacgtaagtgacctcaccctcataaaagacactacccaaaatatagagagttaacctggcatctcaagaaatggctgggtgtatctcaataacctaataatcatgtcgccacatgaatattaaggtattgaggcacacccaccatttcgagaaaactggtcagttacaacatgcgactaagaatacatcgcacatgtacaactaacggtacacctcaagaaaagtatgaggttccccagtatcccaagggacacgcattcctcgcatgagcattgggttaatgggaaatcctcaccgtttcgagaaacctggttagtcctaac

SEQ ID NO: 232904 - DNA, 532 bp, Cannabis indica
ttgaaatttacctgaatagctcagtatactgctcccaaatttgtgactctaactcccaagtcacttcgtcaaccttgttattctgcaatatcattttaacttgcagaatagtcttgtttcgcaacaccttttcccttttgtcaagaacctgtactgattgttcttcatatgacaagtcagtttgaagctcgatatcttcataacataaaacatgagtcataccagacacatactttcaaagcatcgagacgttgaatacgttgtgaactccagatagagcaggaggtaaagctagccgataagctacttgacctactctttcaagaatcttgaacaggccaataaatctgggaatcaacttccttttttccaaaccttcaaattccttttattggggacacccaaaggaagacaaaatctccaaccttgaattcaatatctctatgctttggatcagcgtagctcttttgtcaactctgtgaggcaagcgtatgagctcgaatcttttcaatggcctcatttgttctttgga

SEQ ID NO: 232905 - DNA, 2423 bp, Cannabis indica
ctttgtggtattcgacagggtgatccgttgtcaccttacttgtttattatctgtgccgaaggcttctctagcctcattcatgcatatgaaagtcgtggtttgattaagggatgtagagttgctcgtggagcgcctttttttgtcacatgttgtttgcggacgacagttatatttattgtagggcttccgaggaagaggctaatatgatcttggaaatgcttcgagtctttgaatctgcctctggccaacgaattaattttgctaagtctaaagtgttttatagtacaaatactaatgtcaccatgagggattccatatgtgatcttctaggcatttttgaggctgatgagaacggtacatacctgggcttgcctagcactatggggagaagcaaaatagctattctgggctttttgaaggataagttgcgcaaaagaatccaagggagggagggtcgcttattgtctagagctggtaaggaggtacttttgaagacggttgctcaagcgcttcctaattatgctatgaacgtgtttctccttccggtggacacttgcaaagaaatggaacgacttatgtcaaaattttggtggcaaacaggctcatctcaaagaagacaaattagttggatgagttgggagcgtatgtgtaggcataagttggagggtggtttgggttttcggagcctccgtgattttaacatagctctattggggaaacaaggatggcgtctccttacacaaccttcctctcttgttgctagaatatacaaggctcggtactactcccatggatctttcataacggcaattgttggggacaatccgagcttcatttggagaagcattatggaggcacaaccattagtcttgagtgggattcagcgaagcattggatcggcttcatctgtgagtattctacacgacccttggctcgattgtgtagagaatccgtatgttacaacttctcaccctgcactacaaggccgaactgttgattctctgtttgagattgataggctgggatgtggagttgattcgtgacatttttgactctagagattagcattttatcttgtccatccaattgagtttgacttctgatattgattcatgggcttagaagtttgattctcaaggagtatatacagtcaagagtgcgtatagaaggctgagagagttgaaaggggctactgatggtcctactcatgctggtttttggcgtaagctgtgggacttaaaaatccctccaaaaatcaacaacttcttgtggcgtgctgctactaataccttgcctacttgtgcacagctccagcatcatcatatacctgtcagcagagtttgttccaggtgcgatttggaagatgaaacgacgatgcatgctctggttacatgctctttttctcgggcctgctggaaccgattgggtgttaacctgcaagctactgacgcagctggttttttttgactggttgctggtgctttttgataaggaaagtgtggccattttagaggaagttgcggtgttaagttggtcgatatggaagtcccgtaatgagtttatttggcaaaataaaacctcttctgctggtgccattgtcttttcagcaagaatagttcttgatcaatacaagtttgctcaaacaaggaaagggttatctctttcttctcatcttgatggagggaagaatattgagcattggactacacctgctttaaattgtatcatggttaatgttgatggggcgatttttgagaatgaggagcgttttggaatgggagctattgctcgtgactcggctgggaactttgtggctgctttcaacaccagcttctttggtttggtgcattcggggatggctgagattgtaggcataaaggaggccttgagttggatcaagaaatttccatggcctcaggtggtcctcgaaaccgacagtcttttgtctgttcaatctgttcttagtaatgccattctcccatctcagtttggcttcattgttaacgattgtcgtgtcttactttctgctattagtaatattactttacgttttgttaaacgatctgcaaataaggcagctcattgcattgcaaggagctcttgtttctcttcaggtcgtgatcttcagtggattgattgtcccgctgaattcagtctattgtaatgggtgaaatttcgtattaatgaaattttaaattttattcaaaaaaaaaaatagtttacaaaaaaataaataattcgtaataatttacaatataaaaaataatattaaaacaatctatttcagacgcgtgcaatagactgttttaaccttgtattctgcgtgttaaatttttttaaaattttcaaaattttacaggatgtcttaaataattataacgtacatgaccatgaaaaaaatagactaaaaattatcttgaata

SEQ ID NO: 232906 - DNA, 1998 bp, Cannabis indica
catatcttccagaacattcttgaacattttatcaccattcactggtaagtggatctgacattctttaatccaaatggcatgaccttgtagcagtagatttgttgttagctagaaattatgtgctcttgatcagccacatgcctttttattggttgtagccaaagtatacatccatgaaagttaagagctgatatcccaaggtagcatcaaacatttgatcaatgcacagaagtggaaaatagtcttttggaaaagctttgttaagatctttgaaatctatacacaatctctatttccctttaggctttggtacttgaaccggattggcaagccatatgggatacaaagctttcctgaggaagtcaatgtttctcaacttgtctacttctatttttactgctttttaccttgctggatttggaggtctttgtttttactaaactagttccgcaataagatctacgtctagtgcattcaaaataacatggggactaatgtcggttatatcaatattaatcttggctaacacgtcactgtttgccatgaccgtggaaataatcttttccatcactaccggagacaggttcttccctactcggataaccttggtgggatctccgtcatctatgcatacttttccacttcctccattggttctatgacacgttctatgcaaatttgtggatcaagctcatcttccaagacaaccccttgtgattgctgagaagatgttccagatttagatttacttccttcctgaacgatgataacagttctggttgaaatgttgtagcaactttgcgcacttctttaatctcctctgattgtccctatgcttccagtatctcgcttgggaattttaagtagagatgtcggatggatgtaattactctaaaaaccattaaaaatggtcttcccaagatggcgttataagtagtagggcaattaacaatcacaaacgtgttgtacttgaatgaagatattgtgttgcttctatgaacttccccatttatagtcattggaagttatattttgctcaggggaatcaatgtatctccattaaaaccttacagtcgaatcgaacatggtagcagattggcttccaccagaccaatggcatggaagactcctttaaaaatgattttcacagagcttccattatctatgagtattctggaaactcttttatttgctatttgaccctttattaccaaagggtcattatgaggaaagtgcacgtgcctggaatcatcttttgtaaaagtcattaataaattcatcatccttggacgttgggcaagtgattttaccaagtggcaagctttgcgttgattcaactcgttcacgtaccatttttgtgcattctgagtgcttttagcaatatgtggtttacctgaaatagttgctacatgaccatctaagactggaaatgcagctttggagggtacaaatttctaggaccgagggctgcatctactgtcgttgctaaagcattgtgtgccccctaaagggcttgtgattttggagcttgtattatgcgaagttatggatgacctactccttgaggaggatttatagctccatgttttctcgaaattaaaagctccccgtgtgcaactgcccatcataggtagattactaggatccttacctaattggtcaagtgtctgttccgtaccaatccctcaatttcatcttttgaatagtcacattcatttgtggtgtgaccaatatcaccatgacattcgaactttttgtttggatctcttctttcttttctacctttgtacataggcgaaggcttcatgtagtgcaccatgttacaggttgccttgtatacattttcctaagtacctatgagacttgtgtactcagtgtatcttgattcttgggtttttacttttttgtctgactcactccaattttggacccttcaaactctttttactctgtcgagtgggttatattggacactgcttcacaaaagtcttggtccat

SEQ ID NO: 232907 - DNA, 1000 bp, Cannabis indica
cagaaattagatctgggttgactcaagaataacctctaatgccggcattgttaaccaaagcatcaatccgcccaaacacctcccaagccctctacacagatttctctattgtgggtccatcagcgcacacatcaagctcgactgccatagctctgacgctacttgaagaagaggacgaagtcgatagagtgaggctattgatttcatcacacagggacttaaggcgatcaacgcgacgagcagcagctaagacgcggtaaccggctttagcgagatcgacacaaaagtcgcggccgagaccagaggaggcgctggtcaccatcaccaccttcccctgaaggtccagccaaggctccatgtcgtccaacaatactttgctcgccatagcaaaactttttactgagacgcgaaactgtgaggacgacaaaataaaggaccatatatttatagagagcaatgctgataaaattaacggaatatctaatgggagtatgggaccacagtatatgcgaaaaggtcaaagttataatcctccaatggtgcccttcaatggcgttttcataactcaagcccacatgggaatacccaatgtttttcttctgaatgtagaacaagattgcactgcacagtcctatgatacagcttgtagctggcttttcaaaaatctcataaatcaaaggccttcccatttattctacccttgtttcacaaaatctttactgactctccgcaattctttgatgtcgattacagaaattcaatacaatagtcctataatgtcgtttctctgttgttctatcttatatgcattcttattaggttactgtactttcattttagtatccaagttttgtgtttatttattggtaagaggattgcttaaatgtagggaatatcacaaatatgggtttatttaatacttagaggaattcttgagtcaacctagatctgatttctgaggttttccctttttgggtggtttgatttctggaaaaaaaaa

SEQ ID NO: 232908 - DNA, 1757 bp, Cannabis indica
ttgaggcttgaagtctgtagggacaaatggaaaaatggttggtgcatctaggtattatgagtctggaaggaagaacctctgaactcagaagagacatttcggcaggaaggaaataatccattctgaaaatgaatttcactaaagaagccagaggtttatgaaatctaacaagcttgagccgcccttttatacacgaagttcattgacaagaaagccaaagattgagaaatctaacgactgggagttgtgcagaatatgaataggcgattcataatgactctcaaaaccgtacaactgctagaataaaaggaggtgtcctttccaagaaaggattttggcaaaaatgccctccgtaattattaaaaatctctttttactaaaaaagaactttttaagggacagttgctatactcgaaattcggttggaggacacgtgtcaaggtaaagggaatgtgaatcggtgtaatatctttttatggagtaactcattaattacgtaagtatcagagtatatttgtaacccgctgactgtaaggtcttaggcgagaaatcaatgtacaaactgacacttagtgtattagcgagaaaccatatgtcgctaaaggtaaatagcaaggcaccggagaaaagtgacacataacttagcttgcaataagcaaactaagtgtaacagtcggatcggctcgaagaacaagtatgcgagatgaccatctcgctatgagaagacttcttatagcgtcatccaactaacaggagcgaggcacataaccctagtaagtcagaagatttctgtatgcccgagattgacgtaagacatacattgtcgacctcagaaagaagaatggttctagctcgccgttgggatcactataatcaagtttctgtcgagacatctccagattcaacaattaaacacgtgtttaatccacgatattcttaacccagtaaaagcgggaaaatcacagctatacgattttcaaaatcatacaccgtattacatttcgtgatatgtaatcaaatcacacgattttagggaaatggctgtaaacatattttggtcagctttctaattaactgtcacgatgcaattataaatactggcaaaaaatctcaaaaaagggacgaaaaaactcttatgaaagaggccctgaaaaaaatactcagaaatctgaataagattgactagtggactatgcaaaattttaactgcagaaccacataaaaaaccctgtgttcatattttatttttctatagcttttattttttgtgtgttgaattatcatcgtgaggctcaaatttggttcatgaaaatctgtgttaacactaggttggaaccaatcaacataggttgtggagacgaggcaaaattctaggcgcgcagtggtttggtgagagggtttaatatttttgaaatttaaaagatgaaaaataggatttaatattgtaagagatctgaaatgttagagatgattcgggttaatattgaagaagatgaaaccttcaaatgaaaaaatggagaagagttctgacgacaaagtcgtcagtgatttttctagagagaaaattcctgactgttccaacagctctttttcgaaaaaaaaaatatatttgctgacgatattttcgtcattaatatttatatcaaagtcgtcattgatatggtgtgtcgccattgatgtcaaatttagcaaaaaaaaatatacatttttgtaaagtctttttttggcaagttagttgacaaaataatttttccatt

SEQ ID NO: 232909 - DNA, 1449 bp, Cannabis indica
tactttaactcaaaggttaaaaaacaaaacctacaagtatgagatctagtgctgcgcaaagttatgcctaacatgcgtaacttagcacacggcgtatttggcgataacggggaagggctacctaatcgctcaaaaaaatcaggaatacgacttatcaattattcgatctcgacggtacaaccatcaaaagagcttggaatggaaaaaatttaaagtattactatcaatagtactcacatgtatttatacatagtccatttattttgttaaatgtactaagtatagggggtataaccattaatattgtactattgattatttaacaaaatccatcggctatttcaaccacctctgctccaagaattttgaagtcaaagttaggcagcttggacaaggttgtatatatgtaattagagatggtttgaccatactgcttcttcctgacctccttttcattttcaaggtcgtgaacgagtttgccaactcgtgattctaagagtttgaccttttcctctaccttctccttggctttcccaagatcctcgatgtctttatccttcaaggtcacatcgagctttagcttctttatgccatcttgaagaagtgtgttctgcgtcctcaggaggtcctgctacttagaacctacaacaaaggcttggaagaacatggtcatgaattgtgccaccaattctgcagagcgtggcatcaagtcatcagtaggaaccccctcaaccttaaagacaaactcatcgctcacaaatttgtcctgaagagctatgaagttgtgggccataacagcaggatcgatcacaaccttcttccccttgtcttgagcagatttatgttgtttctttgacgagtcagccacttatgtaggggcagcatcgcttttcctcttctgcgcaatgactggagaagtcgttgtagtaccaaccttaggctttcaattgagagtgggagcttgctttaggaaagtcatttctgcgagaagaccataggataagaatattttcacagcataaaagaacatgaaaatgccaaacacattacctgattaggtctcaatgtctgtttagatagatgcttgtctattctttccttttgtttctcaaaaggctccttgtatacaagttcacgcttaagactggcgttctcggggatgatcctatgttctcacaaatttgcagtagtgcataacagtcgccaatcacgatcttgaacgggcaggctacctaaaacctcaatgatctccctacgagtaaatccaatacaggacgagtagatctatctacgattgataaaaatggacattagcgactatacaaggtaataaaaatatatactaagtgtcaggatacgcgacatactaggtcgacgattgaagtcagtcctaactcctggtactttaaacgcatagaactatttggattttcaatctcccatattgga

SEQ ID NO: 232910 - DNA, 903 bp, Cannabis indica
tatgacatagcatgcacaactctggatatagatcatccttatcaagatttgaaatgtcaacatagttcataaagtttgtaagattggcgcaaaaactcttcaaactatcttcatcagcagacttcaatttctccaaatcaagcaaactcaaaaaatttcttcacacacatttgatgttgttcaaacctaattttaaaaagttcatattttaattaacggtaaatagtggcataagtactcaaagttttaagtttgtaagtggcataatctcaatgtttatttttagcggcataagtacctaatgtttgtaaaattgtaaattttctctaattttgtcagtacaagctatattattttcttaaactggccacacacacatataaggtccaagttcttgatcattgggtctagacataaacatgtagtatcagttacttccaaatattcttttaatatattcaaaacagagtctgtactgacaaaactggaagaaaattacagttttacaaacattgggtacttatgccgctaaatataaacattaagtttatgttgcttataaacttaaaactttgggtacttataccgctatttacctttttatttaattatatacataataatattaaaattaacaaaggtatagatttattcaaacttgatttcaaataaagaaataccttgatcaactatgtagagaaaataattgattttgaataattcttgtaatgatcgcatagtttaatcataagagatttaactgttatgtgattatgtgcttctaagtagaaattagggcttatagtcagaactaggcactactacagaaaccccttttagaggcagtttttaagccctttcagcgtcgattttcgcgaaattcgctaattcctattgcctcaa

SEQ ID NO: 232911 - DNA, 1321 bp, Cannabis indica
atgtctaacttctactttcgtgtcttgttttctcaatcatcaaaacctccacgcattatactttcagtgttagaccactacaccgatcgtgtcacttggcctggcggtagttggtattactcgaagataaaattacaatttgagatattcaaattgttggaaagggtgaaggaatcctctttcaagtaattctttgagagagcacaattacaatttttgggtgcacttatccatcagttgttcaattacaatttttgagtgcacttatccattagtttctcatgcacaagatcaagttggataaggaagacaaagtgtacttttatattgcaaagaagagatgcatattcagctgagctgagtttgctctggtgattgggctaaactttttgctggacctactgagtctaaaattcaagagaaagcatgtttgaacagattcatagtcaagtacttcaatggggatcctgttggaacttattttaccaggatctagatttactaacatgtatgtttaattaacaccctaaatatgaattctctaaataatagaataaacacataaaagtttagaaaaccttacattgatggcagcggaataatatgactcattccgctcagatctctaactcttgttcctttctgttgcagagtaataacaatatctgagcttgcatctccttctatccgtcggtttggttaactaacgtcatccgcactataattgagtacttgacttgctatgtgtgggtatggtactctatcactaaaggctcaaatatgaagaacaataataaggattaaaaatccctatagaaaggagtctctcatctactagttgtcagagaatgaaaaactaggtttaatttggttgaagtgcgttggatgagaatgagagcatcatgttccttttatagtatttcaactagggtttaggatttaattatatggatttaaaagaataaaataatgggcaaaaaccactaagtggtcggccacacttgtgggcctcactagtttgccactttatttcaaccacttatctttctttcaatgatgccatattttttaatttcaatcctatacatgtcaaaattatttatttaataattataattaattatcaaataaaattatcatttattttatttattaattagaccatacaaagtctcctaattaacaactaaactccaaatcttttttctttacaattaagcccttgcttagtgaaaattcataaataaaatatagtctaattttgaaattataattgattaattaaaaccaattaaagagtctgcaagcagtattatctcaa

SEQ ID NO: 232912 - DNA, 629 bp, Cannabis indica
gttgtggaggaagtcccttttgttgggtttcggtgttggcgggtcaggtgggtattgggtgtcgctctttaaggccggttctatggcacctggttttttaggcgaccgattgctgctattggaggctatccgtctctgttgagatggttcttgacgctggttagaggtttttggtggttccgtccttttgggcagagtggtggcgctggtggtggggcttctcttggctctcaccatttcgttttcgaggattctggttggttgtggtcattcttaggcatgtgttttgactttggagtgttgtttttcttcctctttttttagatctcagtgttttctcgtggttactaatactattcaggcgtcttagctctggtgtacaatggttgttgtttagctttcaaagtgttgtagatgtagagggggactcgggtcttacccatagggatgtgcttcccttgtcttaacattttcaccgtttcgaacttgcaatgggaagactgagtgtggacctttctcgtaggaagttggcagcaactctttgcttttggcctggctgttttgggctttcgggcagcctcgtctacgttttggggatgttctttagagttgttctatgttatttattt

SEQ ID NO: 232913 - DNA, 1160 bp, Cannabis indica
gaatggtctgcccttatatagaaaaatcctagtgaagaagttgtgaaccgatttggtaacaatcacttcaggagcatttactttcggacagagttgctgcacaataggattacaaatggtactaggcagatcacccttacagattagtataaatgctaacagttgaaaattttgggcaaaaggaattatggaaattctgaaaattattataaaaacatttcctttacccaaattccttttcaaaaatcgattatgcaaaggtaatttaatgggcaagctgaatttatatctaaaataacctaaaaaatacccatttctctgatgggatttgacagggaataggaaaaggtggaagaaggagttaatacctgtaaggggttgattaatgcttgtacggttcggacttctgggagactggccggagttatggcttaagtgactgggatggttggggcagggcagttcgacgcggctgaggcggcttgggcgagtcgagctgtgctgggtgtctatggaggacgagtcagagccaccaagatcgatagatctggggcttgagaaagattccaccgagtgggaacgcagaggggatgagtgtgaactcattggggatgaaggtgagagtctgttcagactatgcatgtcgagagggagacgaagaagagtctggagagtcacttattaaattctatctcatattttaggatttggtgccaaaaacttgagaaatactacataatgattatcacactattatgacacttttataatagtaagaaattaatgaatgatcatcaccctacacatgcatacattaagataattaaaagaggatgatgaatacatgacatttttttattctcatataaatatgcttttttctgaaacaattctcatcatataaagattagtataataagtaaagtatcgaataaataatcttaaattaaaggaataatgacataagacactaattttttgtaaaatatttacatttttatgtttaaagaatattatttttttttttacatttttacggttttcaaaaaataacacgaaaacaacatagaatcaacaagaaaattacataaaagtaacatcaaaataacatcaaagtaacaacaaaaaataaatatacatataacaaaaatacaataagc

SEQ ID NO: 232914 - DNA, 1572 bp, Cannabis indica
tttatactttaataattttttttatatatttttaggaaaatttatattgcaacacacatagcaactaacaaaataacttaaattgcaaccaaaatttacatagcaatacacatagaaaccactagagcaacccaaattgtaaatttaaaagaaaaattaaaaaatagtacatggagtaattccccttttatttattaattcaaataatattttatatagtttcaataaaaaattaataactatgttgactttgagagttaatatatatcttgtgcattggagcatagtacaaaatttaaaccaaatataatattgagcaatttttgagttaaatttacaattaaatttttactatgcattggagatggtcttatatctcattaaatttggccaaatttaacacaattttaccttttccatttcaaagacttaaccctctttcttcctcccttatttctcttgctctttgaactcactccaaggactcaaatccacaactcaccacccacaatattggtcccttctctccacgaccactgacccaagaacccacggacgtaatgaccactgcaaacctagcgacttctctatcaatcacaatttcaccatcgacaatgttgtcaaaggaataaattgtatgattaatgttgttatctgtgagtagatattagatttagggtcgaaaatgaccaaatctaagttttaggcaaaaaactggtggccagatctaagcttcgggaaagaaattggtttttttgtcaggcccgatggtggtacgatagtggtctgatgccttcctgttgttaaaataagtaaaggttgaagatgaaggtccgatggtagtctgatgataacacgatgatatggtccgatggtagttcgatggtggtctgcttcctgacgagcttaataaatggagattaacatatataaatgtaatatggtctgatgataatccgatagtggtctaatagttgcctgatgctactttttttatgtacaaaaacattaaaaaaatgggtagtatcgaaccactatcggactcccatcgaaccaccatcagtaatggagagtgtagacagtaaagttagaagaaaaaagcaaagagaatggtataatgtgtatgaatataaagtgtgcttatttttataattttaataagcttgtattcaaaaatttaatatacacaaaatacatataaattcaaatttctcattatatatattacgtgtgttggaccaagttttctccatgattttcttaaacatagaaattaagaactactaaataagaatccttcatgatataagtaatccattaataatattattattctctaatttctctaatatatataaatatatttattagactctttcaacgtgcactacacatatatcatatatgcatgaatgagaatcataatagaccaaatggcttcccattacatttacatatatatgtgtgttttaatttcctcaagtgggcaagctcaattgaaaggttcaataataataggtgagagttggtgattcgtggaaacttccatgtattaataaacaaaacatttca

SEQ ID NO: 232915 - DNA, 654 bp, Cannabis indica
ttgcaagtaaattgatagttggggggttttgccgcaaattacccaaattaatatttatagttaaatttgtttagtaaccattcatgggtaatatccattaaaaaattatccatttatatatatgagagagagagagagagataagcaaagcagattccatgtttgcaataggcagcacaggccatcaaaaaaaatgaacaagtgaaatcatgacaaacctgcattcctgttacagactttaagacaccccatatgatatgcttcttaacacgtgagaataatctccgccaagtccccgtaaaatcaacgcgatgaaatgtatccatgggtaacttaagatcattgacaacaaaccttgatccctcataagtaaccagcagctcaacctgcatagaaaaaatatctatattttattggacaagctacattaagagtatcaaataagaaagatgtgacaagcatatgaaaccaacttccaaattagaattgaacgatgttagggttagagaacatttagtgagaacccaccaggaagataatgctagtcgccagaggcgcttcttgcaagaaatcattgaaggcaaacaccatttcttgtgagatgcgactgttggaaatattttaccaggatttagatttactgccaagtatgtt

SEQ ID NO: 232916 - DNA, 619 bp, Cannabis indica
aaaaagagacaaaggtcacttgttttagacttgccttctcccaaatttattagggagcgcctcacttatggtagagggaagccgggtaacatgataaacatcaaattaaaaacataaatacagaataagctcaaaccctgatatatttaggcctagtctaaatccccattagcaaggcactaatataaaatagaaccccattccctagtcaagtcatgaaaagatagatcctcaaagctttttgtcttgtagatccatgttgcagtccagactttaagcttttcccaaaggacgtcaactttgttatcgatgacttcaaaatcctactatttctttctagccaaatagctcaaaatatagccagaatggctgctgtccatattctagaactctcacagcttaagatttagttgttaaaatgagacctcgacaacgataatcatcaaaattttaagattaaattgatcaacaaacaactcgaacatgagttgactacaatcttaatttacataaattaatgacataagaagttgaatttccacactgtcattctatagtacaaacttcaatccaaagcaatcagcaactaccaaaattgaattgaacttactttgtactg

SEQ ID NO: 232917 - DNA, 1124 bp, Cannabis indica
aaagaagcctggagaattacaaacagatgaatatgagaaaggtataaaaagaataatataattataataacaaagccaatgtaccatgaagttatagtccaagctccttgaaagcatctcttttggactcctaagattgagaaaatttcaatcagggggaagaagagtttgaagtttgcgtcaacaggcaactccatatgcttgggaaaattcagacccgacctctcctgctgtggccgacaaggtctcaatggccttgctcaaagaagcagtggcgggggttgcctaaggacgagaagcattggcgtcgaaaacgacttgaggaggaacttgctcttggatcttgttgtcacaaacctcgagatcgatgggctcggccagtgatttcttcttatgggcgatggttttcctttgcctcttaggaggaaccacttcggcagctgtagggacccaagggttggttgtcattttcttcccttttcggtccatgatatcttcataacccatgtctgaaaaacaagacaaggcgttacaattattaaaaaggctgatgaaaaaggggagaatataattttctacctaagggatctaccaaggtcactagaaggtgagctgtcactagatgaaggggcaaagggaccataatatctactaaaatccctacagcctgtaatcttgaatatatcaaaaagctcgattggttctaaatcccagctcgcatctatgtgacctgccctatcttcaatagtaccatattgctcagctatatcataatatgactcgtgacagttaacctagacgtggaatctaggataccaactgtcaaacttatgagcaatgcggtccacgagaagggaattccaaatataaaaattaaggtgggagtcttggaaggtgactaatgtatcacgtttagccctaagtatagtaggagaccaaccacattgattacctcgggatgctccttcactggattcccgaggggcaatgttttgaaggtattgtgcttaggccaagcgattccaggcctggtccccaatcggaacagtaatctgctgccaagaagaatccttggaaatcttgtaatcacaactatattccttgtcagtgagaaggcccaccga

SEQ ID NO: 232918 - DNA, 765 bp, Cannabis indica
ttttagtcataactaactaatccgtcgattccgcaacttaaaattctagactaatcaggtataattctaatttcaaataatccatcttatatcgtagtgacatccttgaccactccatcgagtttccacggccaccacacccgaaaatattttattttagaaatggtatctacgatacccccgtagtccgataaaatctctgtaaataataaattacactttaattgttcctttaataacatttcactaattaatttgtacttagtttaagtaggattataatcctactctaatacccacttaatcacatatttaataaaatatgctcacttagttatcataataattttctaggatattacaccccttttccctgctttctggcaaggttttaatttgaaggtatgatactatgggtgtcatccatattggatggatttccaccatgtttattccttttgagatagggatgctcagttctttagagaatgagtgtgtgcttagctttccttgattaccaaggcattattgggcagtcgagtgagtgcattagctattgtatcttctttaaggactttccctctagtaaagcctttgagctcacttaacaagtcttaaaatcatttttaaattctagtaagtatggtttgtatttgagacactaaattcttatcatttttaaaggcataacatggttattgtcctttttatgaaacttagaaagatgcatgcattagaataacttaatttttgtataaaatattt

SEQ ID NO: 232919 - DNA, 1175 bp, Cannabis indica
tccacattactagagcggtcattacaggcctagttatagtgagatattggagttttccaatgattctcctataaagcttaggatcagcaagcttttcctctccttcttggctaagtttcaagttaacttccataggagtactagcaattttacatcccaattgtcctaaatcttcaaggagttgaagagcatagtgcctttgggatagaaaaatgccttgattagttctagcaatctcaataccaagaaagtatctcaattcaccaaggtctttcaacttgaatctcttatttaggttctcttttaagctcttgacggctgctacatcattactagccaatataacatcatcaacataaacaagaagtatgatgatgattgaaccttttctttgaatgaacaaagaatgatcggatgctgaatgcttgaacccttcttcaactaaagctgtggaaaacttctcaaaccattgtctagaagcttgctttagaccatatatagatttctttaacttgcaaacaacattaggtggcaactcccccttaggacgataccctggaggtagagtcataaaaacctcttcatgcaaatttccatggagaaaagcattgttaacatcaagttgatgtagacaccaaccatgaatggcagcgagagcaagaatgagcttgacagaaacaagcttagtaacaggagcaaaagtctcattatagtcaatcccttcttgttgactataacctttggcaacaagtcttgccttgaacctttcaatgaaaccatcaacattgtactttattttgtaaacccatttgcaacctatagcatgttggccagcaggtaaactaaccacaatccaagtcccattgtcttcaagagcagcaatctcatgatccatagccctatcccaaactggaatgcctttagcttggtaaaaatattctagctcaaaatgacttgaaatggcaagcacagtagcacgaaaccgaggtgacaacctgctatagtcaatgattttggatagaggatgagatgtggaagcctttgacacctgagattgcacattgttagtggaaagaaaacaatgataatcttgaagataagagggcttctgaacctgtctagtggaccgagttgtaataacaggttcatttatagaaacaacatcaggttcaatg

SEQ ID NO: 232920 - DNA, 1716 bp, Cannabis indica
gttgtcaaaatattatctaatttattgtgaatatttaatatgaattaaatataaattttcttgtagtatattgcgctttatggctggtatatttttaagaactattttcttaagagagaaggaattctcttcatggaaagggtgaataaatgatatttcatggtataattatttttaattgattgtgattgatacatttttgtatttctatgtatctataagattttgtaattgttatcctttttttcacaccatgacgtcgcaatgcgtactagtgacacgtgtatgttattctctgcacttgacaatagaaatgtttcgaacagacttcgagtaatacatctgcacagacaaagtttgccagaccgagtagagcaaaggcagatgatgcgaacaacaaatgaagtcatttctccgagcagtgcatcaagacttaacacttcaagattgatatcgtgaagcccaacacaaaaacaatccctcaatcatgggatcgtatcaaagggatatggcaagctgtctgaatccctcatttcatatattctaaatatgtaatgtatattcttaccaattatagatattgtaagcaaaaggaaaaccttccctcatgcatttagccctgtaaatagtgatctattctcactgtaaaaggggccgaaagaattgctttagagagatctaagaaaaaataactgagatattttattgtgagagctttgagagaggaaacattatattctttgttctcaagtcaatacaacctaaggggagtatgttattaccgaactaaaacctctttaaaatcttgtgttctttattgcttactgctttttgctctgtcttaattacatttcttatcgcttattaattgactcactgtcgttggctaaaagcgaggtcaacagtaatccttttatggcatgaaataaagttaaattcgtcattttgactttataagaaaagtttgctaattatgtctgcgctatcactgtagagtgcaattttgtcattgcaaattagggtttattttaggaaagtatcgtacaattgtaaaaacgtgttatggctgtctataggattactttatgctataattaggacctaaagagtagccaaacgaattcatctcttctagtctttgtattattgtactttcattgttcttagaatagggtgaagagcttcattcaccaagagaagaagtcttcgggagaagacttgtccaagacttactttgagaagaagtgaacacactcacatcaaagctgaagggagttcactggttggtgtggttcagaaatcagattagtaaagtaaattacaaaggattacgacaaagctttagagggagtctaaattttgtatttataatttttgtgacttcactaattgattttattctctgggcatgatcccgtagattagtagtgtttgaaagaactctgataccacatataattctcttgtatcaagttctaaattatgcacaatttagttctgttttcgctcacaacctttacaagatgtacgaaggggagtggtctacaatacccctttgacacatcagaaacatctctaagaagctttgcaacctttttggcgccaatcacatctaggaggaaatgaacctttttgccctaaacgtcatccctatctttctcgtacaaggccttcgacttcctcaaggagagtgttcgggacaggacattcttcatt

SEQ ID NO: 232921 - DNA, 1167 bp, Cannabis indica
tattttgtaatttttttttttaggattttcctatactgttaagattttgttcttgtggttgtgcatggtggccgaattttggtcggtattgggggccggatttcggtaataagataaaaatttaaactttaatagtatatatatgtatgtattttatattttattgaatgtgtattgtatgtatacatattttgtaattatatatattgtatgtatatgtatgtatacaaatattgtaattatattgtatattttttatgtatagtatatgtgtatattgaatattttgaacaaatattttgttaaatattgtgaatgagaataacataagagagtattaaaataaaaagtttagaaattaatttctaaaaattagtttagcaattaattctatttttttttattattttttttttcgatttttaattttattcatgtgttttttagtagctagtaaatagttagttacaactacttaacaagttaccaattttcattcttattaatgtatttttattactaactagttagtaatgaattaattacttagtaactagttactcattaattatataactaataagtagttaaaataaagaatattttaattttgtagtactttttacattgtaggttgtgaggtcaatttgtaaggatccggtttatttggtattgattccatttcgaaataaataatgcaacaaactaattgatggagttgtccaaaataaattaaacatttttttttatatatatatatatatataacacttcttaatagtattctattaacgaataaaaaaaaaaattaaattttatgtttaatttagctacttaattaatttagaaaaaatacaagaaaatatttagtttaacactatatacaaaatatacatatatataaaaatatttaagtcaagctgtaactttttttatgctaaagaaataaatatatatattttttattttttttcaacttatgaaacatgcaactcaacccatataatgtaaaaatgaatttatttttttaattagaataaaaatttaaacataaaacttaattttcctcgtaccacctattcatgggtaatacccaatactcattaaaagtacatatgtatttttttatattttctttatataaaatatctatatgtattttttttt

SEQ ID NO: 232922 - DNA, 1700 bp, Cannabis indica
aaaaaaattaactaaaaaactctcacgattaaggatctactagaacaactctttacttaggagtgtacagaaatttccataaatatatatggtggtggtcggtgggtatagatggaccagttgtgctctcttgtctatatgactttatttatgttttaggtcataggttgtttgtgttgtttccatatactttcatttaagtcttctctttatttattaaaaggtacaaattaagtctctttaaggttatttatctccttttatatacttttttaactttaataatttgtacattgcttctagtgttagaattattagtctattttgttgatgttcagattttaaggcaatatatatatatatatattaggtttctttttctataaaaatttgccaaattgtaatatttaatgccaattaagtaatttatatgttgacaactcaataaatgaatcctgctaagtgcgtttggagactgattgtctagtgttggtgaatgctattattaataacatgtaaattctttctcctcttggtttaattgtttcagattatattagtcttatacgatctctttcgatgtttcatattacaattcagtttgttaaacggtgtgggaaccaagcggctaattgattagctcgttcttctggttcatgtcctgaccgtctttcctgtaacggatctgttcctattggtttggaagctattttattaactgatttgcattaataaagttgcaatctttgtttcaaaaaaaaaaataataaatgaattttaccaaagaaaaattttatggggaaaaaaataggaagaataaaaggaaaatgtttttcataaatttgacatgagattttgttaatattttctttagtaattgatctaaatttaataaaattattgttaatttttctaaaaatagaatttttaatttatacaagtccttaactaccctcacaatacacaattttcaattaataaatgaaatcattatcatcacacaatcccattaatctaacttatccatgaatagtatatactatatttttatagcaataatgaatattgatattaaaataaataaataaaaatatatcacaatttattttattttttattagtaaataggacacgtataatggggaaacaaattaagcttccacatggtgagaaaatggattctcatgcatattttatgaacaaaggattaattttgggcacgtactccatcatacattgggtgtttttttagtaagtgtaccacaaatttatatatctaaatatatatatttatataattgcttcttaaattatattttttatttctttttgtactatggtggcttttaaacttttttggagataacataaaaaagaagggaaaaaaaattgtttttgactaaaatagtatagaaagtagagacatctctcatcacaacttgtttatttatttattgattaattttagaagtattatattgtcatatagattaattaatacaatttgggaatatataataattatactcaacatgaaatgaaaacataaatctatgttctcctatgttttgggggagttttattatatgttttctttaatctaatatttaaagaagaaatggctcgatatatactacatattatttatatttataaacgacacattttgaaaatatacttttttgatgataacaatgaaa

SEQ ID NO: 232923 - DNA, 2270 bp, Cannabis indica
tatggtaggaaatgtctctccccaatccactaggatgtaattggtgaaaggaagtacttgggtccacaataagttcaaaagaccaatcaagctataaacaagatcaaggctcggatgcttgcttcacaaagtaggcagaaaagttaggctgattcgaagcgcagagatgatacattttagttaggggaacaggttttcctgtaggtttctgcagtgaagggtattagacgctttgtaaagaggggcaagttaagccataggttcattgggccattttagatactcgagaacgttgggtaggtagcgtatcggctagccttaccaccagcgttatcaggtgtccataatgtatttcatatttcaatgttgaggaaatatgtttcaaacctgactcgtgtcttgagttatgaagcccttgaactacagtcaaacatgtcctacgaggaacaaccagtttaaatcctcgataggaaggaaaaggctcttcgaaataagaccatagctttgatcaatgtgctctggaggaacaacaaggtggagaaagccacctaggagctagagtctgacatgaagattcaatatttgaagagattttgaggacaaaatcttttaaacagcgagataattgtactgactgtattttagaatatggattagtaaaggagattagcgttaattattgatatttttagaattatgcatgcaattatttaattgtaggtcccattattaaaagtgggcactagagttataatttctcaattctagagattttattaaactccagaggtattatttaagttaaatatgaattatgctatttttataatatttgcttggtgacgactgcaaatacggtagatggccatttcagacacataggtaagtctagaaccttttcttagtgggataaatattagagataaatagaatacgggtttgatcagggttataggttttgaacattttacccctagactttaaattgcttaaattataagctaaaagggtattttggtaatttcaaaagtgggattaggtggctacatgggagagtggcagttggccactttatttatttaagcatgggattagttaattaagttttatttatcttaggaaaaataaagatagttaagaaactaaagattttccctttctctctcttccttgctcgacaaccacaagcaccagcaagacttgggatttttctggagtaaattggagaatttttagctgaattccattggttttaagtaaaggtaatcctagaactctaacccttgtgttatttgaagttcttattttggtttgagtatccaaattagtgatttagtggctgttagggtttcagtgaagtgtaatttgatttttaaatttaatttgcgatggagtaggggtcttgttgctggtttcgtagtttggtgtgacggatgcacaagtttgagtttgaaaactcaagcttggttcatccatggaactttttgtttttgtgtgaatttctgggtgctattgcttgaattatgttggttgatgttattataggtattctggaaagtttggtgaggtttggacatgttttgagtagattttggattctttggggaaacttggtgcaaacttgttaaccggtttgctaggtcctgtaaaacttattaaccggttctgggacaggtttcctcaacaatccatttcattaattcgtgtccatttcagagccttggttgggtgattccttgttgcttagggtattgttgctttagttattaatagcagaaccttaagttggaggattgggtttcccggattaggggtttggcgtattatttacccgattatgttatgtgattagggcatccatccggcacaaggtttttcgttcaggtcggctaactcacttaaattcgaaaacaagattagaatagtgtagagcatataatatatatatgggaatgtatgtatgtgtgaaatatatacgcatgcttgttatgcttactacactaccaacatttgtacggaagtagtatatagtgcattgatgtagtgtacaatggttaagagtatgttacggtgttatcagcataagtatggaaaagtacagggtgtgtgtggtatagcacttagtggtactcatgctacgaaacataccctaccaacacttgtacaatgtcggtacgtaatgtatgtggcacaaagcctagatacaagtcagtattatagtatttgttatatgcttttgttactgagtttgtcgactcacagttctactt

SEQ ID NO: 232924 - DNA, 1718 bp, Cannabis indica
actagcatacttttccaatgtccttgaaagaacataacacttatccaaggtgtaagtatactttatcgctgactatcacatcagtgtaaatccagcgtactgatgaatcatgagacattatcttttgaagcatataatcacatgcaattaccatcgactgtattgacatcactgtaattgttaataaatataggttctggatttaacataaattgtatatcaaaccataaacatgaagactacatctaaacaaaaatgatttctaatcttttattgataacaaatcatattatattgaaatgagttttatttagggtataaattccaaacaattcttactactaaatgtgaggttattctggaatagatggttcaaagaattagagtatgaagcttaaggaatctttcatatccaggacgagcaatgttagtcaatttagtgcttatgtctttacatttttattgggctcaactgatgattattgcaaagaaagtccttcagagagtgaatacagtctgtaaaagttttctctagaaaggtttagctaaggcaaacggacctgggcttgtggcttgggatgaaatatatagaccaaatcaatggggggtgtgggattcagaagaattcaaaagaatggaatgaagcatggattggaaaatatgtttgggaaattgcaacaaaacaagactctttatgggtcaaatgggttaatgtcatgtacgtagatcgaaaaagttggaggaattatgagatgccaacaacaagtagctggtattacaaacaagtggtgaaggtaaaagagaaattcaaggcaatggctaccactgttaattactccaatcaataatgctaccgaatcaaagacgttattgaatctctatgccctcctcttcaaaagcaaccatggaaggaggagtttggagtagactctcaattttgaaacacaagaatattctatggctttctgttattgaccctttgaggctaaaagatcgattatttagattcaatatggtgcaagatgaagactgtgttatatgtgaatcaaataaagaaactaaagaatacttgtttttcaattgtcatgtgagtgaggcttgtttaaaaatgataaaaggactggggaattaagaacacttccttgaatggcctaatgaagaagctaacttaaggaggaagtaggtttagaagacaagtgtatactgctacacttgcggcaaaagtttatcagctatggatatagaaatgaagctctttggaatctaaaagtgtatacaacagatgcaatgtgtaaaaagattaaggtggatgtaaagtttagaattaggggatttttacataaaaaaagtttccaagattgatatatatatatatagaatggtttgaaaagttgtaaatattcaggcctattttttaggtgttgtgcattgtaatggtttgaagtggaatgtatacatactcactgattttataaaaaaaaaaaaaaccatataagtactctcgtcctacatcaaaatctatgtctatttctctatagcataatcaatactcactttttaaattttgtattcaaatcataaaatatttaattggtgatcaagcaattaaaaataattaagtacaaataaaatagatacacatggaaaattaggtaagaactaaatcatattaaaactaaaataaagtgccaaacaatctccattaacatcctaataaa

SEQ ID NO: 232925 - DNA, 1373 bp, Cannabis indica
ggctgtcgttggcgtgttggctccggtgagtcaattagaattcgtgaagcgtttggatcccaaaggatcatgtggggcggacgtactccttctcgggtgggccgcacctacaaagggttagtgacctcaaaattgattttggaagatgcaattctgatcttgtggaggagtgttttgacgttggggaggctactgccattttgttcatcccgtgctccttgtttgatagtcaggataggcttatttggtatttctctgataatggttctttctcggttagagtggatattggagcactgtgtctaggttggggtggggccaagctttgggctcctctggtttttctcggtggtggaaaattctttggaagctgaatctcccgcctaagataaaaaaaattgtgtggaaggcatgtctgaatttcatcccggcttatgccaacttatctcgccatggtatgaaggtttcgataatatgtccaatttgctctcagaataacgaaactactattcatgctctgtggctctacccttctcttaagtctattcgctcggattggttgttgagtggcctcgactccttgaaggatgcttcttgctattatgagttgatactggggtgcatggatatcttgaaaagacatgaacttgagcagttgataacccttggctggcgtatttggaataggagaaatacattttcgcatgatcacaagctcctctctgataacatggttagtgcctgggccatggattatctatggaaatatcaagatgctaataatattgagccagctcttatgggtccggtctctggcaatgcaagtaatcgactggcctcaattgagactggtctggttcttggtgagttcaatctttttgtggatgctggggtgtgtgttgagaatcaaaaatagggatgggggctttggtttccaaccgtatggggcatgtcctattcttgagtgcgactccttgtgtgggattgttggaaccgcacgttgccgaagccaaagctttgctctatgggcttccttgctgcgtgcagatggggtatacggtgaatactgtcttttctgattgtcagcgggtagttcttgctgtcaatagcaaggtccattgtctcaatgagtttggtattattctcaatgaaattaatcatattaggaattctttcagtaacatatccatgtcgcattgtaatcggtcaaaaaactatgttgctcattctttagcaaaacgagcattagatttagatgaggctcgggtgtggtggtcgggcttgctcgctgatttagctgtttaaattgcctatcttttgtatcccgatcttttggcttgatgccttttaatagaatttctcagtttcctttt

SEQ ID NO: 232926 - DNA, 894 bp, Cannabis indica
ataaataagactccctagcaacacagtgggaagtcttatttgcagatcgattaacaaaagaaacaaagacattattcaaactagataaaataatacgacagtcctccaccaataatccaaattgggatggcatttgaattgagctattaattgcttgaaccacaactaaagcatcaaactagacaaccaccttaccccaacctttacgctttatccaactcaaagcctccttgatgccaatgacctctgctatttcaggaggaacacaaccccacctactctcagaaatagcttcaaggagcttaccatgattgttacgagcaacacaatcgaacccaaatttttggtgagcctcaaaagtagcaccattgacattcaccttgaccgtaaaagtatcaggtttacgccaacaattactatttgaaatgtctcctgtagcatatagagcattaggagactcaaacttagtaattttccattggccaaggacatgttttaccgactttactacctccaaagcagaccgagatttgttctgctattgcacttcatttcagattttccaaatgctccaacaaaccatggcaacttcagctaccacatcctcacggcagccatcaaaaagatcaaagaaccaactgccaaactcgatctccacaccagcaaccggctgtttgacagcagaaaaagcccagcaagaccgagagaaagagcaatccaaaagcacatggaatattgtctcaacatgcatattacacaaagggcacaagagatcaacattgacatgtttagattgtagttgtacctgttgggttttgtgccctaaataaaacctatttcaatataattagatttacttattaataaagataagaaataatattttatgttgca

SEQ ID NO: 232927 - DNA, 1012 bp, Cannabis indica
caaagccgcttgagcttatacacggtgatatctatggcttaattaaattaaactcatttggtaagagtaaatacttcctcctctttattgatcatttttcaagaaatgtatgggcttttttcttgatggagaaataagaactgttagagaatttcaaaaaattcaaagatctaaagaaagttgtcttgctattaaggccatgagatctaactgaggaggagagttcacatcaaacgagttcaacaaatactgtgaagattatggaatttattatccgttaatagtgccaagatgacccaaacaaaatggagtggcgaagaggaagaatcgaaccatactaaacatggctcgcagcatgctcaaaagcaacataatgccaaaggaattttgggctgaagcgatagcttgcaaagtttacttggtgaatttctctccaacaagaagtgtgtatgagaagaaacctcaagaagcatggaggggaaaaaaacctagaatttctcaccttagagtcttttgaagtattgcttaagttcatgttcctgatcagaagagaatggggcttgatgacaaaagtgagaagtacatattcataggttatgagtcaagatccaaaggatgcaagttgtacaatctaattaccagtaaaactatcatcactcacgacgtaatgtttgatgaagaagattcttggatttggaacacagaagaagatgagtatgattttcttccttacttcgaagagaaagatgtagcagagaaaccaacaatagaagaagaatatccagaacctaatactccattgatctcgcaagttggaaatatacaagaagattcaagtgagagctcaaatgaaaagatgacacactttagaagctttcaagagctttatgaggtaactgagaatcaaaatgatatttctcttatgtgtttatttggtgattgtgaacctctaagctaccaaaaagcagtaagaaaccagaaatagagacatgcaatggatgaagaaatcaat

SEQ ID NO: 232928 - DNA, 856 bp, Cannabis indica
caaccacgagttgtttgtcaagtatgtttgcgtattggtcacactcctatttatcattaccactttgacaagaactggacaactcccaaactagagaagcccccaaatcgtgctatctaacgtagttggagttcgactatgatcctcaggcgtatttcactactcttgtccaagattttggagatgacagtacctggtatgctgatactaaagccactactcatgtcacatttggcaatgcaactcttaaatcacagatggcttataatgaaattgaaacactcagtgttggtgatggtaagaaattcttatctcacatagagtcatgtatgatcaaggacaacacgtagagttaagtatgtgtcacccatccgagcaactagcagaccgaataagtccacgcatgagttgttgttcccacacatacttgaggggtaaatgttatcccaatttttacacaaggtgacgtggcattgagcaaggtgacacgtggagagcattttaagacttggacagagtgtgcttccttgatgttccgttcatgaatgcttatcctcgaaactgattaggtctaagccttcagcaagcaacatccaaacaactcttgtatgtaatcctccgcccagaaggacgcattgaatttagattctcaatgatattttccttaaatatctcctcatttatagtatgtttaaatcttgatgtttgtgggattggttttgcacaactgagagattctagaaattaatgttagtttcctattgttggaattatatttatccaggatcttagatctactcacaagtatgttgatttaacaacctaatattgaacttctaaaacgatgaactaaaca

SEQ ID NO: 232929 - DNA, 1446 bp, Cannabis indica
gttgtaataacatggtaatgtctaggctcataaactctgtatctcctgaaataggacaaagtatcatgtattttgatcttgctacagaaatgtggcatgaccttcaagaaagattcaatgagggcaatggccctagaatctttcagctgcaaacacaactcacccgtttgtagcaaggtgatcaatccgtcaccacatattttacaaagttcaaatccatttgggatgagctaaaagaatttcaacctaatgctgcctgttcttgtggtgccatgaaggtgtttcttaattactataaccaaaaccaggttttacaattcctaaccggccttaatgaatcctatgcctcggttagggctcaaatccttctcaatgaacccatccctaatctctctagggtattctccatgatagtccaagaagaaaggcaaagaacacttggttcatctgatgtttcctctcttgcctcctccgttagaccctcatcttccactaatccctctcgtggcaagaaaccccgaccttcttgcactaactgtggaaaaccagggcattatgtggacaaatgctattttcttcatggatttccaccagggtatggagacaagaaaaagaatgacaaagccaaagctactgccaacaatgtggctgcatcatctacactagatgttgcccccaaatcaccctcaaattgatctttccagccaatgccagcagctgatttctctcctcagccagcggctcagtcacggctccactcgagaagaacaaaacaacaatgcagcagcttctaacatggctggtaacacctcttttgttcaaaaattatcttggatagttgatagtggagctacacatcacatgtgctccaccaagtcttatttttccaagtttaccaacaatacttttccatctaaagtattacttccaaatggcagcaacatccctgttcaaggaattgggactgtccacataaactcccaattaataattcataatgtgttatttgttcctacatttcacattaatttgttttccattccaacatttcttcaaaatcccactaatatggtttttttcaaccatgatttatgtcttttacaggctcattctccgagtgtggtgattgggacagctagaaggcttggacaactctttgttcttctccaagattcccttccaatagtaagttctacttgtatttttgtttctacaaataatggagaccattggcataaacgccttggtcatccctctatgtacatctctaacaatttcaataaagatcatgtttttgattcacatgtttccaagaaccatttttgtcatatttgccatcttgcaaaacaaaaacggctcccatttatatcaaacaacaactttgatgaaaatacatttgaccttatccacatggatatttgggggccctattcaaccatttataag

SEQ ID NO: 232930 - DNA, 579 bp, Cannabis indica
aatagaccagacttttaaatataatatatagcatggaaacttaatacactaaaatatggtttttttttataaagaaaaacttaagattatgggataagttattattaataagaacataaaattcttttaaaattgattgttttattttctttttcaaaatctgaacattttaataaagaaaaaaatcatctgaaacaaaaagttcttataaaattttaattattataaattataatataaatatcataagaaaatactaaaaaaaacaaagagttttacaaaaatattgcattttgggtaaaaatttacatttatactatcatacagaaaaaattacatttatgttgtccttgcctttttttcttttatattgaagacacggaaaattatatatcaagcatctatcttccacactcacgaacagaaccacccagcaacacgagaacatccgaaaaataatcattaattctaacgaggttgagtaaaaatagagaaatcgacgtcaaataaataatcatgacaaaacaattgtaaaataacactaaaacaaatcaaaaaaataaaattaaaaaaaatgat

SEQ ID NO: 232931 - DNA, 1405 bp, Cannabis indica
caactccatgatatttctgattataatggatgtaaacttataaaattttgtgctttaccttcaataaaagtacatctgttctgttgcacccttttgatttagtacactactctaatgtgtggggactctctcatgttgttacaaaaaggggttctcgatactatatttcttttattgacgattacactcatttttgttgagtttttcttataaaacatcgttatgaattttatagtatttatgatcgtttttgagcttatgtcaaaacttaacataatgctgttattaaatattttatatgtgatcaaggtggtgattatactttaaataaatttttaattcactttctgtaaatggaaccgtgtatcaagcttctagtactgatacacctgaacaaaatgatttggctgaaagaaagcataaacacattgttagaactgctcgttctcttttgttgtcatcttctgttcgtagtcagttttggggggaagcagttctaagtacggttcacctaattaatatgattccattttctatcatttcgggtttgtctccttttaagaaactatacggtgttagaattctttatcactcataaaatatgcaataataatattcaattttataggtaaacatattacatataattataagtgtatgattatagatctaaagaatacatttgtagattcaaagagaagaactcatatagcggaagcgtatcctaatccatagatagtgatgatcttagatagtgatgatcttaatccatgttgtagagataatatttgtggtgattttgggtaatgatcttccaagaaaacacgacttaaggttttctaattttctctcttgatgggggaagatgagaatagaattgactcttgtttcttggggaccactaccaatttataacctcatagctaggttattaattttaagtatttctaatttagccccccgataaattagaaatattgcttagggtatctacacatttagcccatgatactttaatacccaatgacccacaattactaaaatgatcactttattttgggccaaacttcaaatagcaatacactagtatacatatcatattaaggatttaatccaacatatggttgtatttctgactattcttctttaagggctcatttggtacgccgtataagggtcgtattgtattaaataataaataacactatgtttggattaaacattgtattgtattaattattacgatcaaattttttaatacaatgtatgttgtattatttaatacataataaatggtttgtattagcttgtattataatatttacaaaggatttggggtcaacaccaatttctgacccgaaccccgaaccagacccagacacggacccagactcgggaccccgga

SEQ ID NO: 232932 - DNA, 1441 bp, Cannabis indica
aacaggtaacaaagtagttggaacagaatccaaattgaaaatacaatcagggtaagatacagaagcttgagcaactcatgagctaccgcatttgctgatcgtcgaataaaataaatagaaacatttcttaaatcattaagcaaaaccttacaatcattaaccacttgaccaaacgtggaaatcatttcaattgaacttcttaaggcttgaaccacagacaaacaatccgtttcgagcaccacctgctgtaatcagctaatttggtacactttttagaatactagtggagtagtatttctcttaagtgcactaaaatataataagacactacttttttagtaagatgacttaatattttagcattgcatcacttatttgcatctctattggaaatacttttaagtgaactacaaaataatattttaattgaatggtgtaaaattggtgagcaaatttggttacaatcatgagagaatatcaaagaatttcacattgataatgtgtgaaaactgatatccaagctcgtggcagactaggtatgtacctagggtccacccacctcatgagcccaattttttttatttaaaaaaatatgtattttttactgattttgaaaattccacattttttttaaaataaagatttttttttttctatgacccataaaattcaggaccgatcctactaatatcatttgtaaaattatagattacttcactcattataatccattttgtgattgaaagttgaaactcttcttcattccatacacctaagagcactctcaatagcttcttcaaattacatcaatcttcaaatttttaaaaaaaaaaacctactaatagtgtgatccaacagatgataaaaaatacctttttattttaaagaagctacattattctttaaaccttctctccatctagagaatgaatatatagtgcttcttcaaatttttttataataatattttagtcatccaacattctttttctctcaagatatttttattagtatcttattatttattgtttaattattaggatttataaaacactcaaagaatatataaatcacagatccaaacatattcctaaaagtgctttaatatagaaaaccctaaatcataaatctataaagcctttgctaaattaaagaagaagaagatgataaaatatgagcggaagcactaacctgaagccattgttggagattgcagagaaggtttttgatcttccaagaatacactattttctagagtattttctctgatggggaaggagagaatacagaacccctagtgtttcttggggaccactacctatttatgaatcatctagataactcttgggtatttataatttggcccctcaacaaattataaattagcttatggtatctacgacattaattccatgacactttaataccctttttgataccc

SEQ ID NO: 232933 - DNA, 876 bp, Cannabis indica
tgttacttttatgttgttttcttgttgattttatgttatttttcgtgttattttttggaaaaccgtacaaatagtaaaaaaaaaaaaaaaaaaacaattctttgcacgtaaaaatgtaaatattttacaaaaaatggtgctttattgtcaaacaatgataatgagtggaaactaaatactatacataagatgattttttattattgtcaattagttttgagataaaatttcatgtatctttaccaaattctaacattgtaccagaaccgcggcttgtaatcaattagttttaagataaaaccacatgcaccttactatatcgagtttgctgataacttttagagaatatatatcactaaccaattatagaataacacgtacacacattcacatgtctcgtttggatgacacgtggggtggcaaaagttgtacttatcttcatgcatacgaacacaattattaccctttcaattttctcttaagaaaatttgtacgtaactgttttcttctgtttaaatgatagccgagatgtactgtacagaaaacaaatagggatttattatttggcattctttatgtcacttaactagggacagagtctataagtatttttcatcatgttgttgcttataacaaatctggggtacccttctagataactctgtccataatgggggtttgtaatttctggtagtagtttggcattttaatgaataatgaaattgatcgggtccctctactagaatatattatgatattagttatttcatgatattagaatatattatgatatattaagtgtgaaagtgaaaagctacataattgtagccacatgggtagaattgtatctcgattctcgattggtcggtggctgta

SEQ ID NO: 232934 - DNA, 1215 bp, Cannabis indica
tataccaaacaactctgtatacaaaaaaaaacaacaactaacataataaatgtgcatccacattaacaaaaatcaaacagaataatacacgaatcagtataaacaaccaagatactaaccttcaatttttttggcaacacaataggggcttcatcacattctgaatcaaaatcatcgtcatctttaacaacactctttaatttcttagagcacctatcgtcagaagaagcctcagatacaccactcctcttcgaaatggcaatattcttatttttcttctccttatcagaatcaacaaccttcgcaccagatccacccatttttttcgaaacttcctctattttttccagcttcttcttcgaaccagacacctccggtgatggatacattgaactcctagtacgcaccataaacgggttaaatgcaaaatcctaacaaaggaaatcctaaaactttgctgaaatgagatgaggggaaatgaaaatagaaaggaaaatgagaaatggaagtgattgagtgatagcttgacagagaaaatgagaagtggtatcgtgtttaacactcaaaccactctcaaacagtaaccgtgtacacgtgtcaaaactaattcaaaaaaaagtggttacttttaccaaataaaaatatattcggtatatacagtaataaaaaacaaaaaaggtctcacagcataattttctctaaaaaaatcctatatatattgattattttaaatttacaaaaactagtaaaatgaatgtctacaactacacattttcatataataagtattgagttataatttctataaataccaacaaaaaaaaaagataacctcacctaaaccatgtaaacgcaaataagtttcataagttttgtcatatttttaatggtttgttttgctgtcctcttttgagaccttctacaaacaaaaatatataaaaatcagtgtaactaaatttacatttaaagacattggtcctattatttttgtacattcatttagtattaattattttgaaatgttttaatctatttcttataatttattattattattaggcatacttatttaggattattattttatttgaaagaataatattttgttatgcaattttttaggccttatttaattttgccagctcattttttggtgtctgtattgtaatttttattccttatgatttaaatgttttatttatggtttttcctttt

SEQ ID NO: 232935 - DNA, 3665 bp, Cannabis indica
gaaaaacgctactagttacatgactaaaattgacatatttcttagcaatcgttgattccacatcaaaatattcatattaaaaaataataaccaaatattttgattattacattagaaaatatattacacaatcagcctttactctttagtaagaataataagcctaagcccaatcccaaagtaagctattttctctcttctctcaattaggtcacaaatttgctcggcaatggagatcgatttgctccaggtgttatggtgctcagatgaccgacaacggcgacatgctctatcgaattttttgtttacttttttcttccagtagcaagtaccgcctctttcagctgctcacaatatcacattctctaggtttgactctggtttcgattttagaggtatcaaatttatgtattcggaagtctcttcatttcaactatggtttgattctggtttcgattttgcaggtatcaaatctatgtgttcaaattttacttcaattcaactatggtttcgaatttaaaggtatggagtttaggtagatatcgaacaacgtatacaatcatccttttctaagtttgtttctttatttctctttcactttaatgtctgcaatctaagatttttttttcttcaaatctatagatctataaattaatctaagatattctctatgctttgctttacttctctttaatggaagagaagaagctaaataaaaacaagaaaaaatggagtaagataactacaattactttggcctatttgagttctatcgttgtttcttctaatcaaatattgtttgtaaagaatattactgctataactgctataacttcacttatatcattaatcaattattgtatgtaaagagtgtacaggtagatttctaagaaactgatgaaagtgaaagttctacttgtgaataagggtgtttttgttctctgcagagtctagtctaggtttatgtttttcatgtttgattaagaaaattagctttcactgctgccaaaaaagataaaaaaaaaaaagctccaaaggtatgttaatatttacttttaaaggtctctagtttgcatgttgaatgattatatttatttatctttaattttattgttcttactggacttgagaaatgatttgtgctctttttctttttggcagagtatttttagagaagaattacaaggatttagatacattgaaccccaaatttcctatcttgatccacagatgtaggtttaacctaacttatgggcaagatatgctattcttttactcttgtctttctaatttatgccatgattctttgaagtaaattccttggtttgacagagagtgcagggtcattgacaagaatgatagatgatgaagagagaaaagatgcatgctttggtgggtcgattagcagagaatggaagccaaaattattgatcctgatacttctaacccattgcctcctaatcaaagaggagagctttggcttagaggtcccttcattatgaaaggtgtatataattatttttataataatccaggttttgttataaaatttgggatggaaatttaaacaataaacttaccattgatgcagattatgttggtaatgaaagcaagaagtattctagctaaagctcttagattttctcgtgggaatggttatgtttgccaaattcttgcattgcttgaagttaaatcgcattgagcagactcgatatctatctatttgagcaaaccagcgagtgtaatcccagaagttgtggcagttggctggtgagtcttgggggattcttctcttagccaaagtaactatttgagtgaatcttaatgattgatattttttcattgcttctgagacaggcatgggcacaaatggagatgcagcagaaaaataacctagctgctagacaactctttgaggtgactatttcttatctctaaattgtagcattccattgcatctcttttcattttagatgaattcaaatctagtaacaacttaagaattatgttgaactttaatctagaatgttataattgattaaattgtttctttgtagtctaatgtaaagtaataaatgtatttggtgcaggatctactgaattggaacatttacttcactcccatctcacattgttgatgcagctgtgattatgtaactactgtgatcttgaaaagttatcacgccaagttttgtttttttttctttactgattgaagagatagcttcaaacagaggatgtttgggtcttttggagattgatgagttatttttgtgagatacatgtgttctctcaatttctatactggcccatactgtcattcacaaatattttatttatttattttttttttttgacgagtgtaaccaacagatgaaacatgaaaatcaggttacaatgcttaagttgggacaaaaatccttccaaactaatttctcatctagccctaaagcatttcgcgccatgtgatgagcataagtatttgaatctctcggcacaaaacagataaaagcagtagggatatgagacaaggaactcccgatatcccccacaatattagcaagagcagaaagctccttcttagagctatttattttgttgattagctgcttggactcagtgaatatacttgcaagtggaattcgaatactgcagcaccaatctagggctgatttaagagccatagcttttgccatgagaggtgagacttgagctggtataggtgatgaaattcctgctattgcctttccaatccaatctttaacaatagcaccaagcccaatcctgaagtgctttgtatcagtggcagcatctgtatacaattgataatgcccttctttaggatggctctgatctgttgctgcgaatggcaggctacttcagcatcaattctcttggactgtgcattcttgtattgcagtaagtaattgctagcccactgcactaaatcccctacatccaaatgaccattcttgaaaagttttttgtttctatattcccaaatagtccataaaatacacattagtagagaaaaatcatctttatttaaatcagtaaaaccagatagaataaattccctaacatctttatttttatgcaaaagataaaagtgatataaaggagaaagcttccaaacctgtcttgccctgaaacaatctagtagtgaatgagttacagtttcaacaggacaactacaaaaggagcaagaaggagagggaactatttttttaagaaaaagattataagctgtaggaagaatatgataaaaggtcctccacccaaagtttttcattttgggaggaatacagagattccaaaatttcttccaccagttattgtaaaaagttatattagaagatgagggtggcaaagacactgtattaaccagatgataagcagacttaacagtacgaagaccataagggtctcctttccaaatcaggctgtcatttttattatgtccccctatagggacttgaaggatgttggcaacagtggcactatcaaagtaggtgaaaagtttatgtttgttccagtgcccattagaattgatgaagaattgaactctatcagagggaggaagttgattattattgtacctaaggaccctttgattaggaacccaaggatcctggagggtacggatgagagctccattcccaact

SEQ ID NO: 232936 - DNA, 1271 bp, Cannabis indica
ggtaatgaccgtatctttatctcgatcataatcgagtcataaatgatgataatcgtttctcacttaacatgcttagtggtgcatttgactttcttacctcagtccagtaatcaggtgtgtgcatcgacctgagtagaaataaagctcgatgatcatgagccctatgtcacgacaacaaaactcggtaaacaacttaaccaaattttgacacgaaccccaataccaaaatcggaccaaacctaaccttaattggctcaaaatagaccatacaacacctaaataccttaaactatctcacgtaaaacaccccgagccaaaaaccaacctcgaagaaaattgggattttcccctacagacttactggtcaaccggttcttccataccagtagaaccgatcgaccggttcttccaggtaagaaaatctctggttttcttccccaaaactccaccaaacctattcaaactctccagaataattctatatcataaaaacaatgcattccatcaaacaatccacaacaattcatcaatttaaacaaaataccaaagttaagtgaaattaagctcattaaacctcatctcctccaaaccatgcctaatagccctatttctaaccaattcaagcttaaacaaaccttaaatcaaacctaaaatcatattctaaactcaattcatacctcagtcccgaaatcatacaagcctaacccaaaacctaacttgaaacttaagaaatccaaaaaaaaaaaaacaccatagaggaagcttacctcaaagcttgaacaacctttaaatctttctaaaccagctgagaattgacaattttgatgaagaaacttcccctattctgctagtttcaagggttgtcgaaggaagaggaaggaaaacggtggttttcctttgatttcttgatttttcttaattactagattttgtttttaataacttagtaattaaaaattattttcagcctagtaaactctaataggttgttttgttgtattttcaatttttagtttttaaaaaatatttttaaaagtgagaacagaaaacaggtttttgtcattttaaaaactaaatagtgcttggctaatattttcttaaaaatagtttttaaacaacaaaaactgaaaacatgtttggatagtaaaaataacatgtttttaaaattatttttttaaaaaatatatatttttaaaaacaaaaatatatatatatattactattctttctttcattgttgtgtttttctttcttttgaaaaataaacatca

SEQ ID NO: 232937 - DNA, 802 bp, Cannabis indica
tcatagtcaataccaggtgtttgtaagtaaccttttgcaactaacctggatttatacgtatttagagaaccatcaacattaagtttaaaccgagagacccacttattatcaataacatgcatatgtggctgatagggtacaagcgtccaagttttttatttactcaaggcagtattttctttttgcattgattgaaagcactttggatccgtgagagcttgctaaacaaaccttggtttagtaggaaagagagattcaacaagtggatgtcttgttgataggtaggccttaggtttataaatcccactttgagaccttgttttcattttgtgaattcttgagtcatgtgttgtatgaacaggctgcacaccagagcttgaggtattatgattagtagcatgtagttgctgagctggtacatcaaattgcataggctgttgtgatgtatttttagtatgaggatgaggagcagatgttggtgatgtggttgggggcacaccggaaaaaaattggattattactatgggtggagtattggtgttggatataggtaggtatgtttctgagttttgtgaaggcataggtgaaatagacacagaagtgtttgtgttctgtaggttgggactaggggatgggagtaacggttctcggatgggtagtggtgaaacctgagttggtaacggggtggcagggtgggtgattgatatggtatagttgtttgagtggacagggtattaagagaggtggtgggtggtaaatctgctatgggtgcttgtgttaacaggttgatattggtgttgtg

SEQ ID NO: 232938 - DNA, 657 bp, Cannabis indica
cggcgggcgggggggggggggggggcaccaagcttcttccagatacggggaaggagatggtgaataagaatctctgtaatctgcatacgagtaataaatataatcaacaatctggtaaatgttggacacacttcgattgtgtaccttatcattccgcgcccgccaaatagtatcgacaacaatcgaagcatacagaaacacttcatcgtattaatgccttgttttcctagaccccagatgaatttgatccagtcccacgcgaatgcctgagtcagaaattgggaagatcccccagggggacgattgccatagatgagtcgcccaattacagttgagaaataagggctccaaaatttcctcaccaatgccacattagtcttagttgttaactctttttgttttaattaaaagatggtgtgtgttaggggatgagttatatttgttctaggggttgatgtggcaattattttatggcaccataaagtatataaggagaggggttctcttaaaaggtattgagaaaattggtaagagtcgagattcaatgtggagagccccaatcctctcgaatagattgtaataggacagaacaagcctctcgaaagcttgtgatttttaattttttccatcaattcaataaagtttctgcaagaattt

SEQ ID NO: 232939 - DNA, 1027 bp, Cannabis indica
acttaattatagatttttaaatatatttagatgatattagcgttaatttaatcattgtgactatacagatttgtaaaaaatttaaaaattaatgcaagggaaaaattgcaaaaaaatctatttttttcctattattctaatgtagcgactaaaaaaaacctttactgaaaaaatctaaaaacggtctctagtactataaggcacgatttaaaactgtcgcctataataaggtataggcgacggtttaaaactatcgttaattctacattggcaaaggttttgaactgtcgcctattcttccagttttgcgatggtcgtataggcgatagttatagaaaccgatgagaatactttaaacgactgttttaaaacgtcgagaaaaagtacttttatagtagttatattaatgattggtatggtaatgtaagaaagaaaaatagcattttggtactttaaccacaagaaaaaaaatagtacttaagtagaagaaaattgtactttcaattaaaaagaaaagtatgaatcaataaaaaaaaaatagtagaattttgtaaattttaatactttagccaaaatttcccaaataagtaataaatgtaatgattttcaattctttaacctcttactattcacacgcacgccaacgagacgtgtgttttaaaagtgttatatcaatgcgagtatgcgttatgattatctgagttgaagactttggaaagatttactatcacttaaaaggcaatatccaaaggactaccaacgaactcaatttcgttttgagaagataaggatgttatacaaaaagcataactaattattagcacatttatgaacaaacctaattatttggtctcaaggtcaacgtctcaaagccgaacaaccatatgaagtgaagatcaagattgattagatatcctgttccaataacaatattaaataaataaataaagattggatgagtatctacttaaccgatttagatgggttaggtttgtgatttgtaaaaaaaaaaaatcttacaaaaaat

SEQ ID NO: 232940 - DNA, 2586 bp, Cannabis indica
tgtctcgagtctggttccatttttgggtctgagttcgggtctaggtttgggtctcgagtctaggtctgggttgggatccgggtcagggtcccagttcgggtctaggtcagggtttgagtctgagtcctagtcaggttatggttctaggtctaggtcgaggtctggttaagcttccaggtccaggtccaagtcctggttcggtcctgttcctcggtcctgatctacgtccggtttcggttccaatttcgggtcatagggtacgggttcggttccaagtttgggtcagggactaggttcggtcctcgtctgggttcaggtcagggtcctggtctaggttcaggtctggggctgggtctcaaatccagacaccgactgcgggttcggtccaagcctcgggttcaaattcgaatcctgatctggttccattttgggtgccgagttacgagctggtacctaggttcatgtccgagtcttgtatcgggtcttagctcccggtcctagttccgttgccgaagtccctatcatgattctgggtccagctcccagttttggtcaagatttgggtcccagtctaggtttcggtttgggtcctcgttgcggttcgagtttgggtctctttctgggttttcatttgggtttgggttcaggtttgggtccttgtcgtggtcgttgtcctattcttagtctggttccagttccaattgcgatttccagttcgagtttgggttcgatgttaggtcggggttggagtcttggtccgactttgggttcgggtccgaatctcggtctaggtctggatcgagctctcggtgtgggttagggggctgggtttgggtccaggttcgggtctgagtactaggtttttatctcgatttgagttcgggtttaagtttaggtctaagtcttgattctgatcccggtctgtgtttgaatttgggtcttggtgcaggactaggtttaggtcttattctgggtctagggtcttagtttgggtcccgcgatttggtctgggttctggtttggtcttggtatgggttcatgtctaggttcctgtcctggtctgggtcctatgcagtttttgggtacggggttgggtccgacttcagatttcgggtctaggttaggtcctggttatggttcgagtcccggatttagatctggatccctcatccaagtcgggttcttaggtcctaatatgggcctaggttcgggttcggttattgagtcttggttttagtctagatcccagtctgggttccggtccaggtctcggtcctagtcttggttcgggttaaggtttgggtccttctcagggtctggatcctggtctgggtcacgggtctaaggtctctatgcgggtttaggaccatctcaggtcaaggtcacggttcgggtgcgggtctaggttcgtgtcccaagtctcaagtcccagtcgtagtcaaagtctcggccaaggttctggtatgagtttgggttatggtttgggtttggttttggtctcaggtatgggtcctagtcacagttacagttctaattccgggtcttggtttggttctgggtccgggtctgggtccaagttgcagttggggtcccagtcttagtctgagtcttggtatgggttcttcgaatcccgatctgggtccaggttcgggtcttgggtctggctcccaggttcgggtctgggtcctaggttcgggtctggatctgtggctaggacagggtccaggtcccgtgtttcgatcccggtctagatctgggtctgggtcggtattcgggtccaagtttaggttcgtgtccatgtcatggtctgaatcaaaatttaggttaggggattggtttgggtctgggatgaagtctcgagtttgtgttcgggttcaagttcgattcgcaatcctagtctgggttcgggatcgggtctagttataggtctgggtctatgtccgagcccgagtttcggggctgggttctggtatagtttcaggtcccggtcaaggtctaggtcttggccacgacccaagccttttagggtcttggccacgttctagtacaagtttcggtttcgtgtcttaggtctgagtctgggtccaggtcctagtccagcttcgggtccttctctgagtccaggtcctagtctagcttcaggtccttctttgagtcctagatcaagaatcgactatgggtcttgtccaagtccagcttcgggtccttctctgaatcccaatcacgggtcccaatcttgtttcggttcattttccatgtcccggtctaggtctcattctagttccaggtactaagactttagggtgcagttccgggcctcaattacccaattctgggtccctagtcttgttccatgttcgggtcttgtagttcaagtctgggttcgtgtctcgagtcctagttcaggtttttattcaattttgggacccaatccgttggtgggtctgtgtctgagtccaggtactagtccggtcgacaattttgggttctgggtccaggtcctggtcctgctcatgctcctgctcctgagtcccgatccgcttctggtttcgattatagtttcaagtcacggggtacgggttcggg

SEQ ID NO: 232941 - DNA, 639 bp, Cannabis indica
ctccagataacgtgatctgggtacgcggtgctatgaaacccttaggcacaggaattgtgattatatcacgtttatctttgaggttcaggaattcaacaaccatccattttagcgatttagggattttgtccatcttttttttcgataataattcatcttctcgtgcacgaccgctttgtggagaaagcatgggagctttatcaatcttcatatatatggacacttaagaaaactaattttttttaaaagatttatcaatcttcatacatatgattagcctggtgtctaatcataatctcacaaggttctaaggacactaatgactttaacaagtatcttacaagtgaacaatatgctctctatttatagattttcagtctcatttgaatataaatgaccaccttaaaacttttagtattacgaatgcaaatggacatttatatacttaaatgagtagtttgagagttatgggagctgttataaaagttgagcacaacattctttaaaaaaatcaaaactacatgctataaattgatcaggaggcatgtcacctatagtggttcatcaccattttcataattttgattaggttatgttttatatttttttaacttattagtatgtaaatggattcatttt

SEQ ID NO: 232942 - DNA, 863 bp, Cannabis indica
gtgaaagagcatttcgaagagctaaaaaagccattagctcagcccccactcctaatcaaaaaccctctggacaatgaagaattaggcatatacttagggttgtcataaaatatgttgtgagtgcagtcctaataagagaagaagatggcatctagaatcagtttatatgtaagcaaaaggcttatgacattgaaagttgatacccaatcatggagaagcagacatactacttgctcttagaatcaagaaagctaaggccagacttccaagctcaccaaataaaggtctacattgactagtcgttatgaccaagtgttagagaaacctgaagcatcctactgactacttaagtgggccttcgagcttggccaatttgagatcacataccaataaagaatggcaataaaaggccaagatctcgccgactttgtggttgaatgtacgggcatatctcctaaaatctctcaagatttaggaaaaatgtaagagctaaagaagaagcgagagcaagagtagaagcaagagcacaaagattcaacctagaggttgcatgttggcggaagctacactgaccatctgtccggtgcaggcactgccctcattacacttggggacaacagctacacgggccaatcaagttcactttcaaagcctccaacaatgaggctaaatatgaagttttgattgtttgcctcaggctagcacacaaagtacgagacgaccatctagacatgtacaatgacacttaactggttataaatcaagtcttaggtgagtatacagcctaaggcgaaagaatgatagcctatttgagaaaaattcaagactcattaagtcggttcaaaggctatactataaggcaa

SEQ ID NO: 232943 - DNA, 670 bp, Cannabis indica
ttattaagttttattttagttttggtaaaaaaaaaaaagggcttaatagagaaagtgtaaggttttgctgaagttttgcaggaactttgctgcagtaaaagtagcaagggtgattgttgaactaatgttgaaaaagatgacgtggcaaaaaatagctgaggtggcatgaatacatgtggattgtgacaaatttgtgaggaaatctctagaaaattcctagggcacatgaggaataaatttttatgaagatatttttgtgaaaaagaggggagaatataacctagcctccattacaccattgagagggaagaacacaattcttggcagccattattcaaagaaactcaagaagatgaagaagaagaaaaggaaaaaatggaggagaagtacaagaaatgaaagagactgagattaggctaatagtttgctctctttagcttttactcttcttgtattttattttctatttctataataaatgatagaattttggatatttttgtatttttttagcatgaactaatttatcttagttagaacttttaatgaaccgtggattgtgaattttgttgatattttatgaatattttggtaagaaagttttgttcattcaaggatgcctaaagtttgtctacctacttttgcttgatcactaattgtaggttgttag

SEQ ID NO: 232944 - DNA, 1519 bp, Cannabis indica
ttttttttcttcttttcattctctctttttgttgatttctccttcttcatatgatttgtagttattttcttcttattgtgcaaccccccccaacaccctcacaacttctttgttcagggtacaactgtaattttagtcaaagcaaaagggtggtcagtgggtggtggttggcttataccataatgtttcaataatatatcaataatgaagaataagaagtttccttttgtgatatatttattgtatataaaaagtgacaatattgtatgctttggttcttttttgttttattcttaagtgggatgggattccaaagtaggctgaagcacatggtaagagaatttcaatgactaagcatgatgttgttcctatcgaaatagggactcaaggaaggttttatgtggtatatgatttccatgacatggacaaagtgattttcctgtaaataaatgaaactttaggaatggatttttttttattcttcaagagcatccattaactatttcctcttaatgacattatttctaaaagcactactggtgcttattgtctagtactttttttctgtgttatactgctattagtgtaattaaatattggatttcatataattttatgcaacttaaagtagaacatataaaagtaagatacccattattggagtgataagtcaaatctttattgaatttgatttctctttaaaaaaggctcgtatattttcggcagtacctccagtgaatactccatcggtataaaagtagacatgtcaaaaagatccaattaattggagcggatcagagctccgatctgacatatcacttgtgattcgaaatatttggatacttattagatttcagattagatccgttccatcccacctatttttcatatgtttcaatatatttcaaaaaaacttaattcaagaatctgacccccaacccgaactcgaattccttgagacttgagatcaaacccgaaccccgacccgagaccctagacccgggactcgaacctggacctagaccctgacccaatcccgagactagacccaaacttgaacctgagaccggactcggacccaaacttgggacccgaattggacccaaactcagacccgaacccagacttagacccaggacccggaccaagactcaggatccatacctaaacccgagacctagactcgagacttaaacttgaatcgggacctgaaacagggacccagacccggacttgagactcgagacttgtacccaggcccgaacccgaactcgaaacagggacccaaacccgaactcgggagcctgatccagaacggggacccagacccaaacccggatccgaacacaagacctaggacctagactcggacttgggacctgacctgaactcaagcccgggactcggacccaagactcgagacccaagcctgagacttaagatccggacccaggaccaggacacgagacccgagacccaaactagggccaagacctgaactcgagactcgaaacccaaa

SEQ ID NO: 232945 - DNA, 1452 bp, Cannabis indica
cgttttacatcaaaactttgttctattagagcattcctaatattcacttctcagatttcatattaggatcataaatcatattaaagatggccagtctaaaacatgtaattaacacaaataagaacaaatcacacaatcaaggaaaggaaactaataatcacattaactaaattgggaaaactttaactaacattcatcaatccctaaattggcagtttagttaatattcatatccataataaaactgaaattgaatttaacacaaaagaaataaaaggagaagaaagaaactgacggtggaatgaattgtcctttacttcttctagggctaaaattctgagtccctacttccttacttgaagtccctttaaatagagtcagtcaaaacttcaaaaatcgagaaaagatgaacttggcctcgagaagtacagacattctcgctcaaccatgaaatgcctcgccgcggcgagatcataacccaactttcaatactccttgccaagatctggccacggccatgaataaatgtgccgcggcgaggactgctttggccgcgggcaccactaatctcgccacggccactgggccaatcaaagatcttccattctggcacattctagctgcagccacgaataaatttgtcgtggcgaagattgcaccgaatgctattttttcaatttaacttcactcgcctcggtcctttatcacacttttgaagctccagacttttacaaccattggaagcctaaaaatacagaaaacaagcgtaattccatcctaaaaacataaaaaaaaaaactttaattaatacccaaaacctaggctaaaaatagcataacaaatttccccaaactaattctttactcgtcctcgagtaggactaactaaacaactaacacctactagataaccaagactccacataatcaatttaccaatgccacttatgaaacttcaatcaataagttaacaagaatttcaattgaataaactccaacaattaacttagatgcttccttcaaataacaatgtaacaccctcactaacttaggcatgttagcgtgatttttaaagtactgtacagctcgttgctaatcaacgaggttatcgaaaattgtgattaattaaacttttgcttatttaatcaaaatcataaagttacatgcatataaaattccgggatcccgtttacgaaaacatttacaaaagtttaactgtaaatatacaaaagtctgtcgcctagcgactatacagcaaaaaccctgatgtcccaaagatcatacgctccaagcctaaccgtctcgacatgtacaacctccatctgctcgctctcacggttgctcagccttagccttacccttatctacacatggaaatagcaactatgagtcaacagactcagtaagaaaagcataacataaaacataacaatatcccgggttataatcaggc

SEQ ID NO: 232946 - DNA, 850 bp, Cannabis indica
tggtattggagaaagctcataaacctaaggggctgcttctctcttagggacatctatgaggcaggttgcacaggtaaattcaaaatcagtttgctatatgattgttttttatctgactcaacaagagttacatttgatcgagttgtttggtctcgtatgtataccgaaacataaattcatattgtggcaagctttacgctcacatcttctcactagagaccaccttgctagtaggaatatttctattgattcagacttctgccctgttagtgaaacttccgaggaagaccatgggcacttgttctttgattgtgttttctctacaagggtgattagctgagtagagcaatagctaagtttgaacttttgagaagagtcacagagagctcgctctatttcaacagagttgaagtatgtagccttagctggtgtggtttatagcatttgaattagaaaaaacttttgtatttttgaacggaagggtttgccaataaattgtatagataaaataattagagtgtcaaagttcatttattatttgcaaatagagggaataattctaaaattcaaaaaatgactaagatgtatataagtcaactttagtttttttggagcggatttttattggctttgttttggttgtaaattacccagttgattaatgaagttctttgatcaaaaaaaatatatagtcagcacgagaaactcaagtagcaaataaatacacatgatttctgactgttaaagcatatgcgacaaaacaaacaccaaaaattccttccaaagaagagttgtgatcaataaactgtttattttatatacaattaaagcccaggctgtaaagtgagtg

SEQ ID NO: 232947 - DNA, 1050 bp, Cannabis indica
cttatgccgctatttacctttaactaaataacaacgcaccacatgaaccatagtagatatatagagggatcaaccaccctaatacaaatcagaccaattttattcaagaactaattaaaaataaacaattttaactaaacaagaactaataatattactacaatttttagatttctaagagtgtccttatcaattcatgtacgacgaacggccaatacagctgtacataaattagttatccatgctctttagatagataaacaacttatagcatgcatgatattatttatgttgctaacttatattgaatttttgaatttttttgcacgatacctattaagttgctaacttagttttaatctccactattattatgatatcgacaacaatgaacattctgagacaattacaaacattgcatggtctgaaatagcaaataattataagaaatgcaagttgttaagacatgtgcatttcaaaaaatactacaaaaagtcctgctaactttgataatgttgttgcccacccgcctagtgatattactccaaaggattggctttctctttgtaatttcttcaccagtccatagtttattgcttgttctaaaattaatgcggaaaaaaaaaaaaagatgtagtaccctacaacacagggatcgaaatctatggctgagaggcgttttgaaaaagtaagttaaaagatttatttaattaagttattaatttgtgtagattttctatttttttcttttaatttcttttagaagagtaagggttacattgagactggaaggatgttcatgtgtcgaaaagacaaatacatttgttagtccattgggtgcagaaaaatatgtaatatgttctaaataaaatactctcatgtatgtttataatgttttctaacttatatccttaatagagggtgagcttgtttcaacttatgaaaaataagccagtactcatgatgctggacctattgaggagattgaaatgagagtactcaatgaagtatttggtgagaggtgtggtcataatcgaggagtggggagaa

SEQ ID NO: 232948 - DNA, 729 bp, Cannabis indica
tcaaattcttatggagcctgaaggaaaaaggggtggaaatccaagatttgtttctgtatgcttcaattgtagtggatacaatatgaaaaacccgtaacgagacagttcatattaattctatatgtaatattaagcattttattgactctatttctatatgttacgcagattttagttcttgtctgtttccttcgccgatgacaattgtgactcctgtttggtctcccactctagaagattgggtcaaaatcaacagtgacgttaaaattggttgtgactcaatgtgcgtgttggttttggctagagaccacacagggtcagttttgtgggtggctatcaacatgctcaacttctctgacccactcattggagaagcagcgacctatttcttagccctgtaatcaacgatcctttggaacattcgtttgtgataattgagagtgattctgagacggtgatcaacacgttgaaggggacttgttgtgtttggagtattggtaactatgtgcttcaatgtaaaaatctttcaaaccttttgattagttgtaaattttcgtttatttctagactgtgtaattttgcggcccataatgtggctaagtgagcttttgccagtaatgtaactggtatgatcgatccgtcttccataccagataaattattatgtaatgaccatgaaatttaaagttttcgagttttaataatctacgcattttattaaaaaaaaaa

SEQ ID NO: 232949 - DNA, 1186 bp, Cannabis indica
agaattatagtggttcagtcaaagtttggtctgcttagttcacttttggtaatgatttctacttagtttatttgatttggatcactcttttatatagagagcaagtgtcccttaagcccttaagattatatagctgatcgatttagaactgtttttacaataaatgataatattaaatcaaaataaacatttaagggataaataaagaacaatttcatccattcttgaattaagtgcaacaacgtatgcgactttatatttcgcaagttgtccgttcatattccaacataagatcttgcaggctctacggtgttgtactcgaaaaatggcgtttgaacctatcgtttgaatgtctacgctcatcatgatcgcataatcggacattccatgcattgacaacgtggaacacgcgagtccctaacgagtcgttgaacacattagtcattcaaaccaaacttatgtaaagaaataatctttactagtcgtaagagaggtttacttggtcatcgcaaataatcgatatatgcgcgactagtattaactcctcccagtcctgcttattctttcagctatgcgatgcatagtatgcgactagaccttgtctcgctcgcatcttcttccaagttcacatcaagcgaggttagctctactggagctattttattaacacatcatcctttctatcggtaactgggtccacgtgtcatttttatacgagcgtgtactcgtatttttaggcaaaaaatttgtactataacaataatatattgaaatttataagttatgtaatgatttattagtttggaatgtatttatattactaaatattagtttaaattatatttaaaatcacataaaaaaattacatatacaaaaggaccattttttttaatttattaaaactttctttggcccactttttttagggttcacttatctttggaccatgccaagtgtcacgggctcaccttttcaggcagcggaacacccgtgcggcaccttgacttctataagccaaggttagccttccaaccatccgagtaacaatgggctcatttttcgcgcgaccgtgtgcctcgtgcacacttccgtctctcgaataactcctgccgagtcatgctcgcaagcatccatgagtgcatccacgcatcgaggctctctagccaagatactcgcactgtccata

SEQ ID NO: 232950 - DNA, 1305 bp, Cannabis indica
gccattttttgccttattagacctttgccaccaaaacttattcatagttttctccatatcgcgggtgatatccaatggtaataagaatacactcattgcatagcttggaaaatgtttagttgatttgcaaacaaatggaatcaatacatgttctagttcaaagcaataaacaatgggatgagactaatcagtacattagttttgaagctacatggatacgcatccaaaaaaactacaaatatacagaattagtggacggactgttgaaaaaatataacttcagtagaaactcaagtaccctacaaatgccgtttcagatacagtttggatatccagcgttaaagatcacgaatgatgaaagcctggagtttgacttgcagttaaaatcaacagaaaaggacatgacaaaacatcctttgtgcataagtatggtccccaacacaaaaacaatatcacaattacctttttaactgaggttaacacacgacatgaagtccacatgcttgaatatggaattcagtcaggggaaacaccaacacatgcatcaacaaaaagaaaacaaaatagaagataatgatggatttgactttgttgactatgcaaaaatattactgcagaaatggtagctcaactaacaagatagacaaatgatcaacaagaaagccacgatgaagaagcatttgtcatcacagataaacaacatccagaaattgagaaagggcaaatgtacaaagataaggaaactttgaagaacgtccttagctactttgcaataaaacaataattttaatacaaggtgaaaaaatcttgcacaaaggaattttaaattaagttgtggataaagattgcaaatggtcactaagagcttcaaggaatggggcaacagagaatttcatagtaaggaaatacaatgaaaaatacacttgcactaagcatcaaatttggagatcaaatgcaagcttcaacaaagataataagggactgtgttaaatacaagtttttgaacataaaaataacaactacaccagcagatattagatttgagatgaatgaaaatatgggttataaatgaattacatgaaggcatggaggagtagggaacatgctctaaacatagttagagaaaaagcaaaggagtcttatcagttgttgcctagttatttcttatgcttcaaaaaacaaacccatgatctgtagtacacattgaaactgaagaaaacaacaatttcttgttttgcttcatggcacaaaacgcttcagtgaaagcatggaaaaaatacaaacctataatagtagtagacgaaa

SEQ ID NO: 232951 - DNA, 1479 bp, Cannabis indica
cttgtcaaaaaacacctatagaaagacacaataatgatagtatataataatatagcccataggcacgatattttacataaattacaattttacccttctcgggtaaaaattatgaaaatgcccctggctcaccaacggggtcttaacatgtcatttctcagtgtaattcatatatattaaattatataatcatataattccacattaatacacatttaactagttagggtttgctaatccattttcttaatcttagggtattacaacggaggttgtggttggcgagagtttcgggtttgatgggttctcccgggtcgtgaggaagaagacgatggtttatacgtgatagggttattttttataaccctatggggtcggttcttatgtaagaaccgacgacatagggtacacgtatcaaataatcgtgtactctaggttgtcggttcttatataggaaccgacgccatagggttatttcatataacccaatgtcgtttcattctcaaccgactctaaatggtataatgcaattctatacttacattttttataaaaattaaaactgcctctaaaggtcaattttcaataagcgggcatttttacaccctttaacttcccttttgataaaatgggttgaaaaaagggaagctagagaccaattttgtagtagtgtttccgcaaaaatgcatattcgtgatgaggaatcaaattttaaaaaaaaatagcgaaaaaaaatacattcaacatatttatatattgttctaccttagctgatataatttatagtactacaatctctttatcttcttcccctagtgtaagtgttaatcctgtaagcagaaatattgatgtaaaatgtctattatttttttttatcaatgaatcatgacattgattactccgaaaataatttacatcctattagcatcttccatagaagacctgattttctatctgtacaatgatctcaattagaaacaaaaaattcagcttcttttttttttttatatacaacacttgatgctgagaacaattgctagcagcaccctattcagccaacaccagctgccaacaccagcagccaacaccagtagccaactccagtagcaaaccctagcaatttgcgatgttgaagacaaaggttagtagcagccaacaccagcattttcgatgctgaagacaaaggctagtagcagccaacaccagcagggaaattataaaacctgctacaaatcactaaacaaatctgctacagacagttgaaccactcggtttcctcttgctgaattttatttggccaattacagatcactctgttcttcacaacttctttagtgacatgaatcacctgttttgatgcattcttccctgaattccacaatagatcgttgcgatttttccaaatgtgatacactagagcagtcacagcagcagtgtagactgcttttcgaaacctgttcatcttagctctttccagcc

SEQ ID NO: 232952 - DNA, 945 bp, Cannabis indica
aagtcccatgtcactctttccataaacaattattcacttaaccatattgattgttttttggaaagtcaggatgggccatctttccactttactggtttttatgggcacccatgtgcttctcaaagacatctaacttggactttactgcgtagatgctttgatattgcacccttttcaccttggttagttttaggggatttcaatgaggtcctctctcatgaagacaaaattggaggaccaaggaggagtgacagccaaatcaatgcctttcgttcagtggtagatgcatgtaaattatgtcaaattccttttgagggacaacgatggacttggacaaataaaaaccagggcagtgggaatgtcaaagaatgacttgattatgggttcactaatcactattgggatgctactttccttgcactatctttgaaacacttggacttttataagtcagatcacagaggccttaaaacgactgttactgcacttatggatcgagtggatgtacctgagttcagatctcgttttagatttgaaaaaatatggttaaaggaagatgcttgtactgaaataatcagtgccaactggattcgggataatagcagccctttagttcaactcacaactaatatctccaattgtgccactagcttacagagatggcactactcgaattttggtaacctgaaaagagacattaaagaatctcatgagcatgttgcagcacttcagaactcctcatctaccgaacctcaacattttgctgcactaaaaaatctgagcagattcttgagtgatttgttggctaaaggtaagaggattaatggctaacaacgagctcgaatcgtcttggatgcaatctggtgattccaatacaaagtttttccatcagcgtgctaatgctagatcaaccaataatcgcattaagaagctcactgatgcagc

SEQ ID NO: 232953 - DNA, 1450 bp, Cannabis indica
tttaataattcaaatacttcaatattcaaattttactccaccattaattattattatgctaatattttggtcccataaatgaatgtccccatacaccctatcattttttttttatatatatatatatccgaataggtattctcaatttttttataagggaattatttcatatactatatttttaatttttttttaagtttatggtttgggtttctaaagtggttgcaacgttaattgcaataggggtttctatacgattttttgttgcgatttaagttgcagcgctagttgcataataaaggtttctatatagaatttcgtaaaagtgaaaaaataaaaaatgtttagaagtgtaaaagtgaaaaaaaaaatccttttttatatcatagtattagcaaataatcgaagtcataaattctgttatgacaagtatgtaacactgtaaactattctttatttcctaaataaatatcatttacaaaattgtaatatatagtttgttcaaatttataaattttgttcacaaaaaaataagtggaaaaattatattgtatgaccaatcgactgtactcattttaattttgaataattagtattttggttccgtgaatttttaacactatatgatcttgcactctaaaatatacgacttgctactaaaaatttccttaaaatataacagttatataattatatttcttctgttaggttctgttactttcatagtaaaaaattaataattttattactgaactttaatcaatacaaaattttgtccatttttattaagaaaattattttaataattataatattctgttaatttagaaaaaattaataaaaaaagttattaataaacgtgataaaaatattaaatttacttaaaaaacctaaattattcttaaaaaatatttttaaattttaattcatttataaactcgtatcttaaaaaataacaccaaaattattgaaaatctaataaatttgtgcacaacattacagttctagaattaacacttaaagggaaccaagatacgatccgttaggaaagttaggattctataattgtaaattatgttctcagccatccacattattagtttcccaaaacagaagttgtaagaatcatcttctctaagaaactaagaatcatccacattgttattgaaaaatgactcatataaagctccattagagtcagatccaaactccagatatctttagcgtaaccgttgtaattttcgcaataagtctgcgaatcgaacctctctgaactcatgtaagtgcacgttctgatgaaggaattgcaagtatgcaaagtacggcccaggattttgcttaccccaaaatcgacgatcttaactttcatttttgaatgcactaacagattgactagtttgatatcatgatgaataattttgtgtgagtgaaggtagtgaagatcgttgag

SEQ ID NO: 232954 - DNA, 1171 bp, Cannabis indica
tcgatttcatccttgttagagatttggcgggttttttcacaatactcttcaatagtgatttatcttgcttatgctgatgaaataaacttatgcttgaacaccaagcacacaaccaataatgtacaacacattggtgcctgacttcttcaccatccactcaaaattgttattaattgcaaacctagccgctacttgtctcatttcttcctagtttttgtacaaatttccaagctatattccccatgattccttactttgtaaagaagtaatctcatgattttctattatatcttcctttgtctacgtagtagctttgaacttggtacaaactttaaatgatgagaacattgagaactatgcatggcgagcgagaaggagcatgttcttctgatctaccttgtcggctactactagttccaagtgtattgcgattttcaatacagggttgtcgttctctctgttcaccatggttgctcagtgcacactctaacctcaaggaaggtacatctacgacttcatcatctaccaaatcatgtttgtcatccatattcaaatctataataggatcattattgtagaagggagcatcaaactcctcaaaatgactaaatcctgtcgcttccttgctattgatctacattggtaggaacctcctcattcacaccaacaccaacatatgtttcaggaacgaaagaccctaccacactttgagggaaaggattagtaggtagggtaggctcctaattctcaacttttctttggtcacaaataatggcataaaatctatgtttgacattgttgtcgtcaataaaaatattcttagttggcgttctttcttaataacctttggcagaaccatttgcccctttatgtataaggaacaaatctcatatttcaaatcatatgccaacggatcaaccttcaactcttcatgtatggttgtatcaattttatcgtcaacagcaaactgcctttggctttataaactcaattaaaacactcaacaccctaaacactatcgtatgatataacaagaaacacaatcgatactgcaattttgtaccaaaaaagtaggttagttaagaaaaaaccaaaaaattatcaaaaacactaaaaggcgacaaacatatatatcatcgattaacaagtgacaaacaatcgataaattata

SEQ ID NO: 232955 - DNA, 811 bp, Cannabis indica
ggacatgatcggtgttgaggaacgttacgtcgatgtcggccatggctagaagctcagccaaatgaagcatggcgtttatatgtccctgagcgggtaacgggaagaagagaactcgaggaggaaagtttggctttctatctgtttggtgctccatattagttctggaaagatgcaatcaagttgtgaattgtgattagtcctatcaaattatatattataaaatatccctaacctttacaaagggatcccaatacataatagcaatgtgctctattttaaggtagggacttatagtcactctgttgcagtagattgtgagttcacctcttaccaccggtttcttaaccgaaatgttcaaattactgtgtcaagagaaataattttttatcaagtgcttttatttatataattgacatttggcctataatgtattggggttctcttacgttattatatgtattaatgattgcaaccatagctattattttgcaggcccacagtctacacagtctacactacttttgctacctaccatggaaattttctgctacgaagttaatatctgagtagtggagccaattgattttattttgctgtacgtagcacatttgctgcaacacgtgttgttgtttcaatttataaaatcagacaccaaataatccattctgaaaaaagtaaattaagtgattatagactaataaccatttttgttttttaaatttattaaattatgcttttgaaattttgacagttaaatttctttcaacattattgaaattgttcgattcaacaatttttatttaattctttt

SEQ ID NO: 232956 - DNA, 1873 bp, Cannabis indica
taggacctgtatagcaatcaagactgagtttattagagtgattctcccagcaaaggagagattcctggaactccagcttttaattctagcagtcattctttagcaagaatttcacattctttccctgatatcttcttcccacatattggaatacccaggtaagtgaaaggcaactcctgccttatgaaacctgaaatctgtacaatatgattcacttctcccgagagcatgttgctacaatagatagcagttttacttgcatttggatgtaatccagatgtaagagagaaggtttttaatgcctgcaacatgtagagaatgctcatgaaatcaccatggcagaataaaagaacatcatcagcaaaagcaagatggttgagtttcaattctgagcatctatcatggaatttgaatccctctttttccccaactttcaccatcagtctagataagtactccatgcccaagaaaaataacaggggggaaatcggatccccttgtctgatccccctcctagcttcaaagaatccatgaagagtaccattaaacattagagaaaatttgggagtagtgctgcagttcataactagctttatgaatttcccaagaaaatttagaccagttagcatctcttcaagaaatccccattcaatcgtatcatatgctttttggaggttcagtttaatcatacaactaggcttattagccttcctgccataatgcctcaccaaatcttgacagatcaagatattatgtcctataaatctctctttaataaaaccaccttgggacagtgatattactgaagggagaatattattgattctagagctcaatagcttagttgcaatcttgtaaatcacattgcaacaagatattggcctaaaatctgtaacagaattaggacatttaactttaggcaccaaagtaatgatggtagagtttatttccttcagtatattacctgagtccaaaaaggagagcacaacctcgcatatatcacctccaaaagtctcccaattatcctggaaaaagctgctggagaagccatttggtcctggagatttatttccaggtatgctaaaaacaacctgtttgatctcatcatgagtgaatctctgcaacaagaaatcggcctgaaccgaattcactttaggtcctttgttgaggatgtgcttttgaacctgcctcctattctctctcttagtaccaagaagattcttataaaagtcaagaaaggcctctgtgatgagagtgggatcagtgatcgtattgccttcttaattctcaatagagagaatacgattttgtctcaatctatgcttgatgcaagcatgaaacaaggacgtgttagcatcaccatcctggatccaattcattttacctttttgttgtaagaaagaagtgtaatccttctgtttttggactaacttctccctagctattttttccttcatatgtagagagggattaagtggctgttgctgtaactggtttttcaaaccatccagttcggctttaatgtcaagtagctgcttctataaatcagagaaactgtctttgtttatcgccctctgcctgtctttgaaccgcttaaatttagagacaatctgaaacattttattaccaggaatactcattgttgggtgtacatccaaagccccacattggctagaaatgggaaggatcttgggtatataaggatgaacactatctccattggaatgaagccttttgggaaggtgcccaaaaacaaattcgtgaaggcttagcccaaagcgaacaatatcattccactggagaaatagatggtgtccgacggtccttacactcatgttccacacttcctttaattggcaatcatacttaggat

SEQ ID NO: 232957 - DNA, 786 bp, Cannabis indica
tttttttttataattagattggatttgatcaattcagcttaattgaatttgattgcatattgttcatccctagtaacaattaacattaatttctttcatcaaaggtttagtttttgaaattttcaccctacataattaaagctttgaaaatctaatggattgaattggatcagttaaggcaaattaattagattgtgtttattgtaaaaggtcaacatccaatgaatattgaaattgaattgtatagggttaaaagtattgaatgtgaattcatgaaaactcctatctagtatttataatttagaaaaattttaaaattatccataaaaagtattaacattttgtaaaaagattgactaaaaaaacttaattgctaatgttttcaaaactcaaataattaattgtaaaagtaaaaatagaaattctcatgccaaatagtaaataagtcaagggacactaatgctaaaaattcttaggtatgattatagtttttacctggcgagaatattttttgtaatttttttttttgataaaccaagtatgtgtattgctcaaaaactttttgtacaacctaataacattctctaaataagaagaatttaaatctttataaaactttacaagatatcaaaccattctttctcacttttagttgctttttttggccatatacatgtaattctctttttcactatgtttttcacttagacaattacaatctctatatttctattagaataatgccataaaaatgtttttcttgtgcgccatatttcatagacaagg

SEQ ID NO: 232958 - DNA, 4081 bp, Cannabis indica
aatattaatatttacacgtagaaaagtactaaacatctttgatatcttttatatatatttttttttatataattacaacaataattttagtatatatatatttgaaataagagaaaaataatttaataattaattaggtttatttatggtatgtttgttgaacttctagtttttttaatattttttttttcgaacaaaaatatttatttgagaattgctggtgcctagcaccctcttacgtgttaatatcactattggtgcaattaagtatcaatcccatatagtttaatataataactttcatggagtatcgttaaccaatcgtaaggcgacaagtctaaaagatgctaagcactactggtaccaaataacaatactctatttatctatatccaaccggattgcaaatgctacataaggtgttaaaaaaaacctcaaaactttcaaaattatgtatcataaacgttttcttaaataaataaataaaaatcatatacttatgtaagatcaaaatttcttgtttatttatttttaaaagcacaaaacacttatagtacaaaagtacctctacctataaatttaatttacacaatttgacctaaaagcataggtgattaatcagaaaacataaggaaaaaagaaaaaggatcacaccatatgaagaaaacaagaaaaaaaaaccataatttgattaagctttatacaacgttgacaatagagatttgatggtctacgaaagaggaaacatatgaggtatcgctaggtacttgagattgagaactctggttggaagatgactcggtatagaaaactatgctctggttactgtccacaacaagttttagagagcgtggcactggaggaagattcacctcaataattccctcaagcatttgaacaactctactcattgatggcctttgaaattcacagtcttgaatacaccaacatgcaaccacacaaactcttttaagctcttctatgtctgcatttccatccagtctgggtccaacaggctaagcacatcacctcctctaactatatgacttgcagcttggcttgcaaagaatctcactttcccatcttcacaaatctctgtgtttctctttcctgatattagttcaaagagcaccattccgtagctgtaaacatcagctttgaatgttattgcaactcctgaaatccactcaggcgctagataacctcttgtccctcttatggttgttaggactcgactgaattctctactcacaagctttgccagtccaaaatctgcaactttaggattgaattcggcatcaagaagaatgttttctggcttaatgtcacaatgtatgatgcactctctacacttgtcatgaaggtacaccaaaccccttgctgtcccaagtgctatttggaatcgtgttttccagtccaaaatgttggaacccttttcgcagaaaaggtgggtatttaaagagccattgggcatgtaatcatagaccaataactttttagttccctgagaacagaacccacgtagccgaacaagattaacatgttggattgtgccaattgtgctgacttctgtcctaaattgtttctctccttgatgaacactttcaagcttcttcacagctacttcagttgagtcagacaatatacctttgaaaactgaaccaaaacctccttcgcccaatttatttgagaaattcttggttgcattttgtaaatctctataacgaaagaccatcaatgaacctcccactgatgttcctgttcccattgaattctttctctgtctcaaaattgagagaaataaacagcctagcaaagatatcaagaccaaagcaaagctcaccacaaccccaacaaactttcccttgttttttttaggacttggaaattccgaggctgctagtcgaatatagagagtccttccatttgtgtcacctggtgaaagctgctttagattcagtaaatctcttgtccatattgaacaacctttattatcataagcataagctatgcatgagcatttgcttaagcaaattgattcacattcttcaagactgccaactctcttggattcttcatcttcaggtgatgacacgcttggcagttctaaaaatctgtctttcttctcatttgtaaggctggtattgtttccacagtgcaattcactctttctcacgcagccttcagagtaatcctgcaaatcccaatcattctgagattttggcttaaaccctttgagacattgacagaaaggcattgagttctcactgcaacttccataagcaccacaaaaagcataaacttgacattgttgtcttggaaaagaccaaagagaatcccatccattattaggcagccataacagctgcttcagctgccctgaaaaatgtatcataagttgagatattgcagtagagttaagagcatacatgttgaaagtgatcacactgtggtttgaaacatattcaactttgcaaacactattgcgctttgtttctgggaccaaagtaaagtcttgtccattccaagaaccggtggtccaaaagctcctacctgttccagatactaatataagaaacatcacttgtgtttagctcaaaagtgaagacaccaggggcaggatcttccgggctcttccatgaagtcagaacttgtttcctctttgttattttgttgaaccccaaactagctccaggaagccatgtatcagttggatagtcaaaactttgccaaagaagtttagacttatcactaagcccatcatcaaagagtactagatttccgttgtcttgaagaactgcctttactgaagtagttgaagaagtagttgagttcacatttgtggaccaaattgggatatttgattcattgaatagaaccaaattggaacctgatattcttaactccgaagagaatctatccataacaggttgttccctatttgccacccaaactatggtctggtaagggtccctcttgtaccacatacctatgtagtagttggcagttttacctggtttgaaaaatcccagcacaaagacctcaccagcagatacaatggtatcatcaccagaaagtgattgatttgctgagatggtttcagctccaaataagaaatggatattaaaatttaagaaatggaaaagaacaagtatgagcgttggttttggcttgatatccataatggtgtggcacaataatttgcaatcaaattggcaactcttatagcagtagaaaacttgccatagccaatagtgatgtgaatgtgaatgggatcatggacaaaaaaaacataaggctcaatgatcaactcataacggatgacatgccaccaataatatcagagtttatcatagtgttaagtagcagctaggtaggtcttataactttgatcattattaattaattctcattccttacacactataatcttgcttatattagttgatacttctcttcagacgtgacaggcacagatttttatatatataataaaaacaaagaatgatccagagatcgtgatctaaataggtagcttttgtaatgagacaaatgatatcaccacacattgtttccaattaagtccttaattatcggtataattttccaaagataaggacttcttttcaaatcccactacacttaaaattaaacgtaagctattagtttgtacgtatacataattattcgaccccacaacttgtaaattttcttggtgctaagcatcttgccatggctgcgcagcctcaggcgacaaaggtcaagaacctatacaattttgctttggacgcgtatatgtagagatatagttcactcaatcgagtatacatataatacacatattacttttatatgaccttatcagcttacactcattacagggccggcacagagtgaggcgagtttagtatagtggtaaagagtaattttaagtaggatggcacattcaatctaatctaatatttttctccttatctaatccaaatctaattagtaattagatttggaaaattatcatcccatcaaattcaattaaactctaaaatttaatctaattaaattactaattagatttgatctg

SEQ ID NO: 232959 - DNA, 641 bp, Cannabis indica
caagcttgtcaatgagtgaagcactaggacctgtgactaaaatatcgtcaacatagacaaggagaataataagggaagagcctgagcggtacacaaataatgatgtatcagcttttgatggtgtgaatccccattgcaccagaaaatcttttaacttgttgttccatgctcgaggggcctgcttaaggccgtaaattgctttatgcagtaagcaaacatgagtcggtttctcaaaatcaatgaagcctggtggctggctcatatacacggttttagtgagatttcattaaggaatgcattactaacatcgagttgcttgactggccattggtgagaaacaacaagggataacacagtgcgtactgtcactggttttacaacaggagagaaggtctcagcataatcaattcctggtgtctgtaaaaatccttttgcgacaagtctggatttatagcgatctaatgagccatcagcattgagcttgattcgatgaacccacttgttagaaataacatgcataccaggttcatagggtctaagtgtccatgtaccagcacgtttgagtgacccaatttcagagttcatggaagcaagccatttagggtgttggagggcttctttgaggttccttggttcagatg

SEQ ID NO: 232960 - DNA, 820 bp, Cannabis indica
gggtcaggttggaaagataagcccttcgtgtggcttacggcaaggcgaccctctctcaccctacctagctaatgtaaacgaggtcaatggttgctggagatgccttgaaaacttctgctcttggtctggccaacaggttaataggctaaagacttctatatttttcagtaagaacaccccgatgggaatgaggagacagatcaaggagacccttgggattgaatctcctgaaggatgcatcaaatatttaggcttgcccctcttccgctcaagacaaaaggatgcatatttcaacttcattcttgataatctcacagctaagttacagggttggaaggctaagacgttgtccaaagcaggccgagcgaccctgataaaatcagtgggtctatctatgcctatgtacgctatgcaaaccaccaaactctctaatcgtatggtcaatcggattgatggtttagttagggatttctggtggggtttcgaaaaaggaaatcatgggattcacctaaaagcgtgggacaagctcagcctcccaaaatctctgggaggtctgggttttcggaaaacgagagaaatgaaccaggcttttctagctaaatggggatggaatatcctaactgaaagccaatcgttgtgttgtaaagttctagcagccaagtacttaaaaggaaaagacctgctaaattacaagtgtaaaaactctgactcttggttctggaaaagtgttgtgaaggccaattcaattctgagaagaggtgcttgtaagatcgtgactaatggtgagaatacaaatgtttgaggggatccctggattcct

SEQ ID NO: 232961 - DNA, 1138 bp, Cannabis indica
ggtgcaaaatgttctctgctgcattattacacagaatgcaggtagtatcattctcaacctgcattttttgcaatctctctcttgttttcaaacgattcaacactgctaaccaaaggaaaaaactgtgttttgggacgtttaatctgctccatacttgcttgctgacatgaaagtctctttgttcttaacttaacatcttgtacatgtttgctattgtgaaatctgatgaagtgaactgatctggagttgaaagtagcttcatctcatccttaactttaacgattctgcaccagtaccagctactatgggcaggggcattgtgctcccaccattccccctgaccaatgtatactccattcccccatttcacccatagactatctttcttattagcaattgcccacacatgctttgctatagcagccttgttccattttgctatgtcatgaaaacccattccaccagctttctttgatttgcaaagagtgtcccaagcaacactacctgagctagtcatactgctctttcttgtctataagaaactcctgcaaatgctttctatctccttgataactttctttggaaggataaggatttgactccagtatgtatgaattgtcaataatactgagtttatcaatactactctccctgcaaaagacaaatttctggtactccacactttaattcttgaagtcatcttctcaactaacacagaacattcagctgaggatattcttttagcacatattgggactcccagatatttaaaaggcacattgcttctttggaacccagaagcatctaagatcctctgtatttcacttgttgccatcccactacaataaatggctgtcttctgttgatttgggtgaaggcctgaggataatgaaaatagcttgagacccttgagcatcagataaatactcttataatcacccctgcaaaaaagaagaacatcatctgcaaaactcaagtgattgagtttcaacttcccacatctttcatggaaatgaaagtcttctttatctccaattgccttcaaaattctgcttagatactccattccaagtacaaagagaagtggtgacattggatctccctgtctaagtcctctcttagctgcgaagaaaccatg

SEQ ID NO: 232962 - DNA, 1303 bp, Cannabis indica
atagtttccaccaataaaaattattatcttttaaaaatttaaacgtaattttttttaatttaataattatgattgaaataatagaaaaattttcacaaaattaaataaatatagtaatagtgattataatataagtaaaaatatttttttatgataaataattaaaaccccacaaaataaaaattctatatctgtgacgaagaatctttaaaaactaacaataaattatatggtgaatatatcacgacaatttaactttttatgaggattcctccagatagattttaacttagtaggcctcatttttcattttcttggtatttatttgattttggggaatgtgaacactgcttattgcgttgtcatgagaagaaagaataagaataatattgaagatgattaatataaatatatatatatatatcttttgtctttttttttttttttttctctattatttttataaatttattactttggtgttgaatgggtggcgggggggggtgggcctccaatacaaattccttatctgaatcagaggagaagggaataagatgggaatggggttcatgaatttgtatgaatattgaagaatcaaagtggcctaattcacactgcggccacccatgcatggcttttgtctttttccaatcggtcacttatgcatgcggataagaaagtgtagaagctgttaaagtcatgaccttttatatatataatatatatatatatagggacaagattttgtccttacggaatgtatttcgtgatgtacaatagccgttaggtggggagttatttgatctgagggttgaggttgatctagggataattagggttaaaaaatagtaacgtgtcctaatgtaccttgagacccacctaatgtacaacgaaatatattccatgaaagtacatcacgggacaaaatcgtgtccctatatatatttctcaattctcatctctctctttttttttcttaactctggttatgtagaaaatatctaccatgatgatacattttcttcaattccttttagtgtattttaattattcttgagtttttaggataactggaatgagcttctttcttaaaaattataattaaagtatttaagtaatttgtaattttacaaattagatttgagtaataatatatagaatagttgaaataaaatatagagtaatcaaagcactcacgtcaacttccttactttattgaaactaggaaactaatgcgcgctttgcgcagtttgtgatagtacaatgacaattttaaataatgtatactgtaaaatagaacata

SEQ ID NO: 232963 - DNA, 774 bp, Cannabis indica
agatcctggtaaaataatatccaacagtttttatgttgttagttagttcaagtatgttgaaactgagattttgctactgtttgagttagggtttgtttttgattattttctagtgattgttggagatgttctaggtctgattttactggttttggagcttaattcttggattgagcaaagaactaaaatttggaattatggcatgtttggtttttgtctttgtttctggtttctactgcttggtttgtgttatttgaggttattataggtattctggacggtttggtaaggtttgggcacaatttgggcatgattttgaattatttgggttacctggtgcaaaccggttaaccggttttacagtccctataaaactggttaactggatcagggtctggtttcctgaatattttgtgttgtcaattcatgctattttcagagttttggttggttaaatttttgtttgttagggtgctatgattttaatggttaatcacagaacccttagttagggttttagtttttctagattagggtttttgcgtgttatttacccgtatacgtgaatgtgactagggcatccatccagcacgaggtattccagccaacttaattgaattcataaacaaggtgagagtagtatagaacatatgatatgtatgcgaatgtatgtatgtgtgatatatatatgcatgcttgttgtgattcatacactaccaacacaagtacggtagcggtacaaagtgcattggtaaagtgtacgatgtttgaaga

SEQ ID NO: 232964 - DNA, 1656 bp, Cannabis indica
gccttgcgtctaagattgatggtctggtgcgagatttctggtggggctcggacaaggggaaccacgggttgtacctaaaagcctgggataaactttgccttcccaagtcgttaggaggcttaggatttcgaaaatctaaagaaatgaatcaggctttccttgctaaatgggggtggaacctcctttcaggtaatcaatctttatgatgtcgtatcctcgaagccagatacctgaagggtaagtcctttttagattgtgaaccaaaggcttcagactcatggttttggaaaaatgtgactaagtccagaactattattcgaaagggtgcttgtaagcctgtggctgatggtcaggagatgaatatctggtctgacccttggatttctcacctaaaaggttttactcccacgtcgattgggcgggctctgaatagggagtcaaaggttgctaagttatttcagactaatggcggatggagcatccaaaaacttaatagttactttgatcgtgatactgtctctgccatcctcaaaggaggtagtcctaccggcactggcaaagacagctggttctggactttggaaaataatggccgtttctcctgcaaatcagcctatcgagccctggctgaggatagagtgagtccaggcgaggtggccccctccatgtggaacaagctgtggaatagtaaaatccctgagagactcaaggttctttggtggtgtattctatccaaagctcttccgattcgctcggtaataggtaggagatttcctattgaggatgagagctgtcccctgtgtggtacggaagcagaaactatggagcatcttttcctatcttgtaatttcgctttccacctttggcgatcctctccatggggtatttaccctatttgtgacactggtatacgaatgtgggattgggtaaaattcttatgggacctaaacaaaaaaggcataaatgatcaggaagcttttctctatgcatcgctgatagttgacacaatatggcggactcggaatgataaggtacataataattgtcctgcagatattgttaaatgtattgacactattcagttttcttttgcagatcatcatgctcacttgctcccttgccccataccgtgtccgacggaggtttggccgcccccaccccccccccccgccaggattggttgaagctaaattgcgacatcagagtggggttggatagcatgtgtgcggctgtggttgcaagggatcacgttggcaaggtgatctgggtggttacttctaagctggatttttctaatgctctctgtggggaagcaatggcgtcctgtctggcccttcagtaagctaaagttcgtggtgtcaagtttcttattctggagagtgattcgagggtggtgatcaatgctcttaatgggaaggagtcccggtgggagcttgataactacgtctccttttgtaaaatcacctcccctttctttattggatgtatgtttgaatatgttagtagacgatgtaattttatggcccataatgtggccaagtgggcattttcccgtcagaggttcggcttagtgcctctatcctatatgcccgaaactatattttgtaatgaccgcgaggtctgactgttatttttttttaatctaatgcatgtacg

SEQ ID NO: 232965 - DNA, 1385 bp, Cannabis indica
ataaatagtactttgaaagaaattttttttttacatgaaattgcaacttcattaatttagcattctgaatacaaaataatctgaagatcacgggggatagaagaccccagaatgctacgaccagttagcgattgtgcatgcctagcaacatagtgggtcacacgatttgttgatcgtctaacaaaacgtaaaatgaacatcagaaagagaggataataaatttctacaatcattaacaactaaaccaaacacaaaagttattaactgagtagaatgaatagcctgaacggcaagcatgctgtcactctcaatcgtaacacctttccagtgatttgccttgatccaactaagtgcttctttgatgcccatggcttccaccgcttcatggtggaaagtagcctccatgatactcggcatgaatgtgaagaggggaaccaagttgatcacgggccaccatcctgaatccatgggaattttcctactcaaatgaagcggcatcaacattaatcttgatggtttccaacaccagtttgacccaaagctcatttctatcacctaaattgttaaggaatatagatgagagagaagtaatatcctgagcttttctccaatgatcaagagaagtagttgttgataccataacctcattcaaagaggaagtttgattcttccacgcttttttattccgcgctttccacaatgcccaaccaaccatagcaattttacacatatcatcggttgcagaagaagaaaatgtgagttcaaaccaagatgcaaatgtacctgggggagccggacagggaacaccaaggtgctgccaacatgcagtagccaaagaacactcaaccaaggcatgagaggtgtttttaggttgtgtagcacacatggggcaaaggatagaaacatttacatgtttggtgacaagatttaggcaagttgggaggcagttagtcaaggcacgccacaacatgtttttaacttttgggagtattttcagctgccacaactctttccagaactcaaagttgttagatacaggtcgagaggacttgctttgttgcagcagcgagtacgcactacttacactgaaactcccatttgattcaccattccagtaccagcagtcatcatctactttgaaagtaattaattctctaatcaaactcaaattttgtaaaaatattttctaatataatttttttatatagagatcaatataaaatacatataataatgaaattcattcttttattgtacagtacgtatatataatcacatctaaaaagcacactaatgtagccgcaatagctaaacgaaatctcaaagatcaaaatcttaaaccctattttaaaaattaaaaattaaaaatacattacctaattaaa

SEQ ID NO: 232966 - DNA, 1266 bp, Cannabis indica
acagaagcaggttcctgaataagaataccgccgttacaaaccataaactctttgctaacatcaaatttccaaaggttaattaggatttttctcccaaaattttgacatgtaccaaatagtgtctctagaaattttcccgaactattaagattgttggatttaaggatttcagttcaattttactaatgggcgtctgacgtgaacggaagtttaggggacacgatttaatacatggataatcgtcacattagacgtctgttacaaaagtccttgaattcaacaatttcaatagtcttgagagaaatttttaacgacctaaaaaacttaggggtacaatttggttcatgtcaaagttcgggtgaaaatatcttaattagccaatttcaaataagaaaaatatactgcacggtagttaagaatcctacctgaatcccatatacacgtttgaagggccatttaccatgatatttgagaggagcagagccaagaagagcttctctttctttctctctatcaatcatacaatggtaacaacaatcactttggcaatgccattgtttccacctcaaataaagaggttctagtataaaccaagtaccatcaatggtggcatcattagaagagaacttgcaatatggaaagcatgtttccccaacacatccagtttctttacactctttcacacaaaccctatttccataattaataacaatcactataaacaattttttattataattcattctataaagcttttaactcacaattttcccctttttatcaatagctataaccaaaaagaaaaagctagattaattactaaaacagagaagaaaacaatgcaattactcttgcatatagataaatatggtaaaggcataccatacctgtatctaggatcttcatcaccagcactagcatctataacaccaaggttccatgaaagtgaaaccaccaaaattaaaatagccaaaaaacgtcgtaacatcttcctgttcaagcaatttattagagtctcacttcggctggtgatatatactcaatccacttattaataaggtgaggccaatcctcccctaacaagtctatttcgttacgcctaataactttcctaatacaatttaaggtgaattatatcattatgattttccaggaaaattgaaaattgaaagatgatttagggattaaataactatcggagaagtgtaaaatcataaataactaatcaagaaacttgatcatcaaacttgatcatcatctctctaa

SEQ ID NO: 232967 - DNA, 1331 bp, Cannabis indica
tgttgattttctagagatattttttgttgttttaataggagaaaaagaaaaatagacaatgcttcattgaatagttaccaattcatttgcatctcttcagcatttttgttagtatttgatcaaaactaacacaagaaattctgttagataggcatttattttatcggtaagatatagtgatggatgcaaaatctttggcaaagtcgaaaagagctcattctcagcagcatagtaagaaacatcatcccaatcagaagttgaaatctccatcaactgatgctgttggagcggcaaacaaaccgtctcttaaacaagttagagagaaaaaccttcagtctaaggctgcatctgcactaccttccaattgggatcgatacagtgaagagaatgattctggtttagaagacatatcaaagaaaaacccagatattgttttgccgaaatccaaaggcgcagactaccgtaacttaatttttgaggcagagtctcaatctcaatcgactctttattcggattccttcctgtctgttgatgatgttcttgctggtacttttttcgtatttgttcttgatattttctttaattattctagggattgtctggtttttttttcttttctaagagtttaatctttgataaatttaaaggcataattgatcattgactttgaatgtaaacaagatgacttaggattagtaattagggttgccatagatgtgggtgactacccaatattgcaatcaccatcatatttaaatgaactcatttaacttaattaagaacaaaattaaactttatattgaaaaagaaacagaacaaatttcattgtgataatcactgatatttttctctatttattgtttaggagaagtattttgaatttgtactaattgaactgccatatcggaaacttttttgcaacttttgataggtgaatttagagaagcagttggatctttgctttcagtcaagggagagggcatcttggcatggtctggagatgataattttgttgtggaggataaatcaaggatgcaacctgaggtaatatattttatgtattgtattctaactcctcaagttgataatagctaattccatggtgatgtctttataaaacgattattatgcccaaagatctatcgagatgcacatggaagctctgtctacccactgactcaacattttttgatttgtttatttcaatgctgagaattaatagaaatttggttctctatccaggcatcatttatctcgttgaatctgcaccgtcttgatgaacaacttacgaaaattgacttatcgcagagacttttcatcgaagcagatct

SEQ ID NO: 232968 - DNA, 1148 bp, Cannabis indica
aaccaagaaatgccgttagataggcacttttaatatataaagatatatgttatttggtgatagagtggttttaaggtgtatgtaataagaaaagaggggatagctccacattgtggctctaaggcttgggtccaatcttgaaatcttgttggtgattcttgttggagacattgaagtaaaatggctcatatggatggattgggaggtatgtgtatttattttatttgatgctctaaataaatacttgatcttggatttattactatgagtgatgttggttggtgagtaaaatgtttgctttcaatactcataatctgtgattgttttaacaattggtatcaagagccaaagttattgattttagagctcaaatttttcataaaccctttttttctaaatctaaaatttgtgataattttttaggattagtatgtttaatgttgtatgaatgtgagttctatgatttcaaatgaattcatatatgttttgggaactattgttttatattttccattgaggtacatatgagtttaacaatggaggatatccatttcggatttaccattttttggtatattattttgtatttttgaattaaatgggtattggaaaatgatagaaggttgaaaatggaacaaaacccctcaaatggcgtcagatttagtgatcggacatggtctatccgactgggtcacgaaatgggtcacgccgatccgagttgcagacccgtggacccgtggagaagtttgctgggtgacaggagtgacaaaaaatgacttgtcattttgcctctgtccggcaaacgaatgtcgttttgaatgggtgaaaaatgtcgtttttggagcagaaaaatgacttgtcgtctggcctctatcgggaaaacgacatgtcgttttgtatagaatagaggtcatttttttgagcagcaaacgacgggtcattttttaccctgcgacacgccatcctccacaaacgacatgtcggttttggaaaatgacatgtcgttctagcagttaaaaaagaagaagaaggcgcgtgtgggcacgtgcaaggtcaatttttgggccattttcactagtttattctatttttagcattctatcatttccccatcttaattttatgcataatattaattcatgaattta

SEQ ID NO: 232969 - DNA, 1414 bp, Cannabis indica
ccattgagattaaaagaaagttgagcagaggtaacacacttcaaaaccaaagtcacccagttaatatggaaacccatcttgatcatgatttccttcagaaaagaccaattaactcggtcgaaagctttactcatatctagctttaaagctgcataacccattctacctccttttttgttcttaagacaatggaccaattcaaaagcaagaagtacattatctgtgatcaaccgatttggtagaaatgcgctttgattttgagatatcacatggggcaaaacatctttaaatctggaagcaataactttggacactaacttgtaaagtactgtgcataaacttatgggtctatattcactcacaagcttaaatgatcaacctttgggataagagtaattaaagccaaattgatggagtccatatcatcacctccattcagaattttcagcacattttgagtaacaagaggcccaactagatcccaatgatgttggaaaaacatagccgacatgccatctattccaggtgatttatcgggagccatagatttgagagcattgtccacatccatagcagtaaatggcataagtagctgctggtttaatttcagagtaatggctgtatgaacagtggagagtacatgattcaaagcctcattatcgaccccatttgaagagaataaaccagaaaaataatgaacaatttcagcactaatttcctcctctgtatgtacaaaacccccagtagaagattgaatccttttgattttattgacatcattccttgttttagcacgggagtgaaaaaaatttcgtattagaatcgccactttgaagccaatcaacatgtgcccgctggtgccaatacaactcttctttctcaagcaactcatcaagaattcggtcagcattttccatttgttgaatatgatcagaagcacttgatttcacattgtgtaactgagctgagttacgatgagcagctgctatatctcttcccatactgccatatttattatgatgccatttttgcaaggctgcagcacaatctgcaatattttgcagcaaagggttcaaagattgatcattagccgatgcattctagtgagcagcaataatgcttctacagtcaggatcctttaaccaaaattgttcaaaaaaaaatctagagtttcttttctaaggaggaaccggttgatttggatgagagacagtataggcaatggctcggtggtctgaatgatagaaatctaagtggtgaagatcttcctcagcaaaaatagatgactagtggttattagtaaaacctctatcaagtctttcccttaagatgttaccgtgatggttcttattagtccaagtgaaaaagtctccacagtaagggataggccaaagattacacagatcaatagtag

SEQ ID NO: 232970 - DNA, 2182 bp, Cannabis indica
actcaccaaactaacagatctgcaataaccctccaccaatcgacgagaaaaattaccacaagaacatacagaaaataaaccctatttctcagcttaatctactgggaaaaggtcgtataaactataggattgtgctaaaccaagcaatcaaaggcgaaaaatggtaaaatatagataaaagaaagagatattcatcaccagaatcaacacgctgaaagagagaagtttcgagggaagtttcgcaatcggcgcctctgaaatttgtggtccgttgaaatttctagagttttgtgctgccctttgtagctcaacaagagttggtgatagactcacccagcaaaaatataaaaaaatataggacacgtgtttgaaggtgatatgatgggcggaaattaatacttatttatttattttggacaaattaccaaaaagacgtaaaaagagaaaatatttatttattattggttttctagaatataaataatggaattttttattttttacacttttaaaataattttttttttgtatttttacgtaaattttattatagaaattttaattactaattatcactacaacttaaatagaaaataatattgtcaactagctgtaactactttaaaaacccaaattgtaaatttagaaaaaaaaaaattaaaaaaaattgtatatgaaataattccctaaaaacaaatatttattatttatttttttcagcaacgggcagattcttttatcgcgtttcgccagagagaactgttaaaaagcagggtaactattactattttactagttttttttttttttgctggctctattactattacagttgttatgtgttgatttttcttttttaatgtaaaacctcctctaattttattcattatttaggtagtatttggtttgttgtaatgctaatgtgatgaaataaaaataataataagaattgattataatgtttgatatttttattaaaataattttttttgatggtaatagagtctaattataatgaggattacattgattttgataagtaattattattactatactcaatataataattattacattgtaataattattatgctaattcatgtgttgtgaaattatcattttgcatcactattgaaagatataaaagaacaaaaaaaaattactctccacaaaggaaaaaaaaaaataagctaaaaatatcattataaagcataataaattgctaaagctttaactttttttttatttaaaataaagtgaaattttattagcaaacatctttcatgattccatcatgaaaactaaaactatgagagaaatcttcactcctaagaacatgatcagctaccaaatagctagttctagctaaaaaataagtaatattattggtagatcgtttaatacaaaaaatagacacatcattaataatattcaacaataccttacaatcattgattacactctcaaaataggacaccattcgaattggacttcttattgcttgaactacggtaagacaattcgtttcgataatcactcgacttcatcctttgtttttaatccaacttaatgctttttgtactcccatggccttcgcactttcaggcgacacaaaaccttctctgcaacatgtaacagcctcaaaaaccaacctcgtagaggttcgtggaacaccaacaaaactgtaagtcttggcaagagagaagagtgtcgtatcaacgttaattttgatcacatcttcacttaatttttgccatgaatctgctccatcagtcgctgtcaaaaatacagcaataggctaaagaaaattgtcctgtgcacgagcccattgctcaaggatagagtgagccaaaaaaataactggagcaactgtacctcttttcttcttctaaacgcagtcattacacactttccaaatcgcccaacatgtcatcgttattaacttcttgttctccccatcaaaagagcacaacgtagggtgaagccaatttgaaaaagtacatgcaatacttgtgctaatttctaaattagtgtgacaccaacatgattgaacaaaagaacactccaccaagtagtgagcaatgatttcccgaccagtttcacacataagacatagcgtattcatattaacatgatgatgcctcaattgagattttgtaagaagatagtccaaagcggc

SEQ ID NO: 232971 - DNA, 1481 bp, Cannabis indica
agatgtgtagatatttctcaaaatttatagttattgcagtgtcaattgttagccaagaaaatgtttttccaagtattatagtatccagtttctcatatagatatttcttttcttttttagaaatttaatcacactaaagtagcatttatctaattaccaaaattttataatagggttaaggcttggtaattttcttccttcttttgtgtagagctaagcctagtgtcaattagttgttttcattgtcgttttcaacttcattcattctttcacaatacaaaaagtggggaattgtactctacttgtctatttgtattgcttctaaactaattgtcctgctgtttgtagggtttgactttgatgattttgattagcttgatagggatagttctgcattcgtgtctttatttttgttttgaattttccaaggacaattttctcttgataattgttaaagtgattacccaaagttttttgatacctttctttgtcctttagaactgattaaatctaagacaaaaatttgaagaaacttagggccactatttgtaattcaatattttgttatatattttaattcaataatcgtaatagaaaatctctactccctcataaactatcattttatgatagtgttaccattattggtgtctttgtgtgctgcggtggttgcaaaaatttattcctttgtttttttacatattacagcaaagttttacagcacaccttacaacttctctattattttcattaaatcatttaaatttaatatttttatgtacttctatgttaattaaatttataaaataattaaatagaaatgaataaaaataaaatatatagagcataggagctgatgaagtacattttattcatgattctttaaatttttaaacgagatactcttttaaaggagttgttgggagtgtaatagctttggggctgaactccatctcttcaactcttttcttagatccaaagtccaaactacatgagtagtaagtacgtaaggtggacatcattcaatccaattgaatcgaattaatgcaattcaatccaattataaaaagttagatatccaattataattcgattggatgctaaaagtttgattctaattggattgaatcgattattgtaacgcttgttgttttgtgtatttattttcataatgttttgttttattttattacttaaaaatattattgttttaattatttaaaaattttagctacattatacttgtaacaatagtatgtttatgaagtattaaacttaaataaaagtgatatttagtttttacgtatttttcttcatatttttaaagttaatattgaaatttaggtgtgtaattggatatccaactaaaaaaaccgatccaatccaattagtaattggattggattggattggattttgaagtttaattggattggatcgagtgatgatttttcaaaaccaattactgattggattggatc

SEQ ID NO: 232972 - DNA, 1051 bp, Cannabis indica
agatttagattctagtaaaatatttccaacactcacaacacatagtttctttttgaacaaagttacaactcaaaatattacaataagaaaataattatttaattaaaatttactatttttatttgcttaactcatgtaactttattttttattttttttagagaaaaggtccataagaaactctacttttttaaagaaaagactaagaaactcatgtaaatttacaaacttgtattcataacaaattttgtatcatgcaaaatcaaagtttgaatacaaatagaatgaccggactaccaaactttactaatagacgtaaccaataaagcataattagctaagatgtgagccgccgaatagttctaagacaatgcacaagactcgctttattaaaacaaacaaaataacaaaccaaaatcattcaatactactcctaaataagactccaacaaaacactattattaaattttgtctccaaactaagacagtcaactcatataactttattcttgaaaaaaaaaaaaaaaaaactcatgtaattttatttaaaaaaaataaaataaaatcaaaaagcaatattataaagaatttgctcttagtttccaataataataattaattcatttgttggtactaaccccactaagggaagttctggagaatgatgatggtggtagtgatggtgatgattttaccctcattgtatataagggtccaattttaatgatttttattgaaacctattaagaccctaatcttaatgcattcccaatttaagtatcttaccttacctaattttactgattggactcaacttaaagatctagaaaaatagaaaactaaaaattctaaaaggcatcaaaatcaggacaaaccgtaccaaataattattacttgttcccatcttttaaacaactttttagttttgtaaattaatctcacccttggactatctataaggtagttcatcatcacaattggctcatctaatcaactgtccaagaaaacggaatttgatagaaaaaaaaacgaagtgaatttggcatcatc

SEQ ID NO: 232973 - DNA, 1016 bp, Cannabis indica
aggaggttctcaaaaatccacacctaccccataaatattagacatgaagaccaaaggcaagcaacatcgaaactgattggagaatgcataaaaccgaagtttttgaacataaagacaaaagcaacaccaatggacataaaaggagagttgaaatacatgtatgggatcaagatgaactacatgaaagcttggagaagtaaggaacatgcagtaaatgacttaagaggaaatgctagtgactcgtacagtctaatactgagtttcttacacatggtggaaaagacgaacccaggatcagttgtcgatctgaaaacagcgaaagataacagcttgctatttgttttcatggcgttggatgcatcgataaaagggtgggaagcatgcagaccgattgtggtggttgatggaacattcctcaaagcagcttatggaggaactttgttgtgcggatgcacacaagatgcagcaggtcatatttttctactagcgttttgtgtcacaaattttgagaatgaccaatctttgaaatggtttttcaaaaaattaaaagaagcgtatggggtccagaaacaccaatgcctaatttcagacaggaatgagagcctcatcaaagcagcaagagaaatatatctagaaattacacacggttactgcgggtatcacattttgagcaacctcaaaacaaccttcaaacaacatgctgccaaatacaatctgccattctttggagcagtgaacacagaaaagcaattcgaattccacatggctgaactggatggattggacaaacacgtaagaccgtacttgaaaaaagtcagttatgaaaagtggtcaagaattcatagcaaaaacaagaggtattcaaccatgacctcaaacatatcaaaatcactgaacgctgcaaatttagcagcaagggagctgccaattacaacactgctaaaatgcttcagagcattggtgcaacaatggacacatactaataggacaaaagcacacaacacctttactaagct

SEQ ID NO: 232974 - DNA, 2023 bp, Cannabis indica
atactaataatataaaatactttgtatatatatgtttattttatttttctacctattaaacatatgttttattatatcactctatgtgtcattgtttattttttagtaatttttaagtattgatttatatttatatacattagtgttataattttgatatttgaattttattaaaaaattcttattaaattataataattcatagtaaaatagataataaacatttatatcttttaataaaaaaaatatttaatttgtttatttttataaaactgtttaattaattttacgaaattgtttattttgagttttaataaacatactttattatttaatgattaaaatgcatggtttcatgtaataagctttcaaaatgtataagtttttttttaaaaaaaaatttgcacattttttgtaattatgttgtttttgttgtacatttatgaaaaaaaccctttataaaattaattgttaagaatgtcataattgtgtatataaacctataatatacacatttttattcaaatgttttatgttataaacgatttttttggtttaaacgtttaaaaaaagattgtttaatttttttggtttaaaatcgtgtaagcctaatctgttaagctaattgtgtaacaatattaatatttgttaattttttatttatttgttaacgtttaactaacaaaaaaaatatcaaaaattggggatatacggtttgttatgttagagagataggtagttaaaataatttttttaatttaaaaaaagattgtttaattttttggtttaattattgggtttaaacgttttaaaaaagattgtttaataatgtaaaagataggagttttcttttattaaagtgtacctggactgatagaacaaccaagcaataaccactacatgcaattccaattcaaatagacacaaggaacagttctctcttcaactgcagaaaaaaacaatgataacatttgatgatcacaaaggacagcatattagattttatctttttaaagaaaaaatatttcacacagccttattaatcttgcaacatgtaaagtaactaaggtgagcaacttggaaataaagtttatatagatataaaagaaaattaaaataatgcataaaatgaacagttcaatcaattcaatctcttgaagaaaagaattaatgacattgactgctatctttatagaagtactgaaaacttaacagctgaaacaactaacggtgattggaggagttgtattttgcatataaacacattgagacaaacttaaaccttatttgttccctatctaagaaagggcagggtgaaggagtagttatattgccattccttacaaacaattgctgcagcaaaaacagttacatgcaagatgagaaaaagaatgctgcattggattgctatcaaataatttagttattgataaaagaaatttgaataagttacacgcactaattaaaataatacttgtcaataagaaaaaacacaggaaacacacatataactaacctacacaaattaccaaggaacaaagttcaagtatcatacatcttcatattggagaatgttgagtctcttccttctatccctgtcatcctgcaatgcctgtagtgacatatgcggatgcttgagaactaacaataaatataattcagatctagaactctaaccaaattctcaaggtgcttttttttcttcaattataatataccaacaaacaatataacaaaaaaatgtatataaacacaccaataacaaaattaaaaatagtaccttagcaacagcttttttatttattggtgcagagatgtcaccttgtatccattcctgggttcttgtgagctttaaaaaaccaccatcatcaccactctcggtcacctaataatatcagattttgttagaaaaatgtataaaacgtttactcatcattatacggtttaatatcagatatgtaataatatcaaaaattgaagatatatggtttgttatgttagagagatatgtggctaagatgat

SEQ ID NO: 232975 - DNA, 1452 bp, Cannabis indica
aactttccgtcctcggttacccgtgcaaccttagtagcctccgtcatgaatctgctgagactctcctggtctttgcgttactttgaccagatctcctagctgcaacagaagttggcgagaggaggagaattgtgcatggaacttcgaggagaaagccttccatgagttgaactttccgggtgccaacttgaaataccattgttgggcggcttctgaaagggtggcaggaaaagctctgtagcataaatctcatcatactccttgcaggtccattttcatctcgaaatacttaaggtgggataagggatcttccttccagtatacatcttcgaggttggcatcttaaacttttggggtaactccaagatattaatctcgggggagaaaggtgttccacgtgctcggtccaactcaagattgttgttcctctgaccggccaggccttagaacatattttttagttcatccagctgtgcttgcccggttggactaacctgttcggtctcttggtcgatctcagtcacattagcatcttttttagcgcgggttcctgggtgcacgattggtgtgtcaagctgatcgtccactcctctcctcctcttcagatcatttctgagatcatgaatcgtccccaacctatcaattacgaaatgcctggttgtcttagtgactgattggtatggccaatgtgctaaccagcaccattaacctgattggaattattgggtatgacttctcccgatgaattactagacaaggtctgtccgcctaccacttggcccacaagtggaacctgtgaccggggatttgacggctgaccatttatagtctgagaggtattcatcgctgaatcttcgtctgtttcgcccaaggggagacggttacgggctgttgcccggcagtttgataggcttttcgtatcaacacagtggcttgccgactacgatcgtcaatgactacttgttgagcccttaatgtttccatgtccttgtctctccatttggcgaacatgcgcctctgctcttcaaacgcaaggttcaccaaagcacgaagttcctcctgatcatgatgtagggtgttgctatgaccctgcatgattccaagagcagcacggaggttttggatttcagtgtcatctctaatggttgtttgaacattggtagcaagcggaacggctgtgttatgaatgccctggttggctgctgaactggtattcctagtctcttgcacactaggcgccatttcatccacaagagtcgtaacaccgtgacccgcatttgatggttgtctggcatttacagtgggcagatcccttgtgtttcttgggttctacagtgtaggatccagctcttgtggattcgccgaatcaaccacgcccttacgagtctctaccaacatcgtgctagtgattagattttatataaagagcgatccttgattctgctctcaatg

SEQ ID NO: 232976 - DNA, 1170 bp, Cannabis indica
ttgatcaccttggctgctggtttctggtgcagtgacagtaaccctcttcttcatagccatttcctcctcattgaacacaacatctctgctaaaaatgcatttcttatgccctggttctaggcaccataacttgtacccctctacttcatcaggatagcctagtaacatgcattttagagccctaggttgtaatttgtcttgtctgtagtgagcaaatgcagagcagccaaaaactcttaaatgatcaagtttaggtacatgacctgtccacaattcttgtggagttttgaaccttaaaggaacagatggacacctatttattagataacaagctgtcttaacagcttctccccagaaaggcctatccaaaccagcacctttcaacatacaccttactctctcaatgagagttctattcattctttcagcaagaccattttgctgaggtgtatctctaacagtgaggtgtctagctatcccatgttctttgcagaattcatcaaattgcttagagcaatactcccaaccattatctgttcttagttttctgattttgcattttgtttgattttcaatcagccttttccaattgataaaggcattaaatgcctcatccttgcttttcaataggaatacccacactttcctagagaagtcatctatgatgctaataaaatagctaacaccaccaagagtcttgatcctagaaggcccccacagatccgagtgaatgtaagctaatttctccttagtagtatgttgtccagtatcaaatttcacactgcagcttttgccatatacacactcctcacagaaacctagtttcccatttaatccaccttaaaacatcccttacttgtcaagttcagtgagccctctctcattaacatggccaagtctcaaatgccatagttgtacatcactatctgcattatttattgatggtgaagcattccctgttacagccgtcccaaccatataataaagaccattcttgagtcttcctctaactaccacaagtgaacctttcgagatgttaagagtgcccttgtcgattttgacagtataaccatgattgtcaaacattcctatagatagcaaattcctcttaagatcaagaacatacctcacattctgaacagatcttataataccatcatgcattttcat

SEQ ID NO: 232977 - DNA, 2017 bp, Cannabis indica
taatttatatattaaaaaatagttgaaaatatttaaagggacaatagcggcaaaactactcatgtagtttgttttgttgcacttaactcctcatgtaaatattttggcggtgaaactactcgccattaataattaagtgcagcgattagtctttcaatattaactttgtcaaaatgtccacgtggacggattttattgaagtcttatcttttaatttttaaaattgaaatttatgtttaaactttttataataatttattattttataaactcgtaatataaattatttatttcaaaaagtttaatattttttaagaaatgtaaatgacttcaggagaaaaaaactcaatcgacatttctaaaaaaagcacttcttcgactcattgccattattgacgaaccagaaaaattaagccacgcaatttgttacaatcgttaggaaaatttggagatcttccgccaatctatggttaggctatattcttcaaggttttttctttttattatttattttgaaaagaaaatggtgaaatgagtggtttgtatttctgggttcaagagtctttttttagtgttccatttcacaatgttttatgagatttttcagtaatgaaagtttttatatatgtgtgtgtgtattttttattaaataataataaaaaagtttatacatggatgtgaagaaaagcggaccattttggcagttttttttttacgtttgtaaaagttcttggagtatgctctttatattgtttggtggattattaatagtttagtaaaagatgattattttattgtttattttgatttttttattaactatttattttggtttgttgatatgtgaaatgaacttacgcacatggtgggggccatatttatatataagttttgattgtttactttatatatttatttatttatttgtgtgtaaattgttttgactgccttaaagacactcaacaatattgacttaagaatttctatttctttttcttttaaccaatatacttgttaaacaaataaaggtggcaatactgatgttgaaccagacttggaacttaaggatactcaatgcattggcaccaaacaagcagtccaagaaacttttgaaagtcagattgatagtgaacaattcaatatatttgatgagtggtgggatagtggactggtgactcaaaaaactattgagaaagacagagtggaaaaccaccccagtggaaaatgccaatggtgagactagtacaacacttgaagaagagtttacatttgaagaagaagaatttgtacaggatgtagaagctgagaaagagattggtctacactctgatccaggaagatggtggggcgcaataacagactttggccaccaagttgttgacgatggagattctgatagtgtatcttctaaggaggacatgcgtagcttagacagtgattgtgactctgatgaacctgcacaaaagactaaactagaatttaatcctgaagctagatttgagggattcaagttcttacccgaaatggagtttgcatccgtcaccatccttagaaatacaataaaagaatacttcatacagattaatagggaatatgtgttagtagtcaatgattcacgtagggtgagagtgaagtgtaagggtgaaggttgtgaggggatgatgtttgcatcggtgcatggtggcagagatagtttcactttcaaggtgaagacacttaatgagaatcacacttgcggtttagtgtttaataatattcacgccaactcaacttggcttgcgaaacactttattgacaatttcagattaaatccaagcatgacatatgctggattccaagagattacttcaaaaaccaagtttgcttgtgcgtcaagtcatttgatagggctaaaaccaaggctagaaagatattgcaagcatcaattggggaacaatttgccattcttgatgactactatataatgttgttgtcaaccaatcctggttccacaacaaagattttaactaccatgatt

SEQ ID NO: 232978 - DNA, 821 bp, Cannabis indica
gacaataaagttacttttgattctggatttttattcggtacgtaatggtgaaaatatctctctttctacaaatcaaaatgatcatctcgaaaaatagatcgtattaatactactcttgagctcaaatgactagcagcgtagttaaaatcattttttaattgctttcttataagttattttaaaatacaatttagttacttttatttattaaataacaaaataaatttttagtaatccatgaaatgtggttggtatatttaattttttagtagaatttgtttttgttttttttttttttttaattgtaactcatagatattatttggtttccttacaagttattttatgaactataaaatattttttaataacttataaagtttttttttttttttggaaaagcaaacctataaagttgattgattatagctaagtttttacttttgcttatagctaaaagtataagataagtataaggtttgtcttttttttaccgtttggataactattatatgaaggtattattttaatgaaaagtgttttaaaatgtttggatatcattaaaaaaaaaatcttttgtgagtaaattaagaattatgtaaattattttaatttttaaaataactttttaaaagttcttttgggagaagctacaaatcttagcttcttccaaaagaacttttcatttttttatccaaataaccgtacaaggacttttaattttaaaaactaaacaagagcttataggaactaagccaaacaagacgctattgaattttgtttaagttcaaaaatgaattacttgctaactaaatataaaa

SEQ ID NO: 232979 - DNA, 1438 bp, Cannabis indica
gaacatcccaacatagagagtggaaaccccgcgaccaatgtagccaaccacgagagggcgatgatcgcccgtgaaatagtaggtccagggggagaagggaagaccccaaagtcaacagtgactaccgtacaaactaccccaacagtcacggtgatgatgaagctgaaattcgggctaacaaccaaccaaatcctaagctgaggcttatcaaactggacgaccgtatgcccctaataggcagtatcaacctaagaatttgccccaaaggggtagagatgacaaagtaccacccccgatcaatggaagggctgacagtcaaaatgtaggaggaaggccaagaaccaagtaaatttttaaacgtgtaggcccccaagggggtagagaccttagggatgccctcaacagaaataaggacaaccgcagttccaacatagtaaatccacttgggcctgttcaaaaaggccaagcaaatgttggcattaacgttgctcaaccccaagaagccacagattcagtgatccaggctcagttggacgagttaacccaattcgtcaacgaccttactacaccaaaactcactgacttggagctggaaaggaggagagggtctgccttctccaaacgatcaatgacctccccattctagcgaaattcaaaatgcccacttacaagtacacgggtagtgaagaccccctaacacatgttgagaacttcaaaatgcaaatggaccttcaagggatcaaagttgacctcaagtgtcaatcttccctgcaaccttcacggacacgacacaacaattgtttactaagctaccccaagggagaatcaccccttgggatgagtttgaagggttattttatacctaattctcttcagcccaatagatactggtgggtgacttggttgctatcaagtaaaggcccgatgagttactaaaagactacatccaacacttcatgcatgaagccaccgaagtaaagaacctaagtgacaacggcaagcaagcaagccaactcattctagacaaacttcctcgacagagctggtgaatttattaaactagaagaacctgagcgaaacgctaaaggcctcaaccaagcagggaaacaagaacagagcaagctctagtggccaacacccccagggtcaagggggcaacaataaaaatgggttccacaatggaaatagggccaatgacgataatggtggaaacaactttattaacaacaaaaagttaaacaaagcatcatcataaatgactatgtcctccgaattgatataatcttcagccacgtgcgacattccccttgtccttgcctacgggtatgataacctatcatcccaccaaaggatgacttactaccgagtatgtagtagttggggtcatcccacctagaaatacaagttagcatgtcatggtgccaacgcaaagttagta

SEQ ID NO: 232980 - DNA, 5033 bp, Cannabis indica
gatgagtttcatggttgagggcgaggctgcaaagatgcaacctccgtttaataggatgataaaccttcagcagaatccgaatgcatatcagaaacatactgagaagaatgatcatcagcacttgactcttccttcttgttattacggcacctctttaacacactcctaaggttgtcagggtcgacttgcctcttataagtcttactgaatattgcagcttcatctactagatcatcaataatcacagctttcccttttaacttagtagtggccgaagggtcagtggatggtggactaaaattagatttagcttcagagggagttagtgaagtggggggaaagtatggtggttttgaagttgttatgggagaggtagtggccatagggaaactactggggacataggatgggtaaggtaaaggtaactctgggcatttaaccttagtgctactttctgttggatttttgtgggctaactcggcagaggttaaagagtttggttggggcaaactgcccaaagtcaaatttttgtggttgaaggcagtgggtatagaggaagtaatggtctttctggccaatctagtaaggaaagggtaggcactggctttggagaaatcggtacgatggcggtcatatcctgaaattggaagtttatctccaatcatttggggtccatataacaagtccggatcaactcccatgtccacaagttccataaaagcaatacacttaccaaaaggatgaccaatcttgccacaatgaaaacaaaatactgggagattttcatatctgaattccaaccagtgttcatccatcacccgaggcagagacaccatctttccacgcatcagaggttgagttacatcaagacgaactctagtccgcagaaaaaaaaccccatccttcatgaggcgagtcttcgtaaacctcaataaactccccacccattcacccactttcttagctaaagcacgggacttgctaagaaaagggaggcgatgagtttgaacccaaaattgagcaaattgaaagtcctccttggaaatattctgtaaggaagttggggaatgcaataggataagttgattgaagaagtgccatggttcaccagaggaaattctttgcttatcacctacacaagccaaagtcaaaaggaaaatatcagaatgcatctccgacactacaacttcaaaacgacatttattgctccagaactctcccatttttttgataaaagtcttcgggttaacagtattagagaggcatcgagcgacgaggaataatttgggaggctgatttggatcatgaagatcggattcagaaagggaatgaacattcctttctttctcagacaaacagagagtggaattcatgtcttctaagatggattccatacaaatatcagtgaaggagaaggagaatagaaaacggagatacaaatcatacagactgttgagatatttatatcgtaattcaggacacaacatggaaaaagtggtgcaacaagaggtgtggttctggaacgggaagagatggaatagtgggcagttaaacagagtcatgggagaggtggagaacaggggaggaagacgaagacgagaacctagaaaaccagggagataaccgctagaaactgcaacagggcaaaacccaactcgggcactaaaataaaaataacatttaaacaatataaaaattaattacaaataacaaaaaatcaacatcaaaactataaaagtaaaacataaaaatatatcaaaatactgtattttatatacaaaaattttaaaaattataaaaacatttataattccttaaagttgtatttttgtattttttgaaataatttattttctttttcacctttctaatttttttaataaaacacaaaaagttacacttaaaactatttaaaatcttatttttgttttgttttggcttttgttttcaagtattaaaatcttgtatttaagtgcgtagaagttttagtctcatcgtaataatgaatacttaatatattataaaaagaaaaattggcagagcaagagattttaatataactccaaaatactgtcatttaagcttatcgtgcataataataaataaacatagaagaattgtcactatgttattcaaaatggcacaacaatacatattgttaaaagtaatggtaaatatcattttatattctatattttacaaaaattatcaattgcactttttgttaaataacaattcagatattgtgttattcaaaattgtacaaaataaccctaagcttaacaatatgtctttcttattattttttttatttaataaatatatgtaagaaaatagaaaataataacaagttctaagaaaataaaatttaataagaaaaaattaaccaattgtaaaggaacaaactaaataactaaaatcattgcttgaagtataatgaaattttttttatccaaacaaccactaaactacaaaaatgatgcccaaacacagccaacaacacaacactcacatagtgttaataaggcaagaatgtcctcttctcttttattttcacataccatcctaacaaattttgcgtatggtcttgaggcatccaacaactattacatgagattttgttttcgaaaattataaataaaacatagtagaaaattactctacatttgggaagttacaactaaaaatcaaattgcagattaaaagttttgatttaatgtttagatgatgttggagtatggatgtaaaaatcaatatatttccatccacttacttatttattaatgttaaaaactattactaacactaattgattgtttacttagaatcgttgtgtgaacatgattgcccaccttttcaatgctcctgtgggagatgatgaagttgcagttggtgtgggaaccgttggatcgtcagaggccataatgcttgctggcctagctttcaagagaaaatggcaacaaaagagaaaagcagatggaaaaccctttgataagcctaatatagtcacgggtgcaaatgttcaggtgatcatctcaatctcaactaactttctaaacacaatgtgttttcaaaataactatcagtcaaatagtgtctttaacatttatcttttttatctgacaaaaaataaattatactttcttaaaatgaatatctatctttgccttttgttgattggttgaggtggtggaataatcaataggtatgttgggagaagtttgcaaggtactttgaggttgagctcaaagaggttaaactgaaagagggatattatgtcatggatcctgagaaagcagttgagatggtggatgagaacaccatttgtgttgcagccattcttggctccacattgactggtgagtttgaagatgtcaaaaaagtcaacgaactccttaccaagaagaacaaggaaacaggttgggacactccaattcatgttgatgctgccagcggcgggttcattgcgccattcctttatccagatcttgagtgggatttcagattgcctcttgtgaaaagtatcaatgtgagtggccataagtatggacttgtgtatgctggtgttggatgggttgtgtggagaagtaaagatgacttacctgatgagcttatcttccatatcaattaccttggatcggatcaacctactttcacccttaacttctccaaaggtagttttaaatttccagtaaagttatttgtttgcttgcttcaatatttggtgctcagatgtttactaatatttttctcataaacgtccacatgtgatattgtaaagtgtttttaatattaatatttatgttgactcttcatgtgacattatcaattggaaagtacaacataaatttataaatcttggctaaaagtggtgagccaagtataatcaaatcaatgaatcgtagaacttctataatctaaattaaaatgaattattctcaacattgatagctattgtctttctcataatttgctgacaggttctagtcaaataattgctcagtattatcagttcatccgattgggatttgaggtcagcttttgttgtctcatacactctaaattcttttttatttagtcttgaatgccttgtatggatttatacatacaaattagtttatttttttattaagttttgatgtcctaacactatacatattataatttcaacagggctacaagagcataatgataaactgtatggaaaatgcaaaagtactaaaagaaggaataaagaaaacagggcactttgacatagtctcaaaagacataggggtgcccttggtggcattctcccttaaagacagtagcagatatactgtgttcaacatagcagacagcttcagaaggtttggatggattgtaccagcttacactatgccagccgacgcccaacacattgcagttcttcgggtggtgattagggaggacttcagctgcagcttggcggagaggcttgtctcggacattgataaggtcttgaaggaaatggacagtctaccaagtcacattatgtcttctgaaagagcccatgttgctttgattgaaaatgatgaccatgtcaataagactgtgaagcagattcaagatgatgtaactaggcattggaagcgatttgttaaggaaagtaagactggagtatgctaagcttccaaaaaccgtcaaacaacaatttatttcgctagaataaaaaaataaaactactagtactgataaagaactacttaaatcatatgatatggtattagtgtgtctattatgagttttgatatatatatatgttgattgtttgtactgtgtgtagttcatggtggtagtaaagttatgtattttattttataatggtcttatacactttttttagcagttaatgaatgggtttggttatacaacacgtgtaagaaataattaataactcatagataacagaagttatttggtcaagttacaaagtggtaaaacatgattatgttgggattttataccctaaataaaattcattttaatataatctaatttgttatcaatagaag

SEQ ID NO: 232981 - DNA, 953 bp, Cannabis indica
gatcctcgtaaaataatttccaacacccgggacctagacccagaaccgggacccagacccggacctgagactcgggaccagggacccagacccaggaacgggatcaatgcaaacccaagacccggaccccggaccgaaacccggaccccggaccctgaacccggtcccgggatgcgaactcgggacccgaaccttgacccggacccagactcggacctggaccccaaaacctggacctgaacccggacccggtacccaaatccattgatataaaattaaaatggatataaaattataagttaatattaaaattcttaaaaaaaataaatagtcgggtcggatcagatccgattcgaataagtcaggtcggatctgatccgatccgagtatctgatctagcaggtcgagacggggcagatccttacatgatctgaattatgtcgtatcatagtcggatcagatccgacccgacacattgacactcctaactaaatataatatttagattttgaatgtagtaaaacaaaatatatcagatgtttgtagttaatcgtatataaagaatttttagttaaataataaattcatattcaaaaattgagtttaatagaataagaaaataattatagaaaaaataaataaataaattagtttgaagatattttagtttgtcatgtttcttttaattatatcaatattatgtaaatttataattagttttgattttgttttatataaatttataaattgatacttgttctactttattttaggaattataatttatgtagagagtttagaattttgatagtagatttgattaaaatttagagtttgtaaagactttgatacaagatcggtgaaatagattttttatattggatatttgggggaaatttacatatatactgtttttggaccaaaactttacaaaaatactgggacacgacaaa

SEQ ID NO: 232982 - DNA, 969 bp, Cannabis indica
ttcttgaaggctgagaggattttcacgagcagtaatgttgactataataacttcatattcttgtcccaatcctccaagaatgtacagaatgaaatcatcgtcagagagttgttgtccaaccgcagcaagagcatcaccatgctcttcatcttcaagaaatagtcatcaatggatgatgaacctttcttggttgcttgtaagaggccacagacttgcattattctggcccttgatcttgaagcaaatatttgagcaaaagtactccagatctcgtgagaagattgacaattgataatgtgtccaagcataggttcagaaacagaattcataagccagtgcataaggaactgatcaaacctcaaccattgaagatattctggattagaaatgttaccttcaagaaattgaggcggctgatgaagtgttcctaagatgtatccatcgagattatatgccctggctgcagcaagaaccagagacctccaaaaagtgtagttcgatctgtctaagcgaagatttagcggaagcaagttgttgttgggtaatcctgctggtggagcctcatacgcaggaggattcggtggttgagcgttcgtagaagcgccattgccgtcgacttgaccttggttactggagaaatttgctccattcgacgccatgaatggcaatctgataccatgtaagaatagtaagagagagaaagatggaaagtagagagaagtggaaaaagactcatctgaaactgatgagaccaaagcctttatatagaggaatgaaataacagagttggttacaacagctggcaaaacagctcagctaaaaaacagttatacactaactgaaataacagacaaagtaactaacataatcctaacaatacccattctatcagattctatttcttttacagttaaaaattagcatttttacccactgaactttgaacaatacaaaattttgccctctttt

SEQ ID NO: 232983 - DNA, 985 bp, Cannabis indica
gataactaatcagattgtaaagagttttatttagggcataaaacccaacaaacaactcccttaaaaaaagaagcctaaaactgggagcaaacccttgagtgattatgagcctcgctttaccacctactcaattctcttggctccaagagaagagacatacgaccacttagtcaacagtgtcggatcgcaaagctcttcctttcaaagagttagggaagagggacatgaacaaattctatcgttaccacaacaattatagtcttgatactaatgagtgtaattaattatgggatgagatagaatttctaataagacaaaagtatgttgttcttcagcggtatgtatgacttgatgctccagttgggggcaatgctcaactctagcctgtgctagttgcaagcaggttggagattgtgattggaggccctcacttagctgagaattcaaggaaggccttagaaaggtatgcaagatcactttgacatgaaccaagagttgaagtcctacaggtcgcggaacaccctccaaagtctcagtgctatggatgtgaactgatcaccttcaaagaattagactcttatcatgtcagctaccctcacaacgatcctctagttattgaggtctaaatagctaatatgatggtggccaaggtaatgatcgacgacaaagcatcattaaacatcctattcaagcaagccctactcaaaatgggtttaactttagaagacctagaaccatgagaacaactcatgtatggttttagtggagctagtattcatccatgtggcaagatcaagctaccacttacagtcgacactgccccaaagtaaaccaccatcatggccatgttcatagtggtggacatgaagtctccgtataatgtgatactcagaaggcctaccctttacaaccttcgagccatctcttcagtgtaccacttgtttgttaagttcccaacatcaactagtattggttgtctccttag

SEQ ID NO: 232984 - DNA, 1487 bp, Cannabis indica
aggctgcgtatcttttggccgggagttgggtcagatgagaaacaaattggctcatcagctcgaaagcaaagggagcgagagcaggatcgacgaagcggttgaaccaatccgtcagggggtccatgttcaggtcccaggcatttttgaaggcctcctcgtgtaaagaattttgttgagcttcccacaagaccttcttcaaggcttccacctcagtattccccctgctatactcatccatggcatagttatgttttgcaattcgaagttgatgcctctcctcatcagcggggaccggagtaagggtaatgccaggaggcacgacatactcctctacttcaggaggaatccctgaatctgagctaacgactggggtgtcctttctcctgggcttcttggaagactcagcctcaaccattttacccttgcgcttatggtcgaggggaaccacaatctcgccttcctcctgcttcttgtcctccccttcctcgtcgatcaagacgattgtgcctaagggggcactggaagatgacctccccggggtcatcatttgggcagacgccggaggaagagaagagtccgggctgtaggtctcggcaagagtcgccaaaagatcttccattggcctggctgcttcaaaaagaaataaacaaaatgttagaatagctataagaaagcctgcgcctgacgacaaaacaataaagctagtcctagcaaagtctttaactacaaagttgtccgaggggagaaactagctagaagacaagtaagctgagtgatccagagggatgggtgcaggaggtttgaaacccatctgggatcgacctaagaaatgacctaaatgggaaaaagtaaaaggccttggcatgatccccccatcgagtggggggcatccttaacataagaaggcgcgcatcaaactctataggcctataccgggaatactcttagaccgaaggaacatgataaaccgttaaaggagacttactggacccggatgtgctggcgtcgggagccccattgttgggaaccaggaccaaggacttaggcctggagggcgcccgatctgcgcctgcttccaagcgaagggtcctcccggcggcggcctgagctttgatataagccagatcctgttccctcctaaagaggtacttctggtaccggtcctctgccgaggctataatctccgcccggagcgctttctctgtggccggggtgcaaacgttagggcagagaaccttggagagattaaagtcatccaccgactggctcccggagatcagtttggccatccgtcagttctccgtcgtgaccaaatccccaatgttgagatcttttttgtcgtaagtggagaaggtcttggtgtgttggagaaacaaccgagtaggagcagtgcagagaagaggcggaatcctgacctactacgtgagaagctccgggcggtccacggtttgaaagccagaagaaaagaaaaagcggtggcgatactc

SEQ ID NO: 232985 - DNA, 519 bp, Cannabis indica
tctcagtcgaaggtcgaggaattatctcgcgacttcaagaccgaggaggaaaatgggaagaagcagtatgaccaagctatttttgactatattatacgactttatccaaggtgccagattttgacttctctatccttggagcagaggcggctgagatggcagaagcttttcgtgttatgtcgcctactcagacccaggggtgcggaggaaatcttttccccaaggaggcatagattgcgaatgctgaggaagtcgctgatggagctgtcagcaaggtcgcagatggctctactgttccaaccgctccaatcgcttaatttatctaagtttttatttccttagttattaaacttctttagcggtacatgggtactcgtgttttgtacttggaaaaatttcactttgctttctttctatttcgaacagcatataccccttcgaggatatttatttatttgtttgctttttgcggtacacgtgtactcgcatattctacatacttaatcaaaatctgtttgc

SEQ ID NO: 232986 - DNA, 1343 bp, Cannabis indica
agcattactatggaattcttttccaaaattgttatttttaaccaaataaaagaatcaggcccattattattccattctattcctttctggccctttaccatcaaccaaacgggcctaaatgttacatttaatattaaaatctatttcaagatgaattgtcatgatgaaagaatcatcattctttcaaaaaaaaaaaaaaatcaccattcaaaagacaaatattaatagagtttttggcagttaagccctcttaactatcgttttagttgcacttaattttttaaattcaaattctagcggtaaaatccttcaaattattaaactgttagaaaatttaaggtgtcatttgattagctgtcaccatagactgtttacgtatactcttgtatacgtgacacgtttatattagtatacttaatattattatttaaaaattattttgaaatttattttaaaattagataaaattataaaataaaaaataaaattattaaaaatataaaatattataatttttaaatgataatattaggtttatcaatataaatgtatcacgtgtacaagagtgaactcataagcaatccaagttgaccgttaactgtgaaaagtagatgacattttaaatttactaatggttgtgtagtttggagggttttacctaggccggcacataaaaaccgctaaaccgtagaaaccgcccaacccattagaatccgcccgcatagaaccgcccattaaaagcctgcaaaaattgggttgggttaagttttaacccgctatttggcagtgggtacgagttagcctaaaaggggcgggtccaatccgtacctgctatttttttttaaaagaaaaattataactaaaactaataagaaaaaacaaaaccctaaaatttaaaactaattatatttatataaaatttaattcttaaagtttatatattaatacatacatggacaaaaaaaagtgatatagaaagcaaaaaaaaatattaaaagataatataattttgtagaattaaaaagacacattaaataatttaaaataccatcaaattatcacccttaatgcaaaccatcaaatcttaagagtgaaagcaacgtgaaacaaatataaaaagtgcacttgagtgaaagtagtaaattgaaatataaaaaataagcgaaattggttaggatgtaacacccgaacttatcatttactaaattcaaaggataatcttaatatattataactttattaacatatggatcggtatcccgagtattaaaatatgatttaaaagtattttactaatatatacatatactattttttttatataaacatacgaacaggcaact

SEQ ID NO: 232987 - DNA, 2086 bp, Cannabis indica
atcattttttttgagcaggagcatgagaaattttttcatgggcagtaacctttgatttcttttcaggaggagctcgctcacgtttcgacaattgaggagcaaaatcgaagtcatcgtcttgaacaacaggacgtttgcccttattcctattagctacagatttcaaccccattttagaacttttctttggcacaggggaaggagaagatttcagctatggaggttttatttactgaaaagaaatcgaaaataataaaaaaaaaaagaagagaaaaagataagggaatgatgtaaggtatgattgatataagtcatcaatcaatgacgtgtatgcttgcatggattgtgtgtgcaagtagtaaaagtgtaataaaataatgttaatgagtataaatattgatttaaccgtgtaaagatatatatgtaataaagtgtgtattttgtatttttggtgtaaaaatttcttctttttactccccatggatcattttcgatttttttagaataaacctcgtattataaatcaaaagtttaaagtaatagagaataatattgtagaggaaatttgtttcaactaaacataatcttcatccaactctgaagaatgctttactaaactataagcggctttattatatgtctcttcaaacataagagattacaactctatcgaaaagggataaaaaataaatgacttctacaataatatatgtaaaagaagataaagctcatgagagttacttcacaactgtggaaaccatgaagagcatctgttttcactatcaagataggtagctgcaattgaaaaacccaaagtagactacgaaataaagctatagcttccatttcataacacttataacattccgtaagtggctttgatagaatagcaaggactcggcctatagtatctcggatgacaagttcaataccaattcgacgagtggcgagattgacagatgcatctacattaaacatgaggcctaaaccagctgatggcttccacagttctggtcgagaaggagtagcgggtggtgcaataaatactagatcagtttatgctctggctgcataaaatgtagaagaaaagttacatcataagaagaaagagttgctgcaggcctggcatgaaaacaaagaacgagcccattgcgttctgtccaaattgtccacatgatacaaattatagattcaagtttcgacttagagaataaggaagacaaatggaccaaaaaaaacttcttgaaccattgaatttttcttgtgaaagtcataattatagtttgaatgtctccaaattgatctcacatatttacagccaaacaatacatgtccaatagattaacaggcatgagtacaacgggaaaaagtagttgttgtaatgactttttgttggactaactttgaagcaactagtagagcatcctagattaccttctgttgacggagtttttcgtcaactgatctaaaaagatcgtaaaaaataaatataattgcgatgaattaatttaactaaatataaccgcaatatataaaatggacaatagggatttatagtagttcagcccccatgtcgcgatggtaatgaggctacgtctactttaatttttattaatttagtctgacacgtcagagttatattctcaagagtgtgtagataataacacacaaatagatttctagattaaatttgtatcgagacttatgaacacaaggctcatgggagactcaatattcacaaatctaataaaatggtggttgtgaggaccttggaaagagtaaaataagagaatgctcgctgttcttgaaaactatgtatgtcaatggtgtttgtataaattagtgtcgacaaagcattgaagacgtaaggaaaaagatgaaaaataatgtagtgcccttagcctccgttcaatcaccaaatgattcccccttcaccctagcctcttaccatctttatataggctttaggatttgttagtgatcctccacatgtcggggtgtctcactaaaaaatcttgtatctgttacaaaatttatgaataatacgcaagtgcacgtaatcaagtagtaaactcacacaggtgag

SEQ ID NO: 232988 - DNA, 694 bp, Cannabis indica
tagtttaaaatgtattggtttaaaaaaaattaaaatttttaagtataaaaaatcaaatttccctaatattttgagttcaacatggaacacgtgatagaaatatttatttagaggggtatatatcaagtgtaatcttgagatttagctttgggctctaagcatcactgaattttgtgcgcatagataaagactcatacactaaatcaccacgcgaatgtatgggtgaagtgttattttttaactaagaataaaaattatttaataaaataaatattatttattaattaattaataatttattttttataacgttgaaggagtaaaaataatcaatcaataattcattcttttttctaccatgaaataatatttcccgtgatcacattacaattttattttaaatcgatttatctatataagtcgtatcagaataacagaagaatacatttcttcaacacaaaaaaaaaaaaacaacaaaaaaaaaaaaaaaaaaattctctttaaaaacttttatcgaatttctcgaagcaattttattggatagtaatagatcagcaatagcatttagtgctaaacgattcgtacatacgtgttttttatcctggggacgtcgcggctgctagactgctgtgcacacttcaagtaaagctgcgaaacgtcttaaagaaaacgaacatagtctacgactcaagca

SEQ ID NO: 232989 - DNA, 599 bp, Cannabis indica
ctttttattcatttataaaaaaggaaacaatataatcttgaaatggaaacagcataacctcgaaatgaaaacaatttttataaaatcgaaacagtatatatggtacttttccaaattttttttaccaattgatacttgatgtttcacatttaagaatcattaatttttttataaaaattcaatttataataatgatttaatcataaaagttaacaggttattattgtaacgaatgctaatacatacatcgacacttggacggtttatttatatatttatttttaaaataaccctaaacacctaatatatataaatataatttttattagataaaattttagattaaacaaatatttacagttcatttttatttacattaaaattaatattttattgatgtttattatgcataaaatatatgcataattttttttttttgattttaattcaaagttaaagaatattcaattaagtaatacttaactaaagaatatttaattaagtattagtatatattttgttaaaattaacgtaaaaattaaaaaaaaaaattataattaacatgaatatagatacagatatagattaataattaaata

SEQ ID NO: 232990 - DNA, 855 bp, Cannabis indica
aaaaacaaaaatctttaataaaatatctaactataccaactctcgtgtctacttggcaataaaatagcatcaatgccaaaaaagtgttactttgaaaagtacatttttaaattataatcttttttttttgaaaaaagaatattttatttcctctaaaagtgattatattagaaagatacattacttgttcacaaaggcttttcgatatttctcttttaaaaattatatttagttttacatttttttttttaagtttaaatattatctttttatttttctattatttttatattttaagatgatataacatatactcctatttgtataaaaaatagtagtttctacctcaattttctacttgaattagaattatataaatataaaagattgagtgattctacataaaaggaatatattgatgcactcttggcttatttcggcatctagaaaaatttttgtgtaatttttttcatattcatatacgttatagttatttaagataacttacgaaattttgagaaattgagaataatttacaatatagaaaataatgttcaaacaatttattttacactcgtataatataaaatagtcacgcgtgcaacacactgtttaaacttatttttcggcgtgttaaatttttccaaatttcttaaaattctgcaagatgtcttatataactataacgtacatgactatgggaaaaaatttgactaaaaaattattttaagtactaaaataaataaaggtacattaatctatccattttattgggtgcattttagaattttcctaaaaattttgtcatttatctaataaataaaagatcatatacattatagaaaacgacaccgt

SEQ ID NO: 232991 - DNA, 707 bp, Cannabis indica
taggcttgtactgctacaaagtcacgcccttaagggttgaagaatgcagaggccacatatcagaagcttgtgaacaacatgttcaatgatcatatcagccgcaacatggaggtgtgtgtggttggcatgcttgtcaagtccaaaaaggttgggggcatatggaggacctaaaagaatgcttcaaaatcaaagccattttggatatgaagttacccacaaccatcaaggaagtacaaagccaaacaggacgcactgttgcactaagcaaatttgtgtccaagtctacagacaaatgtgtatcctttttcaacattcttagaggcaacaaaaatttgagtggataaaggaatgtggaactgcattctaggagctaaagaaaaaaattagctcgaccacctgtgttgtctaaatcattacacaaagaagagctaggcgtgtacctagcagtcagagaacatgttgtgagtactcacaagagaagaagatggtgtacaacgccttgtatactacattagcaagagactgatcgacgctaaaagtcagtacccactcatggagaagctcacccacaacttgctcttggcttctaaaaaggtaggccatactttcaactacatcgatcaacagttgcggaaggttctacagaaacttgaagcatcaggtcgaccacccaagggaacaaatgccaagctctcaccagcttcatg

SEQ ID NO: 232992 - DNA, 1183 bp, Cannabis indica
ttttcttttagcatcagatagataaccgacgctaattaataattatttgcgtcagtggataactgaagcaaaaaagtgtgggttgacttttgcgtcggtcaacaagtttgaccagacacgttgaccgacgcaaaaccccttttgtaatagtgtcaagaacattgactacaaagctatgtcaggtcgagtgcaaacctgagcatacatcaaactccctactacacttgcataagggatgttcttcattgctcctctttccaagtcgttcttaggacattgttgcttagtgaacgtgtccccttttagaattggaacaaaaccagctttacataaatctgtgttgaaccttttgagcacacgattaatgtaagctttttgagataagccaagaacttttcaattcttatcacgatggatctcaatccccaaaacataagatgcctctccaagatctttcatatcaaaattggaagacaaaaaatttttggtctcatttagtaatgacaaatcactgctggcaagtaaaatgtcatctacataaagaacaagaaaaatataatgactcccgctgatcttcatattaatacactagtcaaacttatcctcgacgaaagcaaatgatatcacaaccttatcaaacttcaagttccactaacgagatgcctatttaagaccataaatggattgttttaacttgcaaaccaaatttttgtttccattctctttgtagccttcaggttgagacatgtagacctcctcattcaattctccattcagaaaattagtttcaatatccatgtgatggaactctaaatcaaaatgcgcaactaagaccataataattatgaatgaatctttagtggaaacaggcgagaagatttcagtgtaatcaataccatctctttgagtaaagccttttgagtgcattggataaccaataaaacaacaacgagctgttctcgaatctaactttttcaaattaggatcataaatccttacttcagttggataaccccatacacgaagatgattcagactaggctttcgcccagtccacaactcaaaaggggttttggaaacagatttacttggaacatgatttaaaatataagttgcagtcataagtgcttcactccataaaaactttggaagatttgacttctaacatatccatgagagtgtg

SEQ ID NO: 232993 - DNA, 929 bp, Cannabis indica
gaaactttattttcttagctatcaccaagagaaataatgtgggtgggaagatattatagatagcttcacaagagaaaaaaaatacctgttgtttgaattatctatagtaaaattgttgccaaccaagttactgcatcaaaaaggtgaagtataaatatgcagtaaaacaagcatcaacgtaacacaaaagtactaaatcatatgggtgtcatttttatggatgaaaatgaaccaaaaattaaagtgaaaaaagaaaaattaatatttcttgaaaggcatacatctgtaaattctgttgatcgttaacccaagaaggaatgcttcctgcaaaattattgtatgatagatctctgcaagcataagatatagtacatcagtgttaattttagagtgattaccatgaatccttctaaacatactgaaatattatatatgttaacttacatgttgagaagagatggactgtttttccaagggaaggtaccatttagactattgtttccaagaaacctgattaaaggaaacaaaattacttggtttgatatattccataatagtagctactatgatataatgcaattaaagagagacaaggatatatattacttacaaataaataagtgaatcaatgttgaaaagagagtctggaatcggtccatttaacttgttaaagctcaaatccctgtaaagataaatgcacgatttcatagttagaaaatagtgtatgttgggtagttttgagtcccttaatgacttacagacgttccaattgtgtgagtttgccaatactcgatggaattgtgccagtgatatcattgtttctcagttctctgcaggttatatacactgtgagttgttaattagatcataattcaagagattggttttgtgttgagaaagagtgttacttacaaagttacaagagactt

SEQ ID NO: 232994 - DNA, 966 bp, Cannabis indica
  modified_base (16)..(16): a, c, t, g, unknown or other
attgagagaagtatgngtaattctggtggcattcgaaatcgtcccaaaagaatggtattcattggcttagttggaaaaaatctgagcaaacataaaggagtaggaggtatgggtttccgagaccttagggactttaacattgctttattgggaaaacaaggatggagactcataactaatcctgagagtcttgttgctcgaatattcaaagctaaatattttccagagggtacgtttttatctgctgaagtgggagacaacccaagcgacatttggagaagtgtgttagcatcaaaagatctgatcaaggcaggtatgagaaggcttatagggtcaggtgactctgttactgttctgaaggagccgtggcttattcatgatgatgatcctttcatttcttcaactcacccggtgctgaatcatgctaaggttagctctcttatgaaaataggattgagggagtgggataaagaaattctggaggatgtgttgaatgaaatggataaaaaattagtgctcagtattcctctaaattctgcagcaaacagtgatggttggtactggtttaaagacaaaaatggtttgtacacagtcaaaagtgggtatcattgccttcaagaattgaaaggggaatggtctcaagatagcaacttgggtttttggagagctttatggcaactcaagttaccccctaaagtcaagaactttctgtggagaacatgctcgaggtgtctgcctacttgttcacagcttcgaataaggcatgtacagcttgatactcgatgtccatggtgtaatttgactgcagaaacctctcttcacttgtttgttcattgttctgttgcaaaggcttgctgaagtaatgtgggaatatcaggtctggactcaaccgaagccacatttgcagcttggttccaagcaggtattgctaactgggatgctgcaacaaaaattgaagtatccatg

SEQ ID NO: 232995 - DNA, 754 bp, Cannabis indica
aaaagggttagagagtgagagaccatgagaattcctttgatgttctcacgagtaaggtcaaagtcaagcaacccatccctttgaagtccaaggagaatacccgcaaagtctttccttccgaattcactattataatttagtacttttttatgttcttcaaccacttgttctaaaaaagtgtctaatgctctaaacctccgagtcaatcgacctgtaaaccccgtaacaacatcaatccaactcaaatatttgctagggaaaaaatccccaaagctaaaagcctcaaaatcttccatgacctttctagtcagctctccaaatttgctcctaccattttcttcctcaaaactctgcccaagaatacatctagacactatgttgttagaagtggcaaccaacatctcactcagatttatacaacaaccttttctaataatcctattgaccaaaacatcagtctcttctttcctcacaaagtggaattgttgaacccttttgtgactcaagagttcgagaacacaaattttcctggcttgtctccaatactcaccgtaaggagcaaagcccacatcttgaccgccgtaacagaagatatcggcggctgaggttttgggcctgtcggagaaaacgacgtcgtgcttcttaacgatctctttcaccatttctgaagatgagaccacaagggttgggacttggcccatttgcaagagcattaatgggccatatttgcatgagagtgttcggagtgaacggt

SEQ ID NO: 232996 - DNA, 1097 bp, Cannabis indica
catggattgtgtgaccaaccaggaggtttttaaatcctggctatcttcttatggccttgacaagtaagaatctggatttactttgccaagctgatgtacgcctgcaggatttagaggcatgtttagtagcttatgtgagcgttaaaatttctttgcataagttatttgtgctagttcgatgccttgtacagtatgggtgcccccgaagttaccatgcagaaaagtgtcttggtcacttgctattcaccaagtttcatacactttgtttaggttctgtcttgcgagggtaccataggacgcacgtggaacgaaaagagtaactttaagaagttaatcagtgagcaagtggtttaaacacaataaatagattataaacattgttatttattcatgaattggtctttgtttatgtgcaacttacataaattgaatctacaagcttacgttacacagatttagcttctagatgtgaagtggctacccctgcttgcctagtaaagcagaggtcaccgttgaagaacggtgggagggcacgccaaaaaggccatgtatactagcatttttgtatcctaatgttgagtaagtagaattgctactttggagtagtattctgtaacctggttactgatagtattcgcgaaattgctttccattccattatcttggtaggataacgagctccatgttcttgttgtaccttcctagcttataggcttccttactagttatctttataacttgatatgggccttcccagttaggtgtgaacactattgttgcagagtctttagtgttcacatgcgcccttctgagcaccaagtctcctatgaataatttcctactcttaaattgtttgttgaagtaccttgctaccttttgctggtagccttgcaactttaggttcgtttgttctcttctttcttctactttgtcaagggactcttccagcatgatgttgtttatttgttgggcataggttgttcccctgtgagacggtggcactagctctacatccaacatcgactcatagccatagcctagagggaatggagtcttcccgatggccctcttctcggtagtcctatgcgaccatagga

SEQ ID NO: 232997 - DNA, 1892 bp, Cannabis indica
ctaaagtttggagtcactctgctgggcaattttatttctttccaacaaattgaactacaatgtaatattaacaagttctccaatcacgatctcaattcttgttctggttacatttccggtaacctttggtaagatcttttcgttttacaaacttctcttagatctcttcgatttaaagttttcactactaatttacttcccaaagtagtatgtaatcacactgttaaaatttcaattaactctaactgtcactaatgcctcctatccaaattctcccaaaagaaacagtattgcggcttttgtgttctgtatagacttcacattttcaccatacaaataatgtgtccaactttcagtgcaaaacaattattgccaatttaatatcataactgaaataccatttctcatactccttcaattgtctaagtagttaggcaaaaactctcctagactgtgtaagaatacaatctaatccttgtttagaagtgtcacgtcatactacattatctcctcactgactaacaatgttaacattgatacgatagttaacctttgtttcaattctttcaacctaattccactaagagtgtaaacatcgctcaacaaatattcgatagcattctgttaattccagaaaacctctaacctcagttgtaaacttgggttgaagtcaattctaaactgctttaatccttgtcgagcctatcaaggtactatctatatccatttcatgctctaagaaacctacttagagtcgacaaattagcatttccagcaattagcataaagtttaagctcctaaaatattgcaataccatccaaaaatacctctcaaatgccttctttgaattggaggaaatcagaatatcattaatgataacatttgcaaagtcatcaggtatgaaaaaatgctttggaaatagccttctcttaaatcttaaactggtaataaccagatcgaagaccgatctcatagaagatggtacttccctaaaatcaatcatcaccatttctatccttgacaaaggaataattactcttcatcatgagtttatttaatttctaacgatcaatacacttttgtaaagtttcattcttcttcttcacaaataaaactggcatactccaggatgggatacatagtccaacaatttcaagtccaacatcgagcatcccctgtaactgaaccttcaaccatctcaaataccattcgatacggagtttaagatataaactctggccaagtaccatatccatttcaaagtcaatctcccattttaatagtaactcccctggaaagacattcaaaaattctcagaccactggaatgtattctggtcccataggtattcttcataatatataccttactagttaagaaactgattcatccattccaaattaaatctcttgccttaaaccctgaaattgatgaagtttaggactcttgaaccttggccacaaacacgaatgggtcctcacattctggtccaagagttgccatctttctttcacaatcgataattgcattaaactttacaaatcaatccattcttaattcatcctcaggattctctaatcttagctcaactattacaactaagcattcctttcttcccccacaactctggaagggatttgaaccacctactgtagaataactagttctacagtaaaagtagaataccgtaaccacttagcaacacatccttaactttatacaatcttccaatcatccttctcgaaatataagaatacgttgtaccaaaatcaattaaaactattaacaaattatgattcataaaagttcagcttatcacgttggaaagaccagcaccagtctcagtctaggtctaacaaacacccaaacaaaatctaaaatgtcatcaccc

SEQ ID NO: 232998 - DNA, 632 bp, Cannabis indica
gagagagagagagttttgaaaatcactatgaaaaatagatagcttttttgtgagattctaggctagaatcacatagaattaggttatctgacaaagttctatgtcctcttttaatcctaagatttatttaaatatttttcaatattcttattctagattaaattgatacctactcacaactctcactcaacactagttgtttagtctagtgcacactaaagcatacataagactttttactgttggaacttattttaccaggcagggccgaccctaagcatagtgctaggcccgcccctaagatccactcattttaggagcccaaataaaaaaaaatacattttaaaaaatgtacatttttttttaataatttttaaaaataccatttatccttatagtaagagtccaaaaaatttttttagcctatgactcatttcaaccaagatctagatttactaacatgtatgtttgattataaactataatctaatatcctaaatataaatttcttaaaattataaaataaacacataagagattaagaaatccttacattgatggcagtagaatataattactcatttcattaagatcactagcccttaatttctatctgtagcagagcattatca

SEQ ID NO: 232999 - DNA, 1215 bp, Cannabis indica
tcaggtttcaaacacactttactgcattattttctcaaacactctgaagctctctctttcttctctgttttcgaaattcccttgagtgatagagtagtgcccacacacatcaagtggtacctcactcatagtatgtaagccagtggaaaatcagtatcgaagaaagagagaaaaagatccagattcaaatcttgattatgctttgctacagaaaggaatcaagggctagagatctgaatgcaaggagtcattatattccgctgcacccaatgtaaggttttcttaaactcttacgtgtttatttcattgttttagaatttatattaggatgttaatcaaacatacttggtagtaaatctagatcctggtaaaatatttccaacaaggatgtgctcgagatggtgctgaaccagtagtgtcttgagaaactgtactgaaatgtctaaaatgcagattaggaagttgtgaccaatactcattatggatgaaaagttatttttctggtgcaagggtgtttagaaaaccagattggaatggaaattccctctcattaaagacaacattcctagacatatacactctacctgtggtgcttagacatttgtagcctctataggaatcattgtatccaagatttacacatcttaatgaatgaaactgaaacttgtggctttgatatggtcttatgcatgggtaacaagcaacaccaaaagttttcagtttgttataatctggtttcctatggtacagtgtctcaaaaggtgttttgttgtgcaagacaggtgtaggaagtctgtttattaagtaaacagaggtttggaaagcatctacctagaatttgagaggcatactagcttgagcaagcaaggtaagacccatctcaactatgtgtcgatgctttctttcagctctcccattttgagctgaagtatggggacaagagtgctgaaaaaggataccattggttcttaccaagctttcaaaatcctgatactctccaccccaatcacacttaatgcttttgattttagtttcaaattggttttcagcaaaagctttgaaatctatgaatgcattaagagcatcagatttttgcttcaatggatacaaccatgtgtacctactaaaatcatcaacaaagtgtatgtagtatttaaaatttgtgtttgaagcaattggggcaggtccccacagatctgtatgaattaattcaag

SEQ ID NO: 233000 - DNA, 1057 bp, Cannabis indica
ttggcttttataggccagaatggatgtgaaacagatgtgatcaggcatcatcgtacgatgagaaaatcaatcgattcacattctgcagatctaatagttgggataagcgctcttcaaggcggttggaaaagtttgagtattcgactgacacccattaaatgcgccggatcattaatgaacgggaaacgaattgttgcctgcaaaagtaaaaactgtaataatgacggtcataaatgcaccccacgcacccgaggcacgtgcccgttagttaatacgacaaccggaggcatccaagcaagcctcattcacttcacaccaaacgaggcttgggggtaaatgtttcccctgattttccctaaaatacgtggactaatgcgataacgacacgtagctctgaagagtatggctttgacataatttgactaagtccttgtaaacctagagggtcggttaaagagacaccccccggagaaggtgtgagcaagccacgcactcccggagggcaaagctatagcaaagcacttccgagagatctcagaccccatttgaacagtcatctcacatttaatgccgcatgggagaaggcgtattggtactgccataaatattaaattctgacggcgtaaccccgcttctgcagctattacgttatgattaataagcctagtgacgactactttatgagggatcacatcagtcaagaagcgataatggagtatatctatctaactcctgaaatacctagggaacagaccatgcatttcctattttgcatgggctaggaacacatgctcctactgacgttacacagaaatacatatgggataattctagggattacctcggagaaaatactataaataccccccaaacgcattaaggcaggggtcgagaattctgggtttcataagaacaaaagagaaaagtcaccaagaacattctttgtaatacatactctcgtaattattaaggactcgtggactaaggctcattaatgcctcaaccacgtaaaaatcttgtgcattaaacttctcacagctttcttatatattattat

SEQ ID NO: 233001 - DNA, 1735 bp, Cannabis indica
ggagcacaaaaaaaattgggccaaatataattttatggtatatttggggccaaatttaacctaaaatatacaccatccattggagatggtctagagttttctacaactttatatgtatttattttcttgttttaggaaattcatgtttgagatgttagattatatattataatcaaacatacggttagtatatctggatcttggtaaaacaagttccaacacatagaagcaaaccagcgaggatgattgagagcagttttaagagacttaggttcagttggataaagagattcaagcaacttatgtcgagtagctaagtaagccttaggtttgtatatgcctttttaagatcttgtgaccatggaatgagcccttaaaggcactagtgaaataggagagacatcaccaggtgaagaactgggttcaccaactactgtggagtgatgttgattagatgttgaagcactgatggtaggaatagagggagattctgaaacttcaggcacaagataaggcaaaggagaacctttgtgacgtaaaaagactagaacttgagctatcaaaatcactatggatcacagaagtaggtgcaagcacaacattaggtgttgatgaagatgcagttgctggtgctagtgcagaactaggagctagcgcagtagcaactgctggtgctggagcaatgtgctcaggtaaagtggttggtaaaacacaaggatgcacaggattagtagctgcagcattattagtcatagaaaattgaacagtaggaggaagataggattcaagaattacctgagatgaggttttgacttgagtggtagggttgacatgctcattaaacaccacattttgagctataaaatcctgccagcaaagttttcacacagatggcccttatgtttgggagaatagaccaagaatatacactcttcagatctgtacttagtttataatgattgtaaggtctcaaatgaggaaagcatacacatccaaagacctttgagatgttgtaattaggtgcttgttgaaacaaacactcaaaagggctaaggtgatttagcacaagtgtaggtatcatgttgatactataagttgtacactgaaaagcatgccactagtaagccatgtgaagaccaaatttaacaagaagagtaaggcctatctcagctatgtgcctatgctttctttctacactcttccattctgttcatgagtatgaggacgaatgttgaaaccaaataccttgatctcttaaaaacttgtcacaaattctgcattcacccctaccatcagcttgaacctttttgataggtaaattaaactatttttcaaccaggctcttgaactgaaaagactgagatttgacagtcataggaaaaatccaagaaaacctactgaaatcatcaacaaaaagaatgcgatacttgtaattatctttggaagcaatgtgtgatggcccccacacatcaatatggatgatttctaaaggctgattagctctagtgttggacaagagaaaaggaagtctatgaattttcccttgttaacaagcattacaaaaatgtaggttctttaaagagtcaggaatattagcttgagtcaagattttagtgagtatagcaggtgctaggtgaccaagaatacagtgccacaaactgatatcattagaaagaatagaaatgtaaacaatagcattgaaatgtgaatgggaagaaattgaatctttattcat

SEQ ID NO: 233002 - DNA, 2023 bp, Cannabis indica
cataatggtattatcaaatataaccaatgaataaagaggaatcagagtggtattatcaaatataactaatgaataaagaggaatcaaagtcgatcatgtcaattatcaaatataaccaaaagactaatcaaacatgaaatttaatcattataatagttttactgctattaaaccagatttgatatctctatggaaatattgatttctatgtatctaataaagataaaaaaagaaaaagaaaaaaaaaaaaaacaacccaaatggagtactcaaccacattgattgaaaagctgagtgatcaccttcttatcttctttgcctttactttcttgcaaagataagagaaacccagagaaagaaaatgaaagagaaaatgttaattgcataaaagaatgttaattgcataaaacaccagcataaaacacgaaggctcattcgacattatttcaaaatattaggaaaattgatattggtagtgttaaaacaaatccagcctaaagaaaaattatatctaaatcaatatccgtatgaatggaaggatcagatgaatgaagtgtgaacctaaaaaagaccatcttccaagagcgatcaatacaatttttattattcaaaggatacaaagcccacttggtgataaagatcaaagaaattgaagagagagtttgatagaacaaaaaaaaataagaaactaatataagggtctttgagtaagaatcaaatcatcgagacacacaaaaagaagaaaaaggatttatctaaagttaaaaattatgtataaatttaaaatagacaatgtttaatatagaatgataatggtaaaaagcataatagtgatgaaataaaaattaaactaacatattagtaaaatatattcaacataataatagtgaagttatgaattgtagttttgatttaaagaaaacattgtactaagttttgaaaattaaaggaaaagaattggtaaaaaaatgtttttaagaaaattaagggtaactaaattaaaacaaaaagaaattaatattgaagtttcttttaatttgttatcgactcaactaataaaatggtaaaataattttttttattgtaacaaaaatcaaacaatctgaacgaaaacgaaaaaaaaaaacaatagataaagaaatttggatttaagtatcttcaggataattataaatataaagctcaaaagccatataagatctaagaaggaaccatatattcagcaaataaaattatgatgaaacactctccaattacaagagtgctacctttgtttaacctactcataataataatgccaataataatgtatatgtgtatatataaataaataaatgtcaacattcgaaagttcgatttcatagaaaaagaatgataaaagattcatcaatttttatcttctatacatatattcctgaaaaggacgacaatcctacccatgttcactatacaagtgaaaacaagatctgtaactccacatatcttttagcattccaatacaaatgtgagtttctttttccaaatcttcacacaattaatgaaaaatcaattgaaatatacttcaattttcttcattccatggtcaactacgtactgtcattaattcattcagcatcaaatgtatgtaaaccagaaacaatggccttgaacccacgttacattaccgcctcccacaataatcataagtaagaaacataaacataagtaagaaaattaaagaaacaatgaactaataatgagaccaatatcaatataacatatcagagagaattaaagatactacacactatacaagacaagatttaaccaatatgtataacaagatcattgaccaaaggatcagagtaagggacacccaattcaaatatatcagatccacactaatcaagaaccttcaaagcttttcccatggtctcaagatcaggatcaccagcaatgataaaagggataatttccacctacaaattagacacttgtttgattataaacattctcaaaaactactttcttcaaccacgacaaa

SEQ ID NO: 233003 - DNA, 1207 bp, Cannabis indica
ttcaaactcaaaatagcaaagggaattaagtatcttctgtcgacagattttgggagagttcccattaccccaaatcctttgtaaagtacaactttcagggtagaatttaataggcaaaccaaacatatatttgtattgttcaataaaaaaccatttcctctgaaacgatttgacagtgaatagggagaaatgtaagagaaaatcaatacctgtaagaggctcattaaacacggtacgattcgaaggaaatgggggaaggccggagttaatggtgacgcgactggagtggtaaggtacctgcagaggaagacggcttgcttggctcggatgagtcgagctgtgttgtgtctcagtagaggaagagtcggagccaccatgatcgagcgatctggagctgggcatgggtttcaccttgtggaaacattcaaaaaaaccagtgtgaacatgcagggggaggaagatgaacccttgttcatactgaagagtcgagagagaaagtctggaaaagtttttttttttttttttatttttattatcgaaatgatggtaatacagtaaataaagaatgtaaagtttaacaaaagtcaataaattataataattattagcaatacaataaataaaaaaagaataaaaaacatttttgccactgaacttatagcactaccagattgtaccccttataatatagggcttgttaaaaatactcctttgtatttcacacttgttggaatatagtccttctgttagctttccatccacttgactgttaattgttgactagaacaacacatgtcacctgtttattagtcaaataaataaatattttaaaaaattattttaattaatttaaaaaattagatataaattaaaaatatttttaaaatatcatattttataaatttgtaacttaaaacaaacttattttttaattatatatataatacgttttcatcttattatattttacaaatttgtaacttaaaacaaacttattttttaattatatatataatacgttttcatcttcttcattcttcttcctcaaaacaacaattcaccaattttatcttcaccttgcgctttattacctaaattttaatacaaaaaatagtctcatatttcattttcattcaagtttaattttgcccaaatattaacgatttaagaaatcaaacaattatttttaatatctccaaaacaaaaa

SEQ ID NO: 233004 - DNA, 858 bp, Cannabis indica
ttctaaaattcaggtcccaactttctacccaaccaaggtaaacctttatcgactatgtgatcctttatgcttccattcatgaacttagatattaatgctaagtcggggaattcgctactcaatgaagaagcacctaaccatatgtcctcccaaaactgaatcttgtcacccctaccaactttgaattgtaccaaacccagatactcctcgtacaaatctgagatctctctccacggacttttgggagacaaacacgagttaattttcatatcccaaacattatcggctttaccataacggcttgccactaccttgtgccacaatgcttttggctccaaaggatatctccacaaccatttcatgtgcaaccttttgttccgcgcttccaatctttcaattcccagccttccctcttcctgacaactacaaacttcatccatagagactaagtgctcaccaccccatgactcactgccttcccgacacctacaaacttgtcctcttatcacttcaatatcaatatattagctttgtttaccgagattttcgaaaactaattaaataagagttttaggatattaaatagtgattaaataaataagatggaagatttttacttagttcaggcgttaattattcataatccacgagttagagtattggccttttaggttttgaaatgtattacaaatgagttttataacaaaaaactctaacccttgtcttaaggtggttttataagtttctcttggaaaagcaaaaagcttaaagtgaaaccagcagagccttggcccaaaattctgttccccttgcatgaatataggctagaattcgggtccgggcatacccatgacccat

SEQ ID NO: 233005 - DNA, 1138 bp, Cannabis indica
agattttctataatatgagattgaatattataatgcttagtttgacttttgtgttttttttaagcacctttattttactgtactgagttgctttcatttttttttttgttgtgttttgtcttttttttttattttaagtttgtcatattatctttttatagggttaacactaaatttataggtttttatgaattttatttgcaccccataaaatgataagtacactctactagaaaaatacttaaataatattaaaaattactcttattatatttttaaagccagaccctggatccaaactccagacctcgaacctgaaagactaacctcaaccccagactcgtagccagacttggaccctaaactcggacttagacccagacttgagacctaagacctaagacctaaaatcgaaccctagacttgcacattgaccaggatcctgaacctagacccggatttgaccccatccctggccccaaaccctgaaccctgaaacccggactcggacccgaatcctgaacttggacactaagttcccgacaggcccgaccctgggcataggcgggctaggcttgtgcctaaggcccacctagcccaaaggcccccaaaaatatatctcccctttaaaattatacaattttttactaattttgaaaaataccacatttttttaaataagggcccaaaataaattttttttctatggcctactaaatttgagggccagccctggttcccaactccggtcccacccaaacccaaccttgactaggacccgtactcggacccaagccttggctttagaccaaggccctagtattgtacctcgacctagtttctcttagcttaatttcttattcctcacataaataaaaaacaaaaataaaagtaggtacatttttgtttttatttttaaaattaaaatacaaaaatagttatagaacacacattttattttttaaaaatcaaaattctattatcatttttatgattaaaaaattaaaaaagacagaagtttaccaaaggcctttattaattaataattcagttgaaatatatttccatttctagtagaggacttctcaccactaatgagtatacgagaggctcaatgtttagagaataatgaaaatgc

SEQ ID NO: 233006 - DNA, 1350 bp, Cannabis indica
ggcataaaacccaacacttaggtcaatagatcttaatcctgagatggttaggttctggcttaaatgtattaatgctctatgagttgttcgttaaagctgaccaattagattggcttaatatttacatcttaggaacatggtagtataattgagtgggagcgcaaaaaaaaaaaaaaagtgggagcgctaatcatagatatggaatatatagcttctataacttctagaagtgaaaagatgatttccttcgagcttggcttaatgcgataaatgattgagggctcatttcaaaaattatattagtttactaaatattatttacaactagctaagtattttaaggataaaatacattgaaatgtagagcggtaaatttgtctctactggatgtagatcatctatagaggatctttgattatttggattataacaatggataattaatagcgtatctatatcgttgaacatataaagcattttatataattaagagtacaatttctgaatctatagtggagttaggaagaattaattgaaccctagcatttgcaagaattacattgtcaaacttaaatcaaatctcactcaattcgtaatatattaataaacattaccaggaaaggagatgaatgaaatccgcttcgggcgaaaaaggcagctaatctaccaggaggccttcttgatcccattcaacatgcccttgttagccaagtcagggaaaatgagacgagacatgcgaaaggcgggatagaccccccgagcgcggcctgtgaagacgccgtcgtcgctaacgggataagaaactaagagaaataggagagagagagagagactcgtgattgggacagagagagggcaggcaatggtgcgtcgatgaccgagagaaagtcgttaatggtgttcgggatggagagggagtggcattttgagggggttggtgcggctgtcttttgggtttcgaaattgggggggggggggctctgctagggtttcgaaatgggcagagggaaagaggcaaatgaaatcctatttgtgaaaattgggttttttaaaagttaaacctttttgcttcggtggataaccgtggaaaatgtattaacctcattttttaaccgagcaaaaataattgaccttactttttcattgaagcaaaatgtaatagataatttttaaaaattgcacttttttcctcagttcttcttttagcgtcggggaatgagctgatgctaattggtattttttagcttcagttatactttgaagcataaaatctctgcctattttttactttggtcaaccattttggtgtgacgcgttgaccgacgcaaataaggctttttgtagtagtgc

SEQ ID NO: 233007 - DNA, 995 bp, Cannabis indica
aaaaaaaaaaaaaagaatgttgaaaaaagcgggagttttccctctaaaagcttcattaaagctcaccctttcatatttcagcttttcatatttaaaccattctcaacttttcttcagtgctcccaaactcgttccacttctccggtgattccgatctcggccgctcattttcgcaacatcctccgttgtcaccggacatatacaagtttgtatctggttgtgcttttttttttttttttgccgtattagttttcatctgtaaaatctgtttcttatttttcctatctcttaatcttataactacccatttgctctctttggttcttcaaagggtttccttatttgttcacagaggtaccgagaatttttttcaaatctattattttttgttttgattcttgttttaagtttagactttcatatggatttttctgctatttcattttaggctaagaaaaataagattgtgaattagatatattgctcatcaataacgtttttaaattgctttttcatcaaaaaaaaaatcatcaaaaaaaaaaaactttttaaattgctttattttttttggcagatgagagcttcgcgcatctatctactaacatattaaatttcatttctatttttgtatataattgcttcgaaggtgaagagattttattttaagacaataatatgcatcattaatatgccaccacccaccccactttctaggttgtcaacatagagcatggttttgataattgtccaactatgaaaattaataatattacttttgttatctatacttactgattctccactgtaataaattaatatgtacctcaaccagtgtctgaagtaatatagtacatgttgtgagattaagtgtactttgtgacaacccttttgatcaatactttctccaagagagttaattaccaacttactacatattttcttactttttttttaatatatatatatatatgtgtgtcaatatataatgtataatt

SEQ ID NO: 233008 - DNA, 1423 bp, Cannabis indica
ttagggcctccgatcatcgagcagatttccactcaagttgaccagcacacctgattaggaattgaggtaagaatagtatttagatgcatataaatacatgtttagtatacatgtatgttatattgtcatgtagctagcatattagagttcgatagcgatattggtgtacattgaattgtattgggatactgatatctaatatattagtaccaataccagtacgactagagtactaagcttatgttagtattatgattaatcgtgctataggtatgaacgtttggatctcgtatatacacattggatgtggttacgagacttatggtaattgagtgtatgggcactcattacaggtcagatatatgtcgtattatgtttaggcttttcttactaagtttgtctcctcacaactattttttcatgtgtaggtaaagaaaaagccaaggttggacaacagtgagtaatgagcttggtgaagattgtacatattcagtcatctaagcgtggagggttttgatcttcgggacactactaaaaccttttgagttgtcgtagatgacacttttgattattgtatgtattatgtatattttataaatagattactagatctcagattgtaaatctttcataaaagtgtatttaagtttattaatattttaattattatggaagttttattaaacacacttttatgttaaaaccatttaattagcaaaggttcacacaacacttaagaaaaatactgtaacgtgccttaactaggagggcattacagaaatatagtaatttgattaattttttattttgatattgaggaaggggggattcgaatttgggacctcctcattgcgaaaagaaatatgaaaccattaggctatgtccaaagtcgattttaagagtatgcaaagtaggtccatgcctaaggcccccgccctaccaagacctcaaaaacgtccttttatttttaaatataacatagtaaataaatattctttaataccattagttcacatatcaatatgttagtgtagcggtacgcatgtgcacttaagtttcttattcatttccaagatgcagttcaagtgccactaactgtgtagaatttaggagtgtgcataaatcaattcaatttaatgacaaccgaccgatccaattataaccgaccaccaaacattagatgtccaattgtgatcgaatcagattgaatgttattttttaatatctaattagatttgatcggatgttatatggggtgtccaaaattccaatacatccaacatctaatcggactaattaatattttcacttagtttgaatcagtattttgattttatgttgttatacgttaaaaatatatgtatatatgataattaacattaaaattttacttttttttaggattggatggatctaatccaat

SEQ ID NO: 233009 - DNA, 1693 bp, Cannabis indica
tttctggacctagggtttcctaaatattttctacagcaaagttgaaggtgcattcgaaatgtaaacatgcaaaaataagcatataggaaatcaaaaacttactcaagagtcagatgtctaggttcgagcaacgtcaatccaacaagcagctttgatgaaggaacttcaacaactttgaagccaagaatctctctttttgctctgaacacacttagcaaagaaggatggtgaaaatgagtttatgtgccgatgcttgttgatatttataggcaaatcacaaaaagaagtaatcatctcaaaggaacctcagacgcctcagtttcccaccttaaaagcgaatgtgggaaataaaaaataatcaagtgcagccgtcagccgtggagagagaaaatcggattttgaaattttaattgtcagagcttttattaggttaaaactgaaaggacacccagtcagcctcacatcgagtctcggacggtcgcgcttggcacgtgtccccatccaaaagcagaaacagctcggatgaagtctacacgcaactttggaagtcccgtacagacttggggggcaaatgttatcccaatttttacactctgacgtggcatcacatgaatggtgacacatggaatccacttggagcatccgttcgggaagcataatccgagcatgatatctctctagcatgcccagagcaaagttttcagcaatccgcggagagcaaccaacacttagcgaattcagctttcgcatcatgagtcatcaactaaatccctataactgagggatcagactacatggatatgacatatttcacgatcaatgtattcaacatcaatcccacgatctttgtattcagcattaatcccacgaactttctgtttatacacaatgtaacgagaggggaaactcttcctctccaagcttactagccctataaacaatgatacatgttcactgggcaaggggtcgcaaatagtttagctgagatgataccataaatatattatttaagaaagatatattcaaagatactgttgtaagagttattagaaaaggaatctttctccttgttcttaagtcaatacaagtaacaagcattaggctattaccgaactgctcggggctgaacctctataaaattcctgtgtctttatattactttattatatatcgattgctataaatcacttatcgcttactaaagtagactcattgtcgttggctaaaagcgaggtcaacatgtcttgtagtatttctcaacctcatttgcatgctgagtaaggaactctagggggtaagagggtatgccctcacccacctacgggcctataagtacctccattttttatgtagaaagggagaacaatttttactgataaaaattttgcggaaatttctagagagctttctgttggtttttgtgtcataaataaaacccatttcaatataacgagatttactaattaataaagatcagaaatcattttatgttacatggttcacatgatttatttcatgtttatgtttaatgtataaattctattaagtccagaacataggtatttgttcgtgattatagtgttgtcagcacaatggaatataatcatgataatatgttcaaaagttttatttcttgatttgtcagttcactgaatttagactgacatgataatcagcgataggtatacttaca

SEQ ID NO: 233010 - DNA, 1234 bp, Cannabis indica
aaaccgctcagcgtcaatgaaaaagcatagacactttgcatcattgcgaccctcatgacagtcattactcggttgaaacgagataaatgatctctggggtccgagtctctggtgtatgctgccatctcgggcatcttaaaattcttggggagctctgcatccagtatgtgtcaggcgcacagttctcggtcctcataatcagaatctgagtcgtcctttttttacctccgggagaccctatcaatgtctttgcgtagtactgccaactctgccagaattccttcatttagcgtgcttgtggaagctgctgactcatgttctttttgtctagatggtctcatatgtcaacatgtttttcgttgattttttttcttaggtcaattagtgggtacctctggtttttcctccctctctcctcgggttcctggtgcacggatacgcttttttggtcctctcgatcttgagggccaagaccagctcgagggagcttgcccctctgtggacctttcccttttgagaaatgtgagcggtccttccgcggatccagcacctttttctttttcctagggattgaagttggattttttgtagggttttcctcggaagggtaccgtatagggcttggttccctggtcttgggcttctgagtgctcggtgaggactcttccggtgtttcctcaggtcatgctgggatggccatgggatgtatgtgtatccctgcagtttccatggctttttgcatggcaaccatcacctcttgcatccttctattctgctctttttgaactgcaagctcggcttcatgatcacccaccttttgcctcaagaccagtagttccgtatagctaccttcgtcgtaagtgtcgtactcttcaaagttttcttcgtattcttcgtcgttcgtctcatctcgctcctcagagcgcacatttactcttgaggccacttcttcgccttctgggttttgagcatcctgaggaggacggggctgacgtgtattattatgagtttccaccattgttaatctgacttttcctttaactgttgtctatctgacaatgcttccttcaactctcaatgaaagcaccaaaatgttaaccgaggttttcagcaaccaattaaatagtagaatgagaagagttgtagaaagtttaatgcaaatgatttttatgtggttggggcattgatgagccttagtccacaagtcttttttatttatgagagtgtttttaca

SEQ ID NO: 233011 - DNA, 1014 bp, Cannabis indica
atgtttttttcttgccatgtgttaaacattgatgtccacatcaccagggtcaatttcccggtaaacacctagctttcgattgactggaaaatcttgtatcaagggctctccaagcaatgaaggaggtattgtactaagctaaaaggccaagaactatctcggacattgatgattagagccagctgaggagaagatctttccttctctaagtggtgaacttggggtttatctggccattgagtaatcgttcaggtgtagatacgcaagtgaggagaatatcatcaagtccatgcctaataacaattgggatgacctgagatttccaaccaagaaagttggagccatccaatttgatagtgagggaggagttgatggaattctaaaaaataattacatggttgattggccaaaataggagtcgaagttgcagtggggggttgttgaactgtggagcgaggtgggttttctgggcgagaaggattcatagcagacattgtacaaaggaaatctgataccgtgaaggagcttatcaatacagagtctcatcagaattcaatctatgagaatgcaattcatcgtagacttgtaaaagatattgagtatttgtgaggagttttatatataaagaggatttacaagagatgaagatatacaaaatatcactgtaataaaatttacaacttgcaaccaataattctgttaaactaacaaaactagctcaagatattaagtaacaaaattagtttctctaacattggtacaatttaatatcgattcacacattttaattttatatataatataggaaactactacatggtgttggatatctttaaggtagtaaagctctaacaataatatgtcgtaagatatataattcaactttaccataataataacatatttgttaacatatatatatatatatatatatattgtttgtaacactacaggaatccaacagcaacaattatccaacagttgaagttccaaaattgtataaacctgcaccag

SEQ ID NO: 233012 - DNA, 1301 bp, Cannabis indica
aatgaacaactgttattaattgaattagcccaaaaactaaatgggctaaataaaatctatcatggtgtgacattttatttagcaacaacctatatgcatctaaacataaagtaacacatataggctcacacaggcacacagatttggatggatcctttgtatttaattggtcttgtagctactaggctcgtttaggcattgtgttttagacaaagcctaatgtattttgaatgagtgggttatatttactgatttggttttgaaggattgtaatttcgatttgggccgtaagagggatttgggcctagtgcaatttttggccactacaattatcataacttcaaaaacaaattaatcaaaacaaacaaataataaactcaaaatagggcttttttggggcggtggaatgacatagactctttgaaataagaaaattttaggacagaggagacataaattcaacaagcaggtatatatatagtcattttcatgaagaaaaaaataaaccaaacaatgttctatatatatttctgtgtgtatgagttttcacattatacatattatctaaacctcaaacaccatcaacaattaattaaaaaagaaaaactctaagtaaactatgtacccataagggctcgcactgttatccacatttttgtcatcatggcacgtcgaattttaatcaagaaaggctaagaagtcatcagtttccctgcttcctcaattgatgctccgagaagataaaggcaccaacttcgcgagaagggcctctgtaaagaggtgttccccgactgctagctacatggacgatatccgtgagccaagaactccctccattcctggaactaaaggtatcttctcccaagaagagtatggattttcctagaagggccaaggcattctgagacacactaaattgggttgtgcctttagcccacggaagcctcacctaaacgtgtcagactatggacctaatgatcaggctttttcgggtacaatctcagaggttgttgttgtcgagtgaatttcgcaacaccaattttatatgatattattaataacagaaagaaatctatatgaagaacaagtgcgagtattcaacctaaagtggcgagtactcaaattgggaatgcgaaatgattaacagaaaactggaaataacaaggagacaaaggattatagtggtttagtcagatcacggtctgcttagtccactgtagcaagagtttcgtaggtgctatttcacggtggatcacccctttatatacaaagcagttgtccgatcagttatacaaggattg

SEQ ID NO: 233013 - DNA, 595 bp, Cannabis indica
tagaaactagagtttatttattatttaagactctttagggtttagttaataaatatatttaaattatatctttatttgataattattttttataattattaaagttaaaaattggtatttaaatagtttagattggatagatggtaaatttgaaaaaagataaattgtctcatctaattgaaataagttggaaaaaatcaaatcatgggcctaagctataggtttcagccatgatgtggatttatagttcatttatcttttattttagttgttaactcataatttggttaacaataaatgagacatttttgtaacttataagaaaaactttaataattattattaagtgttaataaataataataaataggttgacacaagatatttaggtagttttgtagttaaatctaaataatctacaagttatcattatttttggagttttttcgtgttacagagtacagaattaaagaaatgtaactaatacaatctcaatttcttgcaaggtgatccttgataattttggtcgtgctttctatcatcggttttgtccctatatatagaaatttttaggaataacaattattttctttgc

SEQ ID NO: 233014 - DNA, 2090 bp, Cannabis indica
ggtgctgacacgtgtaacatagatggaatacaaaccagcacaattatgcatcaataattgcatccagatgactcgacctcggaagtacaattagatagaaaatactcaaactcaccaccttgtagacaatcgtgagacacaagtactaactatcgattgatgagacaaacgagacgaataaagaaagtccatctcaggttaaacataatacattacagaattgtttggaaagggtagataatgagtttggagctcattgacccacatacacttgagtatgtttaaagagagacaaaaactttcaacatgattcatctcgcttttgtcatactgtaccaagcatctcgcaaatacctcactcgccattaatagaagaacgtgaggaatactacaacatatacttagatgctagctcatgatgaagtgcttagaaaagtattgattgaattgcgagaagtatgaagtgtagtcaacataaccatctatagataaagacaaagagcggttacaatgattatttataattatcccatgtgatgtaaatatgaaacgtggagaatgtcaacgtttcatgaacagttacaaatgataagattccaagagaataactatcatcctagactcctataaacagagacaaaattcagggaacagaggacgactatttttagggaaaagagagagaattatatctattattcattctgtaaaataattaattatattctgtatacaattgatcaactcagaataagttggacttgcggactatgaagaattaacttcaaaactacgtaaaaaccttcttgtcatttattgttgttattattattattattaataattattacttaattaattatggaaatcatttattacaaaaaaagatattttattagttaacaaaaatctgcggtaaaaaatttccggggggtaaatccggaaacggaaaagttgcgcgcaaatttagatgagaactacattatactttaactagtgaattaatgctactaaaggagaaataagtagttaaaagggaaaaatggtaaattgactaagactaattacgaaccagcacaaggagggctaatcactggaattgattgtatcaatagacaccgcaataaaactcagtaaatataattctatacttactaagacttcaattccatatttatagtggagtaatcatagaattaataaacaagattatttagttgatgagattcaataaataatctaatttattggagcctagaattataggtccatggtccccgaatcgccaccttgaacactatcaagggtaaagataaatagttgtataatgttgtttggaaaaaattattttaaataatttttcaaatttaaatagaaaaaaaagaaaaaagttattaagataaaagttgtcaagacaaaaggcacattcattgtcttaaacaagacataagaggcgccacatgcgttgtgtccagaaacagtgggagtccttattggtttttccttttaggttaattaattaattcattaattcaattagataaatagtttaatttgaaaagtagttaaatatatttttagttgattaattctcttaaagtagttgagagattccctcatcagaaatatcagtaatcgattcggttatggatatttatttgaataattatatctgatttaattaattgaatttactattataaatagatatctaatttgagaaatcagaacagacttttatatatactattttcgatacactatttttgaaatatacaaagaaaacgaagattatttttctctcaagaacagttcttgttcatgtgttgaggattcaacaagaacaaattatacactttatcctcgtagcctacacttgtgtgtggtggatcgatttggaaaactacgatgtgggatttattagatctaaattatgagaagtttcgagaatatcctaatactcatcaagatgtatttatttctttcatgtaatttattttttagatttaatgtatatacatgtggagattcttgagactatgataccatgataatcagataataattattctactacgtacctgatttag

SEQ ID NO: 233015 - DNA, 1015 bp, Cannabis indica
gtatttattttcattgctttatagacgcttgttcaaagattgaccagctcgatctgtactagacctaattcgtttagaaatcattgaagtcttaagcagccttcttgtgtaagatcgcgactggcgtttgttgtgtactactgtgaaattgcgagagcacaagttcatcccagaggacgctaaatttcagcgagaaccagtgtacaaagagccttctgagaagcaaaaggaaagaatagacaagcgtctatccaagcaaacttcgagaccaacatcaggtaatataatttagtatgttgccgacaatattgtcttaccctttcaagtccttatttgtcattcttctcgcatacatgactttcttgaaacaagctccagttttcaattgcaagtctaaggttggcactgcgacgccatcttctgcgactcctcaaaagaggaaaagtgatgtcgttcctacccaggcagatgacttgtcgaagaagcagcaaaaggttgctcaggataagggaaagaaagttgtgatcgatcctactgtcaaggctcgcaatatcatggctttataggataagttcgtgagcaatgactttgtcactagagttgagggaactcctgtcgaggacctcttgtctcgatcggttgatctcatctcccaattaatgaccgtctatttgcgggcttatgctgttggttttaaagacctcgatctcttgaagaaatagaactcaactcttcaagagggccttaaaaaggaaaagttagacgcggctaccaaaggcaaggaagtcgaggatctcgacaaggccaaaggttaggcggaagagcaagtcaagactctgaatgagcgagttaagaagctggaggaggagaatgttggtcttacccgcaatcttgaggttgagaaagagaatgcaaagaaggcttatgaccaggcggtctctgactacactgaccaagctgccagattttgacttcgcagtctttggaccagaggcagtcaagatggccactgttt

SEQ ID NO: 233016 - DNA, 926 bp, Cannabis indica
attctatttgagtacgttggttgttgcattgcacatatatatgggggtcaaaactcaaatacacgtggcttaattattcacaaaaagctaattaacctcaacagcaaaaccaaccaaaatcgaaatctattgtatatatgtctaaccttcttctaagataatcgataacccattatatatatttttagtttctttctaatactaagtcatttaattcaaattacaccgaagttaattaattaatttaaacatggatgattatgtaactttcccacacaaaaaaacaataaaaaataaataattaaacaaaaaaaaagtttcatatatacgttagaataagacatgtggcggctgagaagtttgattttcaaataataattatgaatcattctaatcctaaggatatatattgtagttatcaacaaagcccacacatctgaaatcatcaaacgatttcatcttatagcagcccattgaaaatgatattcataattgttctaccaattatatatattttacaaatatgtaaaaaaaaattgaatattttaatttaatacataatataaaaaaattggtatgactaattatattgaacgctttgtttaagatgtcaaattaataacaatgctcatctttatgtcaaataaatattaatataattgtatttaaccatggaatgacatatttatttatattaataatatttattcaacgttataatattctttttatttatttcactaatatttaataataattatgtttatttaaaattatacaattttattaatagcaaattagcaattatctaatataatgaattaatagcatgcaattgaacaagacatcttttttgttgaagacaaacacgattagaattaagcttaaaaaaaagttaaataatcagccgcatataattattctca

SEQ ID NO: 233017 - DNA, 592 bp, Cannabis indica
atagattttattgctttaatggagaatcgtgttgtttgtagcgccatttatatgtgcaatagcaaatgtcataaattctaatgatatctgattctcatttatgtaagtttgttatgtataaagtataatagttgctcatttcaaaaaaaaaaaagtataatagttgctttcgggaaggtatgtatatatattaattagggaaaggtatgaaaaataattttacacatgacatagttttttctgaatcttacacattaaatagttaataagtgatgatttgtctgtctaccacatgattgtatatccaatgattcaatgtcaacaaatatatgtatatttatatatcttggtcgcagtcccaatatacgtacagctcacttgagatggattctctctttagtttattagatctaccaacatgttagtactagtgatagactcaaaattgacagcttctctccagcctttcagtaaaactcgagtcttctatttctctctgattccaaatcattctctctctttctctcttcaaattcgaacccttacacatagcaagttggtactcaatcatagtgtgtaagactgtgaagaa

SEQ ID NO: 233018 - DNA, 759 bp, Cannabis indica
ttctttagttttatttttaatttttaaaacaataaagatgctttcaagatattatgagaaatataaaataatttttgtaattttattttatatatatatataaaaaaaaaggatatatacaaataatatccactatctagactctctagagtattcttattttgatgagtccacttcagttaaatgtatacgtatatttttatatgtaaatttttgtatttatgctacattgcctaaaataacttcacaaatgtaagagttaaatttaattaattcatttttaagagaatgaaaaatcatgattacattaaaaatcttacaatacaaataatataattttttaaataattaaaaaaacttgagggtaccaataatataatttttattaaattaaaaatcttacaatacaaataaattaaataaattatatatattttttaaaatagtagctcccttagctattggggtggtggaggaagatcctgattgtccctgaatgttctggtgcttcgcctaggcagccatccgccattagatgtatcagatcccttctgggattaagtttctgaggtctaccttctccttggtctccaccctcatcttcttgctggcaccaccttcaaaagagtcagtttgctttttgttgatcgcaactggcccatcataattagaactattccctctaagtgttttccataagaacctgccttaacggttccacgaccaggacaggttctgttaggtcaatgatggaagtgg

SEQ ID NO: 233019 - DNA, 782 bp, Cannabis indica
attcatttattaattattaccaatttttattacctttttaacgcgtgtcataaaatatttgaaattacgttacaattatcattataatatttctttatattgatggtctaagatgacaattctatactttcatataagcttaaacgcggaaattaagctggcactcacacatgtcgcgtggcaagatgtgggacccatcttgccgtactgtgcttttatcggtccagatcagcatattcttataacatatgtcgactaagataaatatcatttatattttttaattatcaaaagactgaattggatataaaattgtttgttttgaatttctcttatggtaaatattaattacatatgttttattgctactgttatttcacaaaaatatattaaatgtaaggattattttacaaatacacaaaaataacaaaaatatggctgtacgaaattttaaatagttttacgattttatttacagaaaatacagtctttttatattgtactcttgttaatttgttgattttttgttatctgtacgttattttttgtggttgttttgatattttttagatgttaatttcttgttacttttatgtagtttttttatttttttcgtgttgtttttatagaaactgtaaaaatattaaaaaatatatatatttaaacgtaaaaatataatttttttttttttaaaaaaaaatagtgctttttatgttattatcctttaaatgtatatagatctttttattttattttttgcttctaaaaactattactcctta

SEQ ID NO: 233020 - DNA, 846 bp, Cannabis indica
tgattttggctattaattatttgtgttttaagagataattataagatgttgaatgtgaattgcaattggtggagagttttcagagttgtcatcctagtatgaatggtttgacagttgtgttttggtctcatgattcttagtaaggtttggtttgttgtttgagcttaaatatatatatatatatattttgtaccataagttgggcatgagttgatgaaatatggtcataaatttgctttgatttccataggtgaagatagcccatattcaattttcttgtgctttgaaatttggatcatgccaatcttgttgcccatatcacaaccgaaaaggtgtcgaagatagcccatattcaattttcttgtgcttctgcacatcaaatcggccacagttctaagactaggggctttggaacggatactctccatcaattcacgaaattgatcatagtccaaccatggaatccacggctgccaccacacatcaacatcttcacccgaaataaggactgtacaagcccccttacaaatcgcattcctagctcccaagatgcctcgccacaaaaaactatcataattcttttcttgtacactccaaaaagactctctgggaaagtactttcctttgagaatattgcaccaaggtcgatttactttgcaggtcaaaaacaaagcaagtttagcaagcaaggcatggttaatatcttcgaaacggcgaaagcctaagccctccttcatcttgggttggcagagagaattccacgacctgccagcccacatattctggttgtcgagcgagccgttccaccaataccttcgaaccaccgcatcaagctctcgacaagaa

SEQ ID NO: 233021 - DNA, 766 bp, Cannabis indica
ttatcattctaattgtgtcatttatttttatttctatagcaagttatgaatttaccattaaaatgtgtataaagggtttgctcgaacgcaaaatctaaacagacaaaattgaacttgtgcaatacaagtgaccaagagtcataagtctgctcggttaactacacctgtactaagcttaggtaaataacaagcacaaaaaaatacaatagtttgcatgtgcaattactaaaacttaatggaaaatattcattttaaaagataataaagcacgataaacctgggattaaaggatgcctggtcacctagttttcctaaaaaaatgaagtattaccaagttgaagggctgcttggtcagccaaattgtattgaaaaaaggaccatgggccaaattaaaaaaaataataaagagagaggagaagaaagaaaaacttcacacgactggagtccttggctctttatacgggtcagccatatccttagtggtcaaggtgtctgtgctttggttggttgaagctttgggatcggctgcctcagagtcttccttgtctttctgggccgcatgaaaactaagatatgcctccttattttcattgagataatgaaagttcacatttgggttagccttccaaaattcatacaaaatgtaataccctaagattaagagaatggattcgcaaaccctaactagttaactgtgtataattatggaattataatattatataatttattatatgtgaataataatgaattatgacatgttaag

SEQ ID NO: 233022 - DNA, 736 bp, Cannabis indica
agtttgaggcacctgggcacccagcgcctaggttgatatattgttaacctgaggaaacaagtgaggccaaacaaatgaggaaacaaatgatttcaaaaataaaaggatcaacctagaggccaaacaagtgaccaacgcacaggttaacatttggcctggtcactcgcgcacatgttgtcattttgtcaacctgggccatttctaatgaaaattctgacagtctttcgggcatattcttcattttcatcaacaattactttacaatccttaaatttgtgttgtggcacgcttttagtcaaggatatgtgaccactcaatttagtattgtgtgcttaatgaccacttatcatgtctttctatagctaaatacttaatgatgatatgctagcttgaaccagtactcttataattcttagccacaaatattgtagctgatttgtcgcaaaattttcttaatggcctacaaatataattctaaactctaggcctagtatgaaactttataatataccatacgagatgtatcttcaaaataataaatgaatttgacttctataatagaaataacaattaaggttctgcataatacagcttactagtaatcttaaagacgtaatcaaatgttgattacaggcagtgaagtacgttaaaatctaattggttaactatatttctagaatgtcagttcatctcaataaaatatgtatgaatataatatttagtatcttaaagatac

SEQ ID NO: 233023 - DNA, 875 bp, Cannabis indica
actagtatgatcaaaatttcaccccacttagtagatgatatggtcaaatcaggtattgagtttattgtaggcaaacttaataatttgacattgcaatttgatctattagatagaattaaagctgctcagttaactaatctataactcgtaaagatccgagaagaggttttagctggtcaagctaaagattttacaatgtcaagtaatgcgatgctgttgtatagaactacagtttgtgttccaattagtgtagaacttagaaatgagattcgaggaagctcataccactccttattcattacatcctggcactaccaagatgtatcaggatttaaatccttctactggtggtgcgggatgaagaaagatgtggtagaatttgtatctcgatgcttgactcgtcaccagattaaggttgaacaccaacagcctgcagggttgttgcagcctttgattcttcctgagtggaaatgggaagatattactatggatttcgtggttgggttacctagaaccacggggatgtacgactctatttggattgtggtagataatttactaagtctgaacattttttgtctgtgaaaacaacttttatagtggatcaatatgcagagttatacgtgaaggaaatagtgaggttacatggggctccgaagtccattatatcagatagagatccgaagtttacctcaaagttttggcaaagtcttcagcgagccatgggtactaagctgaagtgttgggaatattttaccagaacctagatttactaacatgtatattgattaacatcctacatatgaatatctctaaaataataaaaataaacacataagggtttaataaaaccttacattgattgcagcaggata

SEQ ID NO: 233024 - DNA, 2119 bp, Cannabis indica
actaaatatcactcttttttaagttaatatactccataaaaatattcttgttacaagtgcaatgtaactaaaagtttaaaataaccaaaataacaatattatcaagtaataaaataaaacaaaatatcatgaaaataaatacatagtgttaacgtcgattttcgttaatatcaataaataaactttatttaatttactaaataaactttagaataataatagtaataatatgtatatataaagagaaaaaagtttttttatgtgattttgaagttaataaactttaaggtgactttcgtgcctatgtatgatctttaaaaatgctttttgcgctatttgtaatgttgagggagatcgagtatatctacgtacgcgagatgctgtcatcatgtgattattctaagatgaatcacattccattaacatactcatgagtatgtgggtcaaataagttgcaagttttaaagaactcattattcacccttcgaattgactgtcgttctgttgtatactttgtgtatcccgtgatggaccttctgcattgattgttcatctcgctggtcttataaaatagtagttgttatttacggctcgtccttatctttaaaaggagaagcttaaatatatctaccaattgtattttttaagacgagtaatcgtgcataattatttctttacaattcgagctggttcatattacagcttcctcatacgtgttgtaactatattgcttgctcgaaatatgggtataacacatagaataactaagtgttataaattcaacaaaaaaagtcataaaaagtataattaatattttttattttatataactttttattatataaatcaatataaataatttttaaaatatataaatataattagatgtattggagtaggtaatgatttgtaactcatttatttcattaaaataggtattggaacgttcgagagggatttagctcggaaaggagttacaaaactcattgaagaaatttttgaaaacactacaagcatgatcaaatattttttggggggttttttgacattttcatgcaggatcaaatgttttgttctaggcgacatgttgcctagagcctgtttttgaataaaagttgcaagacgttcacctctttaatgagaacgtttctagacttcattccaacaattatttacctccattaatccctcttacatgcctggtaatagccatggaacgtgtgtgatttgaatttcaaagtttgattcacctacactataaataggaacctaagggattcattttatgacactagagagtttttatcaaagaaagaaccttgttagaaactatataggcttgataaatccagaaaactatttcagactttcttttccctaagtgtttgtggtaggagaaactaagtttttggacaaaggtgtaaaatcttgttcaagttttgctgattcccctacttgtcacttggtgtttgtggtgttgagattattctcacatctatatatactactatatacattgtgttttatttgttgtttaaagtttagagttataaacttctcttcattttctttttttatatatttatgtgtatgttttatccaaggccggctatgaccctgtgcaagttgtgcaattgcacagggcccaatcttgcacagggcccaattaaataaatgctaaaatatttatcatttttaaatttaaatctttttcagttttttttattatttttttaattaatgactcacctctttatacttagaatctcttacaatttatggtagtttactatttatttatttttttcaatcttttatattccattcaatatatgtttaatagtggaatatatatatatatataatatttttagttgtttcaaaaactgattaatatataatatcttttagttgtttcaaaaactaattaataaatattttttttcatcatatatatttaaatatttctattcaattttaagtttttcaatttaaaaaaaaagaaaaaaataatacaaaagagaagaaaaaaaatatacacaggattatatatatgagttaatgacaagactttattttttaaaaaaaaattatcaaatatgaatgaaacatttttttt

SEQ ID NO: 233025 - DNA, 980 bp, Cannabis indica
tgtttcttttggtaaggggtaaggatgtatctcaaccagcaagggcatcaaatagggtgtttcaagtttatagatgtgttgtcacttgccaagacatggttcaaaacaaggattcaacaaagtcatttgataaagtacattctacattatcgaatcttgtttctgggctatcctcatgttgacagtataaatatgtagtgcattaatttacttgagaagtattgtgttagtacattttctctgtttccaaatggaaacttaaaagtattaagataaagacgaattctacatatattctatctattgcacactttgaaatgatttgaatatgtaagcattgcaagttgaaacagtctaataactcaacattcactagcctcaaagtattgtatattattgtatgtcaggctgactactatgcacatttggaacgctacaaccctatttttcatgaaagaatcgccctgtatgtgtctgtaattggtacgcccttgatttccaccttcaatcctgattaggttctagcacatttcatgttcatgttgattgcttttgctgttaatcttggaaggttggttttagtatccatatatcatctatattgatatatgtttggtttgggatgtttattttgttcttaaagtcaaattgtatgttttcttgggcagtgaattgcatgtactgggagtaaagatttcctcgattgttaagtaatgaacagcttcaggagttaatgaggaaaggatgctctctggttagactgtgtgatataacttgtgacataggcggttcactagaatgtgtcaatcaaacaacttccattgactcaccttttttaaggtttagttattattctgtgacataattcaagttacactattttatcaattatggtatatttaagagagaatagtacgataaactatgtttttgcaatcatgtttctcctaagatatgatcctcgtaacaactcatactct

SEQ ID NO: 233026 - DNA, 807 bp, Cannabis indica
gagtatcaagcctttgagtcttatctcttggctaatggcatcaaacacaaagtctcttgtccaacaactcatgagcagaatggagttgctgaacgtaagcataggcaccttattgaatcggctctcactcttttagctcaagcttctatgcctctgagctattgggatgaagcagtaagaacttctacctatctaatcaataggcttccttctcctgtcattcaaaatcaaactcctctgttcttattgtttcatcaacaacccgattattccactttaaaaatttttgggtgtgcttgttacccaaacactcggccttacaacaaaaacaaattagaatttcgtagtgttcaatgtacctttcttggttacagtctcaagcacaaaggatacaaatgtcttgctagtaatggtcgaatttacatctcccgagatgtaatattcaatgaacatgattttcctttctctcacacttcttctcctactgctagtatctcagatcaatcatgtactgatcttccaaatgcttccattcccaccttgtcctctttacagcctattcccaccatctcttcatccactagtcagttatctacaccaacaacttcccattcccaaacacagccctcacctgcatctccttcccctgtcccctctcagtcactccccaacacacaatccacttctcaattgcctattacatccccaagtgaacctgttcaaaccaatgtccaacccccaccacttgtcaaccaacatccaatggtaactcgagcaaaggtagggacttacaaaccaaaaacacta

SEQ ID NO: 233027 - DNA, 1501 bp, Cannabis indica
accaaagccaagttgtgaggcttaccatcaccagcaacatcgtttgtggcaatcgaaaaattggggatatacggtttgttagagagatatgtggctaagattggtttttttttaatttaaaaatgattgtttaaattttgggtttaattattgggtttattatttgttaacgtttaatcgtgtaaaaaaatttcacaaattgggaattaagttaatcgtaaatattgtttaattttttgggtttaattattgggtttattttttgaaatttgaatgagccctgtaaaaaaatttcaaaaattaggaatatacgatttgttagagagatatgtgggggtttattttttaaaatttgaatgaagcctaattgtgtaaaaaaaattcaaaaatttggaattaagttaatcgtaaagattgtttaattttttgggtttaattatttggtttatttttaaaatttgaatgaagcctaatcgtgtaaaaaaaaattcaaaaattgtacgattttttttttttgaacaagaaggagattctttattcaaacaagcaagaaaaaacacacaacaatctcagcacagcagcagccgaaacacagctgcctgctaccagttggaaattacattatggatatagctttcaagcttcccttttcccccattacaaccacttaaatatctagtttttacacaagccttaatttctttactcaaactgctagctgtcctacaactcaggtcaaaaatacacttgtttctattaacccaaaccatgtaaattgtagctaaaataactgagttgatgattttttcctgcaatgtgttagcagcctcagaaaaccagcctttgaagtcatttggccaatcaaaatggccacaccaattagtaatctcacagatcagcctacgagtgaagctgcattgactgaacaagtgttggtgcgattcattttcgctgcaacagaccgggcacaagggggaggagatctgtaaaaatctgctgaggttgtccctggttagcaattggttgttcaccacttgccaacctataaatctatgcttgggaaggaccattctactccaaatatttctggcatactcaaccggttgagcttggacataagagaaataaaaggatttggtactgaacttacttctcaccgtggcagctgcgagcttagactcattgacagttgaacgaagacgaaggagttttttaaaataccaactagcatcttgcttaaactcaactgtccaaaaactcatacctctcaagtagatcgcgtcaatccatttaacccaaagattatcttgtttgttcgatatagcccaaatatatttcgccatgagggctatgttccatttcttcccttcccgaaaacccagaccaccagagttttttagggagacaaaccttctcccaagaagggatacgcaacttgcttctgttcccattggagccccaaagaaagtccctgcaacatttgtctatagccgccgtgatt

SEQ ID NO: 233028 - DNA, 741 bp, Cannabis indica
tgtgtactatggttcctggattagttttatgccgcatgtgcaaaaaacttggtagtaggtgatatgattcttttgtttttccacgtaattcttgatgtgcgtgctctttacttctccatgctatcatgtagtttatttttacgctatacttatcattcgattctcctctgatgtcttgtggcttttgagttatttttatgtttgtgaaccttggcttgatgtagtttccaatcaatttgtaggatgtcgcttgtctgcaaattttatgttgagatcacaagtgtgtatcacttttttgtcatattcttggattataaaacttggttggtccgtttcttaatgccattagtgcccacttgcattttggattcaagcaacaaattttgtatatttttgcgcaagactttttgaccttttattagagttgtttctaattgcatataaactaagcacactttgtagtgtttctttctccttgtaaatttgtgcttcttctatttcaggatgttgaggatttgtgattagtagttcatcataattagtgatttcagccctctgtatgggttattttcttgttgctcaactatttcctcagccattagttttgcatagtccatgaagtcgaatattgtttcaccatcttctacattgtaccttgcattgtttgttgttgagttgttgattcttctgttagtggtgcattgtctaccattgttgttattacatttgtttgtgtaacta

SEQ ID NO: 233029 - DNA, 889 bp, Cannabis indica
aatataaaaattttgattttttttttcaaaaaatcttaatttatttaaattatttattagattctcaataattttggtttaattttttaagatatgtttataaataaaataaagtttaaatatactttttaggattaatttaattatttaagtaaaattaatatttttgtgagttttctaataatttttattattttttcaaaattaataaaatattataattgcttaaaaatagaacattataattttaaaattatttttctaataaaaagggacaaaattttatattagtcaaagtttagagagtaaaaatattaattcttaacagtaaagataaaagaacctaacagaaaggacataattatgtaactgttatattatagaaagaatttataacaagccgtatattttaaagggcaaaattagatagtgccaaaagttcaaaagataaaaatattaattattcgaaaaaaaaaatatgtatatattaaagcataagaaaagctctatttaggtatagagaacttgaatagaaaattaaataaaaataatggatggagtttggaaaggctggaattctgggttagatcagttattgttgattatttctcagctctttatgcaactaaccgtgctatttgtggttctgtagttaatggtattcgacgttcggtcacagttgagcaaaatgacaacttactcagccctatcacagccgaagaagtcaagcaagccatcttccaaatgcatcctgacaaagctcctggacccgatggtatgagccctggcttttactaaaaacattgggatacggttggttctgatattactcaacttgtcactgatttcttcaataatgagtatacgccaacaggactcaatgacactc

SEQ ID NO: 233030 - DNA, 1168 bp, Cannabis indica
tttctttgccttggtgagacttgcaatacttgcataaagatccagtcttcaccggtttaccattaaaataacctaatttgcaatgacggtgccctttggggaaccctggtggtggagcaagccatacatttgttttgtgaaattctctttcaagttgtaaatacctccactcgttagccagccattcattttcaaaacgtttatagtcgtctagaactttgtatttgaggcgtaatttcgccacaatcaggctccttcttgatctcttcaggagttagaattgggtatttgcccttattccttctaatatacatttagaacttctaagagaattaccttctagggttaaataataagaaaaatatgtaacttatgaagtagaaatttactttaatagacataactagtagttgggaaggtgggataataaatgtcaaaaatgaattacacacttgtacacgtgtttctcatgcatagagcaatctaggcaacatttcgcgacaactcacgacaccatgtgacatgttctcgattaacatgtcgtattatcaacatgctagcgacattattatcgatatatataagtagttggttaggcggggataataaatgtcaaaaatcaattaccattcaatgtcaaaacatgatttgttatcgatatttcacaacattttagcgacatttagcgacatgacactttacaaatagaaacatgatttgttagcgacatttttgcaatgttatcgattacaattcacgattacttgcgatatacaacgatgtctgtacaattttaattaaagagttcaaaaaacactaaaaaaatataacaaccctctataattgtaattatttaccaagtcaggttttggtaaaacaagtctacacaccaccgatctctgaacatcctcatgttatcatcattaatgttctccaatgatcgattcatcatgaggtgttcgatgtactcaatggcatataccctgcaatcaccactgaaaaatataaaacaatacatttagagactaatatacatttagagactaatggtaagggaaatattaatatactatattggtaaatattaccttgctttactttggggaaccacctcacttggcatgcgtttagcatgcattgatctgagttggctactctcccctaactc

SEQ ID NO: 233031 - DNA, 1374 bp, Cannabis indica
atcagaacacatcccagaccctgtcttgatgcatcacaataaacaacgaatttctcttgatctgacgccaacgctaacactgaagttgttatcaaatgctggtttagctccagaaaacttgcttcacatttgtctgaccacacgaatcgctgatttttcttagttaactcggtcagtggcataaaaaatttagaaaatcccttgacgaaacgtcgataataccctactaaaccgaggaaacttcgaacttctgtcactgattttggcctcagccagttcttcactgacttgatcttgcttgaatccaccataatcccattctttccgatgatatgccccagaaaagacacctctgacaaccagaattcgcactttttgaactttgcattcaacttgcggtccctaagtcgctgcaataccattcaaagatgatgctcgtgctccttttctgactgagagtatacaaggatgtcatcgataaacactatgacgtagctatcgaggaaatccttgaataccctattcatgaggtccttaaaggttgcaggagcattagtcaatccgaatgatattaccagaaacttatagtgcccatatctggttcggaaggcagtctttggtatatcttcttctcgaattctaagttgatgataactagatcgctggtcaatctttaaaaacactgtatttcctgtaagccgaccgagcaaatcgtcgattctgggtaacaaatacttgttcttgataatcaacacacattctgtgggaaccctccttctttttcaccaacagaacgaacctccctagggcgatacactgggtcgggtaaacccattatcaagcatcccttgaagctgcaacttaacctccttgttctgctggagccattctatatggagcttttgaaacaggttcagctccaggtgccaaatcaatcacaaagtctatttctcgttatagcggtaatcccgacaactcctcgggaaatacgtcgagaaaatctttaacatccctgactacctcaagcctaaatattttgggtctgctggagtcaatcacaatcgctaaaaaaaatgctacacatccattgtgtaatagatccctagctcttaatactgaaataactgggatccgagacccctgagctgatccaacataaatcaatggatcttcaccttctagctgaaaagtcaccattttccacttgcagtctatactagccgaatacttggactgaaaatccatcccaagtatggtgtcaaattatgttaattccaactcaataaggtcagcactcaactccctatctttcgatcttaaccggcaataacctaatgcactcattggagataaccaattctccgctaggcatta

SEQ ID NO: 233032 - DNA, 1115 bp, Cannabis indica
agagaaaatacgctaagttgtattttgtaattagaaaactcataaataagagtgacttgtggagtatgttgatttaactacaaaatcacgtaaatttcatggtttttttttatagatatataataatttccttaaagtaattattagagaattataaattgtcaagaacattgtttatgttaacgaaattctgatttaacattttggtgattttattgagaacctcttgaaaattaaactctaaaaaacacttctccccctaaaaaagtttgctaaatattttcccaccgtggaaattaattcacaaaataacaatgtcgaactagaagagacggtgcactgccctggaaaagagccttaggggactaaccccccagaaggccgaaatgttggaagaggtcctactgaatgggactttgaaaggaatgaaaacgaataggaaattccagggagaagagattgtggagcctatgaccctactcgtcatgtctcgctggtagaactggaaaatcgacaacttcatcaaagattggtcaactcgaaccgaagaaatgcagaattggaacgcgaggctgcaatggctaggatggctcaaggtggcgcaccaccgacaaaaattaatccacccataaggcatctacaagggaggcctcgtgggtctagtgcaaggaagaatgctgatacccctattgaagagaataataaggaaaaccctacaaatccttaaaagcaacaaccagggaaattcttatggacaagaaaatccctcaaaaccccaggaatgtgaatgttagacaaacgcggcctgagacaccataaccttctcacaggaatgagatgactccatgagaacaaaaatttggtcgaccgcataatcattctagtccaccgcgagggccacaaaagactggtaagggtcgtatgtcaacctaggaaggagtcgcatgtcaaacttgtttgaacaacgacaccccaggcaagaagcccattctcagaggactcaatcaaacactgttgtgagtgaattaaggagaagccaaacacaaagccaatcatcacaatcctgaacaaaggaagtttcacagcatgagaggcgtaatacttgagatagtaat

SEQ ID NO: 233033 - DNA, 630 bp, Cannabis indica
ccagatacagttcagccctaaaattctaaaaccaaatgagatgacaatgatatgtacaaatacagcagcaattaaacccagaaatacaacataacaaacatgtgagatattgagaagaaaagccacttactgtttgaagttggggtttgggatgatgaacagctctgtagtctgcgaatccgtgaatgcagtgaggatctctccgagcgcgtaaagtcgaaacttaagtcagatgaaactcgtagaaaaaaatttaaggacagagatggcatgcaagttttcaagcaaatctagtcctagtctttcaacaaagaagcttaaaaaattctctgaattcctaaaatgaaagaaataatataaaggtggtttcttttttctattttatagtcctgggttaacttcgttagatcaaggagatatttgatcttacggacagaatttgaaatagaagtggaaaggatggtcatttaatgttgatgtaattcgaaaccacaaaatcgccaaaatcagaagacatgcattttttcaaaagggattataacaaatacaccctttgtaatcattgaaaagaactttttattaaaaagggctttttaagggacaattgttatacccgaaattcggctagca

SEQ ID NO: 233034 - DNA, 1086 bp, Cannabis indica
ttcgaacactcctagtccatggggccacggccagagaaagaaatcaattagtaaagtctcaaaaattacaaagacacttaacttatacaagtttagactccctctaaatctttgtcgcaatcctttgtaacacactttacgaatctgatttctgaacaaccattaaatagcgaactctcttcgtctttgaggtgtgagtgcttacttcctctcaaagtaaggcttgaacaattcttctcccaaaaacctttctcttgctcaatcaagttgttcaaaccgaccctaagaccaatataagaataaatatacaaatactaaaaactagatgaataactaggttttcacaaaaaagaactctctcttcacaaatgataagataatatgcaaaaaaatgaaagctagaagagttgaactgattggctgctctataggttttatttataaaacatagaaccttagagacaaccacaaaatcgtttccacagttgtacaaactttctaaaagaaaatcttgtttgcagcatcagaatcaggttctacagcagcaaaccagaccagaaaatgaaacttgccaaaaaggtattcgatcatgaacatggacttgatacctgccaaaaatagtgtgcttgatctgattttatcaagacacaatcaaacacattaaagagaaatagcaatggtcaaagttttcatataacaccaacttttcataagagaatttcttctcttacaagaagtttccaaaacaagaaaatggacagctgaaaaagattatttcctttgatagaaaagatcaataaatacacaatattaaggtgataaaaatggtttaattgcacaaagaaatcacaccataaataaacaatattttacacctaaattgccaaaaaaaaggactttacaatctccccggcactttaaataatcaaaatattttttaacaaaaaagtacctgcaaaacaaagttagccacaccaaacaaatctccccctgagaaacacaacattaaaccaaaatataatgctagctttaatccaaagtttaacacatgtaccaatctcaacccccctggaaaaagggtccaga

SEQ ID NO: 233035 - DNA, 1075 bp, Cannabis indica
aatttcatcaacaacataaacataatgaaaaaaatacaatgcaaaaaattataatctaaaaatgatacatactataaaaatcagtttcgaacgtataaattctatattaatatctaataaccaaacttctaactttattctttattttagcattcaatctttcatttgctttctaaaaaatcaaagttgatttaagcatacaaaatggggtaaagacaataaaagaaatcaaaaactaaaactagtttcatcaagaacataataaaaaaaaaatacaatgcaaaaaatataatctaaaaatgacaccaaatataaaatcagtttctaacatataaatttatatgaataattaataccctaatttctaactcatggggtgttcgcggtgcgggtggtgcggtttttgactattttttcaaaccaactcgcacatgcggttttttatatttctcaaaccgcacccacaccgcaaaaagtagtgtgatgcggtgcggtttatgcgatttggactatcactaaataattaaaatatctgaatacaacaaaacttgagctacacttgtcaaaaatacaataaggcttgaaaataaatataaaaaaaagtttcaagtttatacaatacaataattagtgggcttaggttgggccttcacatattggacctaaataaatattaaaattagtatttttatagcatgcggtgtggtacggtttgaaccgcatattaacaattcaaaatcgaaactgcactgcactgcacagtttaggaaaaatttaaactgcaaccgcactgcatagaatttcaaaccgcatttttttacggtatggtgcggtgcaggcagtttgagcagtttgatgaacacccctacttcatactctggtttggcatttaatcgcttatttgcttaatcaaaagtcatagttgatttgagccttcaatatgtggtaaatatctcaaagggaatcacaaactaaaataagtttcataaaaaataactaatgtcaaaacgatactaactttaaaaactagtttatcaacattagcagaaaagaaataaaaccagtttcatcaata

SEQ ID NO: 233036 - DNA, 943 bp, Cannabis indica
gtatatataaacagtgatctatatatatacacaagaattaccattatatatatataggagtatgtatgtataatatttagggtttaatgtttaatgtttattaatggagattaattactaacagtgtacgtagtagaagttaggaagatggtttaattaattgtgtaataaggtgcatatggtggggtagttcagaattaatatatttttcatatattacaatttaattagaactgtatgataaaaatctatgggacgggattcttcaatgctctaagtcttgtcttttgacatgttttgaaagttttctttgtcttttttcttctgtattttgggattggctagtatggcttcgagtagtcaccaaggtgccgattggatggatcaatatgcgcagttgaatatcgaaggtgaggacgagggtgttttgattgctgaggatcaatccgaagaggttcaagcttttgatgatcgttggtgtttggttggtaaattccttaccaatcggacattcgattttgacgctatgcgccatactttggcttcactgtggcagcctggtaagggagtttatatcaaggaattggacactaaccgatatctcttccagttctaccatgaacttgatatccaaacagttatcgatgggagtccatggacgtttaatcgcatgccgcttgtgtttcatcggttgaaacgaggagaggatcctagggtggtctcgttgcatgagttggatatgtgggtacaattgcatgatctaagtcggttttatgtcggaattggtggtcaagaatgcggggaactatgtgggtacgtttatcaaatctgatgctaagaattttattggcacatggcgtgattaccttcgtgtccgggttacaatcgacattaataaacctttgaagcggcggatgaagtgatcaagcagatggaacatgga

SEQ ID NO: 233037 - DNA, 812 bp, Cannabis indica
cgaagagtatcgaaccaggcacggggtgcctgtttgaggccgtagatggcgcgattaagcttgcaaacagcagtaggaaaagagggatcaacataaccaatgggttgagtcatgtacacctcctcttctagtgtgccattgagaaaagcattgtttatatcaatttgttggacatcccaaccatgagtgacagccaatgataagataacccgaattgtggatggctttacgaccggactgaatgtgtcaaagaagtcgacacccggttgttgttggaagcctttggcaacgagacgggctttgcaccgttgaagataaccatccgagttgaacttgtggcaaaaaatccatttattatccacaacatgcatgtgagggaggcgaggtacaaggtaccatgtgttgttgcgtttgagagcaaaatactcatcatccatggcattcttccaaacaggaatggtcaaggcgatttcaggagaggaaggagtggatagagagaaggccagtaaatggggattgtgaaggagggaggctaggaaagtacaaggtttaaatatgtcagccttggagcgagtgaccattggatgagagggcatgggaggcacaggtgcaggggtaggggaaggagaaaaagatgcagttggtgagtttggtgtaatggattgaataggtagatgtatggctggtgggatggtggacaaggaatcagtggtgctggggctagcatgttgtgttttggatgatccatgcgatgaaggtgttgagtgagatgatgcttcgggtcctgcaaaacaaggagagtgatcagtggt

SEQ ID NO: 233038 - DNA, 854 bp, Cannabis indica
ggatctgtttgtttaaacatagacaataattagtgagcatatatatatgggtaaatagtggtataagtacccaaagttttaagtttgtaagtggcataatctcaatgtttatttttagcggtataagtactcaatatttataaaacggtaaattttctctaattttgtcagtacaagctctattattttcttaaataggctacatataaggtccagatccttgatcattgggtctagacataaacatgtagtatcaattacttccaaatgttcctttaatatatttaaaacaaagtctgtactgacaaaactggaggaaaattacagttttacaaacattagttacttatgccgttaaaaagaaacattgggtttatgctgcttacaaacttagaactttgggtacttatgctcctatttaccctatatatttatatagtcattaaattattttatgtgaatgaagaacatgtatatgacacactcaaatttaacatattatatttatgtgtaattaatcttaattatataattaaaagtgatgagattccatttatgataaaaattaactacatatgcatgttattgtgtgtatgtgatttttgtatgtttctatatataatatggtgctatgtcaacttcacatgatgttattacgtacaaatttatattatattgtaacagatatacagaccaaatagtctaattaattaaactttattttgaaatggaattatacgaaaatctttataatatatattaatattaagtgcatgtgaatgaataatgttcctactaactagctatataataatatagtgataatctatatcattaattaacttttggtgaat

SEQ ID NO: 233039 - DNA, 1384 bp, Cannabis indica
ggaagtagtgtcagagatgggaggagacacagggatatgactgagagattcatgtgagtgactaggagtatttatggaagaattaaaacctggagatgcagcaacttgaggaagagcagtgggtagagggaatgacttaaccaactgattactggttttgtttgctgcagatgtaaagcctcccatctttagaaagacatttatagcctttgtgtgacaagctatacccaagaaatacacaaggtagagacctaaattggagtttatttctgttgtagggtctaaggttgggatagcataggcagccaaaaactcttagagaagtatactcaggtttagtgttcaataaaacctctaaaggaatactgtattttagtctaggatttggcattctattgattaaaaacacagcaaccctataggcttcatcccagtattttaatggtaaagaggcctgagctaacaatgttaaacccgattcaacaatgtgtcggtgcttgcgttcagcaacaccattttgctcatgagtatgaggacacgaaaccttatgagtaatgccatgttcttgtaaaagtttggtaaaggcttgatattccaccccccccccccccaatcccgattggatatgtttgattttgtgaccaagttgaagctcagcttgagctttaaagctagtaaaagttggtaaagcttcacacttggttctaagcatgtagatccaagtatgcctagagtaggcatcaacaaaactaatatagtatttataaccactagaagaatttataggggctggcccccataagtcagtgtgcaaaagttgtagtggttgagtgtagtttgttgtggatataggaaaagggagtttatgatgtttacccaaactacaggcatgacataaatcggaaaaaccagtacttgttttattgcttattttgatattacaagtggacaaggcatgttggacaattctagctgtgggatgtccaagcccattatgccaaagagagtattcagcatttagaggtggaattgtgtgtgtattacactgtggtacagaatttattgagtgagaaggtgaagtactggatgaacatggctgagaagaattgacagaggtatgaagttgcagggcatcgaacttgtagagaccttgatcaagcctcccaaccagcaaggtcttcttggtatccaaatccttaacaagacaataagaggggtaaaattcaaaccaaaccttgttatcattagcaaattgagaaacacttaacatattttttgtaatagatggcacatgtaaaagattgttaagaagaagattttttggctgaaaaggagaaagaaaggttgtatgtcctatagtgtgaataggaaaacctgaaccatc

SEQ ID NO: 233040 - DNA, 1783 bp, Cannabis indica
acaataatacataaatcatagtttgggaaaaaaaatcctatgggaaaaaaaatcctaaataacctattctatttagtcactgaaaacacatactaaggaggaaatactgaattcaaaaatcacaaactccaaattctctcacaattttatgactaatttgctaattatttattaacctggacactaataaatgcgaaatttatgacatttcataatatatatacatatttatatatataggacatttctattatgtagacattgattttgtttctaccatggattttttttttatccattcattacaaatcatttaattaaaattgtgtaggaatacagtagttatgaaagaactcacctctccaaaatattttatcattttattgtattattctattttaaaaaagttcccagttaaaaaaaactatgaagatgatagacattaattaggtttatttttcttttatcttcaatttaatcttgacattcttttatttacaaatcaggtgatggtttgctatagttagtttgaaatattcacatatactttgatgatgagagattatgtttatactaggttgattgatgatgaggagaaggaaaagaaatgttgtcatatttttaaggtggagagaatcaacttgctatccccaagctttcttagtttttgtcaatataattaattgagttagttaaaaaaatagtctaattgttaacggttttcataaccgaatgtagctagtgttgtaactaatcttgattagcttaattctcttctgtttaaatagctatttaatcaatgaaagaagtagcttttattttctcctcaattctttttctaaagtctctctgtcttgctccctatttttcttagatttcatactctgaaattctacatggtatcggtcaccatcgactaacgtcaaccatggagtctacatctgtcgatcatactccaacgactagttaagtcctcactcaagccactgtcgagccaccaacctagttgaactccaactggaaccctttttctaattcccttacctctattttaacgattaaattaaatcgtactaactacttgtcctaaaagtctcaggtcttatcgactgtactaagccacgatcttgacgaaatcttgctcactggaatccctcttccaacaactttgatcaccgacgaacccaaccatgtgcacaaataatggaaacgcaacgatcaactattactttcttggttgagatcgtctaggacagaaggagttcttacatcactggcaagtttcccctcctctcactctgtgtggcctatacatgaacaaaagttctccagtcagtcgaaggctcgcttgcttcaacttaaaagccaatttttcacaattcgcaaaggaggacaaactatatctgactatgttgataaattacaatccattatcgactctctaactgtagcaggctctccaatatttgatcaagacactactcttcagttgctcaatggtcttggacttgaatttgattcagttatctctagcatcaccacgcacaatgaccgtcttacctttgaagaagtccaatatcttcttctcttgcatgagagccatcttgaacaccacagcttcatgacagatctcactatgaaacttcaagccaatgtagccttcacaggatcaaaaaccaatggttatcgtcctcctcagggcctcaagaatagaggtcgtgggggctttcatggtcccaatcagcataatcgccccttatgtcaactctgcctttgatatgga

SEQ ID NO: 233041 - DNA, 950 bp, Cannabis indica
tatatatatatttttaatttcgattgtgcttagaaaaatattttaattaaatttatttttaaagcaataattatacttttttttttgtaacaaaatagagctttattcaaaacaaagcaggaacaaccagctgaaggcaaaacaaaacaaaggctcaacgagccaaaggggctgctaacacagcagcaaccaaaagacaaagctaccagcccctaattacatcaataatgtacttatcctgctttttaagggtgttacaagtcatacttaagattctagattgagaaatcttcctaatttccatgctcaacttaaaaggagaagtacaaactaaatcaaaaatacaaccatttctatttttccacaacaagtaaatcgctgctgcaaaagcagtgtttatcactcggttcttgaaatgtaaggggccccggatacaccaatgctgaatgtgctcagcatcaatcggagaatccacatatcccaaccatcttcctatttcagcaaaagttttcctggcatacacacagtcagaagatatgggagtgtgtttctatatcactctcacaaaccggacaaaggttcgagagtaaactcagaaacttgctcaattgatctcgggtgaggagttgagcattgctagcctgccataaaataaacctatgttttggaacaatgagcttattcccgacagctctactatgtttctcttcctgagcttccaaatgcatgttatgaaagagtttagcacggaacttacctcccttttcagcaagcaataaggatgccttatttgtgcttgaccggagtttcataaactttttgaaatagtagctcatatcttatttgataggaaggctccacacattttgatcctttaggtatatagagtttatccacttcacccaaaggcaatcttgttttctagcaatggcccaaatgaacttggccat

SEQ ID NO: 233042 - DNA, 1277 bp, Cannabis indica
gccctgttcatcctctacgccatcaaaaagtagggtgtgccttctttgcatgaggtcagttggttttcgacttgaagtctacccccaagtagagcaggttaggataattctacttttcccaaccagattttaagtggttgacgagcaccgtggacaaggttgtgagcaaaatcgagagttttgttgacgagcattattttgtggaaggcatgagcaccacttatactcggtttcagcagatcatgatatattaccgtccacctcttatactggctcttagggatagagctcataggattgttcaactgccgaatgctactctaaacatcaccttgctgaccttggaggccaactttgtggagcacaggctgtatcgagtagactttataccttagcctgtgaaggggaagaagaataaatccagtgttggtcgggctgagggagctgagtaggaaaatgagcatattcaacttaagcatgaggctaagctgaagggaggtgtaggagctaagtagtatgcttaggaatattctgagtaggagaaagagctcattcaactcaagcatgaggctaagttgatgggaggagctggggccgaacaacatgctcaagaatcttctgagcatgaagatgaagctgaggaagtggaggaaaggccacttaaaaggaagaagactctctcgaccaggcaacggcccatcgaacatacaatccagatcagggagcctggtctacgtgctcagccatccacccttgtagaaggaaaggggaaagccatcctagaggagcaagaagacttgtcggatgatgatgccccatcagtacttgtttgggcaaattcccctactaaagtggagggtactccatcttgtttttaactttcttaattatcatgccttcatatttcttatgcttttttctgaccatgttatttttatttcgtgtagacatgtctcataagatacttgaggccctaaagaagagagtgggaggaagctcgggcttatctcctctggccaaaaagtccaagggtggtgagaagaccctgtctagagagaaggcactaatcgaaatggtcattgatctttttgaggaaaaaaatgttgtggaccctcccgtctcaaaaatgaataagtccaaagattctcgagggggtagcgcagataggtcagagcaagcgaagggtggatccgacctggtcaaaagtcggtccaaacagattaaggcccctgctccacctctggtactacaccgagagactaaaagtggctgagaaa

SEQ ID NO: 233043 - DNA, 603 bp, Cannabis indica
ttttctttcttttctttgtcgtcttcttctcattgccaaaataacctaaaactaataaactagccttaattccatcaccttcatcttattaattttttgtctcccaagcttgaagatgagtcttaaacatgcgtctattggagtatgaattcatcgaggttattcgagctttaatagtagccgaggaggaggaggttaatagatctgggtttgggttgccgatttgggtcaccaagcagggcaggggcaacagatatacatcaattattgatacgacccaaaaccctatctcactcctaaaactaaattatataagaatccataacataacaacttaattaatatcaactctgggatttcaagcatcaaagtacctgggcggagctagaagtgatcactggatcgccatggctgccattggaggattcctggttactgtactcttcatacgagcagagaatatcatctgtggcaaaatcgaatcctttggaactggagttgggcctacccaacgatccaaatgccatagcttctaagatcaagagtggagaagggtttcaaaataccgagaattggggttcgttagttaggagtggacgaaaa

SEQ ID NO: 233044 - DNA, 713 bp, Cannabis indica
aacctttctcagtttgtaattagttggtattgattaatgaattattttcttgataaaaatattatttaaatgtattaatagaataaggtagattttcttataatgccaattatacctgtattttgagcggtgaaaaaaggtcttctatatgacatgtggaaaaagagggacattaaatgatcttctcgcaaagagaaaacatataataatcttctcggtgatcatcaagtatgtcaaagtaactgacgagatgtatatagcattaataaggtacttcttgcatatcacgaggaataaggcataccctacacagaaaggaaagccaagctcgtcatgagattgaatgcattcgactcagttcacataagatgtacaacttgaaaaagtttacttgcaaggagaggaacccttcatccaaacttccctctcttagcaatcaataagaaatattagttcatcctagtgattcgtgagaaggtctgcattcagcatacgtcaatcactcagtgtgttctttgaggagtaaaatgttataaaggagctcctcggtagaaacgtgataaaagtctagatcatagaataattgttattcattacaaatactgattgtaaaccattcccacctatttgtagatatataaaaagtggggaatgtccacgtttgataactataatttagaaaagaatgagataaatgttggattttgtgccct

SEQ ID NO: 233045 - DNA, 974 bp, Cannabis indica
tagagatctgaacggaaggaatcatttaatttcgctgcacccaatgtaaggtttcttaaactttatatgtgtttatttcatcgttttggaaagttcatatttagggtgttaatcaacatacttgtcagtagatctaagatcctggtaaaataatttccaacactttgctcactgcgttctctgtcatcgttttctgcttccccttcatgtcgaatgaaaatcaagctgaaactcaaatggagggtgaagattaaactgtaagggcaacaaaaaatccaccagcctctattggacatagaaatcaagacatacaattcatcaacttaaaaaatccactcgaagatcccacaaatccatacaacttcatcatggtgataacccaggtaacattcttgtctctcaacttctcactggacaagataattatgtttcttggagtagagttacgcaactttcaatctctgttaagaacaaacttggcttttttgatggatctatttcaaaaccatcaccttccgattatactctgtataatgcctggattaggaacaacaatattataattcttggatcttgaattctgtctcaaaagaaatctcttcgagtatcttatatgatgaatctgctgcaaacatctggactgatgtcaatattcatttctaccaaaggaatggaccacacatttacaatctcagaaagaacttaatgaaccttaaacaaggactatatatgcaagtctatagtctagacagctaagaaaactaactggctaacaacccactgacacataaccaacagaaataacaacaataacaaaccataacaactaatacactagaacttaatacttgtgtgactatgagtgtcactctgtgatgcaagacaaaacttctactaaacatggtcttcacaaatttgtatcctataaaaaattatcagattctcacaaaacttttatttctgttattacatct

SEQ ID NO: 233046 - DNA, 1502 bp, Cannabis indica
caatccgtacttttttagtcaaacaacatctaatccgcactaagtgcggatttcataatttggatctaatctgatccgcataacagtttaaatccaatccaatctatccgcaatagtgcgaattagatcggttattttggatcagttgtttttttgatgataaatgatttcatttttcatagaaaaaaattaaaaaaaagactaacgtttcttaatctccaataataatctattttcatctccatttatatataaatcaaaccaatatacatatatgtcaatatatatgtgctcatctttagatttacactaaaaatatatatgtatgaattactaaaataaataagttagtatatgtatttaaatttatgtgtatgtgtctatgtgaataagaataattttattggtattttttattataaaataaataaaatacaccaactcaatatattattgaaaaagattaaaaaattagaagtttgtgtcttttgttaatattgctagaaaattaatatatattatatattataatttttttaaaatatatataattaagtgcggattggattggatcggttactttttgaggtcaaacaacattcaatccgcacaagtacggattttatttttcaatccaatccaatccgcgcaagtgcaaatatccgcattttgcgaattgaattggattgaatcgtgcagattaaattgaatacttagtgaacacccctgaccaaatttattaatgattattattggttattgttgttacattaatattttttggtgtttaatttttttaatagtataactctatttagttataacttctcaattaaaataaattttgcttagtctcaaatgtatttttaaataaaagttgaagtgtaatactattcaatacaaaacacatacagaccctagtatgttttgtgagataaaaatagtaaaaaagaaaagaaaaaaaaaggaacttggaagttggaatcaccaatattcaactacaactagagatgtatttttttggtgagatacaaccccaatcatttgaacatatttatcgatcatttttaatggaaataaagtttataatatcaatcatactgacatcttatgctttttctccccctgctttttctagcattccctttatttcctcactatcaaatatcaatcatactgacatcttatgctttatttcaataatttagaggacatgaactgatgtgactcatcaaaatagccgtttattattcaaaatctcccccactgctcttcgaggaaagtaaactacttattgaaatacttgcctgtgaaaaagtggtagttttaataatcatcatggattgataataatgaaagaaaaaaaaatcccagtacccaaatctaaacttcatcacagttcaacttaaagaaaatgaaaaggcatttgcacatgggaattgggatattcaaactttgttgtatagttttcttctttttatgatgtcaagtaaagagcccta

SEQ ID NO: 233047 - DNA, 885 bp, Cannabis indica
ttggtcggccttgacatacttctgtaaatgcgggttattcattctgatcaaaaactcaatttccctcttcaaattattacattcgtttgtgtcgtggccatagtccgcatgaaaatgataaaacttggatgtatctctcttacttacatccttcttcatggggatggtttcttgtacgacaccatagactgagccatcgcatagattgtctctaagtcatctgttaggactgagaaagcagtaaattttgaggcattttcttaggggtactgctcggcatggccagcaaatttgctttctttccatcaccctacctattgctgttattagacctcttcccatttgaatttgagctgcttgggtattgtggattctaagcagatgtccctgtcaatattgcatgttggtggattttcttttgtctgacagtatccacatgccgaacagcttttttgagcttaatgaatcaatttgcttgatctagaaattcagccattgaccccacagtcaaccttttaatgtccttccacaactacactacaaaaatgcaattataggtctattaatcccacccaaacacaaacaaacaaaacaacacaagagtttgagtttacagtttacacctcaaaaattcagtgtgcaaattattggtgatgaagcggtgaactgacgttttggaggatgggttgagattcatcttcttcttctttggccgcggcgatgtatttgggggtggcagctacagtgagtttcgaggtggtagtatagggaaaatcaaggtgagtggttactaagaaatggtggccagagagatgaagagagagtaagacgaagagaaagagagaggttatgattagtagaagcttattggtgatagggatgatt

SEQ ID NO: 233048 - DNA, 529 bp, Cannabis indica
gctaaatgtgagttttgtagtagtagtaatttcctctacggccctccgaaccgcctccaccttcggtagctctgccattttaggtgtgtagttgtggcacaagactagcacatgtgagcatcgaaataatgatcaagttcatctgcccctttcaaactcatgtaatgtgtgaagacagtggcttacaacatagaaagcttttagaaagataggttcaaaaattttcattggagaagaatgggtttggtttattgatttgagagatcttgaatatttgaggcataattcgttaacattctagaatattctctcaatttcaatttctgcaattgtgattgcgtcgaaaaaagagaaattttattttatgttttagtatattttgaatttaaattttaaatcgttaactctccgttagttttgatttaattaaaacattaaaaaaatcgttaaatcaagaattaggttaatagctaaattttatataaaatagagaatagatttaatttgaatatattttaattaataaata

SEQ ID NO: 233049 - DNA, 4805 bp, Cannabis indica
gaagattgccaccaaaactttgagattaggccctccatctctttaatgacttcttgaggtattaaaaaaacactaattgcatagcttggaagtgcttgtgccactgtttttattaatatctctttgcccgcccttgataagaactttgttccatagccaagtagtctattcttcactttatttttcaagaagcccagagcagttgttttattccttcccatggaactaggtaaacccaaatagagactgttttcattggccgtggtcatccctaggatagagtttaatctatctttcatggaactcagggtgtttgcactaaaaaagatagaagatttggagacattcaccttttgacctgaggcagattcaaatttacttaagacttcttgtattcgcctagcttcagcttcagtagccttacagtaaaggtaactatcatccgcaaacaacatgtgggatactctaggagcaccattggctactttacaaccatgaagccatcctcgttgttcaaacttgcgaagcaacgcagtgaagccttccgcacaaagaatgaagaggtatggtgatagaggatcaccttgtcttatgcctcttgatggagtaattgggccaacttcgttgttaccatgaataacactgtattttgtagacttgacacacttcatgatgagctgaatccaattgtcaacgaagcctaacttctgtaacattgcctcaagaaagtcccactcaatgcgatcatatgctttgctcatatccaattttagggccataaaaccatccttgccctttctcttccttttgagataatgcaaaacctcaaaggaaactagaatgttgtcagaaatcaatcttctcgggataaaagcgctttggttctcagatatgatggaatccatataaggcttcatcctattcaccataactttggttataatcttgaacaaaacattacataaggctataggacgaagatctgacatacgttctggatttttcttctttggaataagcactacattcgcatcaccacacccatcggtaaggagcccattttcaaagaaagaacggacattcttgaccacttcttctcccacaatcggccaacacttttgaaaaaatgtaggagtcatcccatcaggtcccagactcttatctggatgcatttggaagactgcttttcgcaccccttcttcatcaatcggttgacataattcagaattgatcaagtcagtcaccactctaggaacacaatcaacaacttcattacactcacaacccgaggcttgaaataattcttgaaaataatcagacacaaccaacgacaaactcgactcccatgaaacccaattaccgtgagaatcctttagctaagtaagttgattatttttcttcctactagtggcagccttgtggaaataactgctattgtgatccctctctttcaaccagaactgttttgcccgttgcttccaaaaactctccctttgatcaaaagcatcatacagttttttcttgatttcagcatgtctttgaactgagacggtatccctcaaaccatgaagcttcttcaaatccgccttatagctcttaatacagtgatttaaagaaccagtaagctccttcccccaaatagataacttttcagcacacaattaattttgctttgaatattaacatgttgatcctgggcccaaacatcacgcacaatctcaagacaatatggctcttttaaccaagagttctcaaagcgaaagcgacgactaggaataaaagtattccccacaaccggttctaggaataaaggtgagtgatccgaagtagcaaaacccaaattataaagacgagccgattgaaataattgattccaagaagtagacacaagggctctatcaagacgtacctcaatccacgcattagtcgctcttcctatttcccaagtgtattgatgaccttgcaactcgagatcatctaatccacaatggagcaatgtttgctgaaaactggttaacaaccattgaggataaggacgccgtcccctcttatcttcttgacgaacaatgttgttaatgtctccaataacacaccaaaggaagtgaagaccgatcctttagacttcgaaagagtgtccatgaatcgcttcttctatttctgttgggctctccataaaaaccagtgagacgccatgtttgagaagtaggtgataaagagacttgcaagtctatgtgtttcttagaaaaacccaacaaagagcctgaattctcatttttccaaagcattgcaataccacctgaaaccccattggcatcaaccacgaagacaccatcaaaattcaaagtttgggccaggcccacaacttttgatttaggacactttcatgtttttaaaaaataattatatatataaaaaaaccacagttaaaatttaatatcatcttattactcaattactattaaacaaaatacaaataaaaaatttaatatgatttgaaattttcataaacaaagcacaatttatttcctaatttgattaaaaattggaagtcaaaaaatcacaaacacgcgtaaattatccatagacatcacccaacaacaaacagcatatgcatctgtgttcatatcgccaaaacttacacaattgttctttcctgaccggaaagcttaagcctccattgaggcaaactcagtggaaaggaaggggtaagatagaggaaagtgcaagggttcgaatccaaaccccttgattattagtaaaaggtaaacccagaaagcttcttccatatgaaatgtaatttgtcctcaaaacccaatcaagtgatacatactcttttcaacctttggtaacagccataggacccattttgaaactacaacttcaattgattaaaaaaaaaccatgtccagaacgggcagcagatacaaagatatcgaaataaaacaaagctccaacataaatgagcgcaaggaaaacgtgattttcccagaggcagtatgaataaattcacatacatcgacaaaagtaaaacattatatctgagacttgctacaaggattcttcatgattactttattactacttaggattccagcaacaaagattcctgcaaaacagaccgtgacaccagaaattccttaatcaaattattaaaaataaattttaaattcaaacagaaaacttaatctgcagaagaataaatttaaaatattacaatttccaaacaagtggaagtactgaactaaaaagcaaactaagcaaggaagaaaatgtagatagagaaaacaagaaactggcagacccaaaaataaatcattttggacgcacaactaggcaggacagtggaaaaagaacagaaagggacatgagaatgaaacagaaaagcacaagggaaagaaaagaaaatatttgttaaaactaaagaagaagaattacatattatttcataaatacattaatgaatatgatctgatactacttagttataatttttttcttatcgaaataacctcagcccccatacatctgaaacaacattatgctggagccaggatttaaaagttaagcaccatcaaaaggtgcaattatcatacttttctgccgtaccactttcaaaactgcttctcttgtttagagtgtgagaggtcattttgcaaagatttatcaaaactaggccaaagacttgaaaaaagaggccattttcccaaggaacccatacctctaaaaaaaattgtttttactagctactatggttgcaaagactcagccacatacagctgaaaaaccattatgttggagccaggattcaagttaagcaccatcaaaaggtgcaattagcattttttttttgtaccaccttcaaaactgcttctcgtatgtttctaagatgatcttatatttacaagctgtattatggttgcaaacactcacctcacatcagtatttagcatatgaaaaagtaccagtctatcaaagataactcacaacatctaattaaatcttgagaatatcacattgaatgaaacatcattcgataagattaaagcaaacccaaggggttgggctagtggcctcggagaaggacgggatgtgtagttaggcatcccaccttcacttccacttaacattgaaattctagggggcactggagcaaactcccagtcaagtaacaaggagcccccaacacttgttaaggcaccctcaaactaacgcaaacacaccagttatgaaagaaaaatgtaagcaatagaaaaccgtaacttttatgtgttaaacccgggacagaagtccgagccttagtccaggcaaaaatgaaacggtcaactcctgtaaatatgattattagacataataacaaactcgtgcaatgtagctaactatgttgtttagttgtatagatacatatatacactcatatatattgaaagaaaaaaaaacaagaattatattaacctaggaaagaaaatagaaggtttaaagacaatacggtatttaactacaaaagaagatgatatgggctcatattatattacatccaaaaatttcaatctctaagtagatcagaaagagaaaaaaagagtaaattatggcaaaaccccaaaaattttaacttcactaataattaacccccaaaacccaaattttagcgagaaaacccccaaaactcatgttctgttagcaattaggaattttcatccatcttttgcagttaagggccacattggctatccatgtgtacacaagtattgtccacaatggaaatgttgtacacgtggaaaaatttaattggcccgcgtaaataaata

SEQ ID NO: 233050 - DNA, 1538 bp, Cannabis indica
ttttttctggattggcttcaataccgcgggcattgacaataaagcttagaaacttacccgagctgactccgaaggagcactttaagggattgagtttcatgttgtatttcctgaggactttgaagcattctttcaggtcatctatatgccccccatccttcctagatttgacgagcatgtcatccacatatacttccatatttcgtccgatctggtctatgaacattttgtttaccaatctttggtatgtagctccggcgttcttgagaccaaatggcatgaccttataaaaatatagacccatatctctttggaaactcttatgttcttggtctggtggatgcatttttatttgattataccctgaataggcatccatgaagcttaatatctcatatcagactgttgcatccacaagttgatctattcttggaagtggaaaacagtctttggggcacgccttgtagaggtcggtgaagtcaatacatactcaccattttttgttcggcttgggtactagtacggggttggctacccaagccaggtagaaagcctcaattatgaaattgttgttgcacagcttttctacctcttcttttagtgtttgggcccattcctcgtctagcaatcttattttttgttgaacaggccgaaagtttggatcgatgtttaggacatgtgaaattatagaaggatcgattccgaccatgtcctcatgtgactagacaaaagtgtctaggtttgctcataaatattttatcagagttaattttacttcaagcaacaaaccttttccaattttaagtttcctgcttggaacccttgggtcaatttcaatttcttctaattcttccaccgacctaaaatttgtatttggttccccaagtcagggatccacatcttcgtccccgccttgggcgattccctattaggcaatgatcttccccttgttcgaactctgactagagggttcttcctttctggccttggttagggctaggttgtaacattcccgtgcaacttgttgattcccttttaggcaccctaccccattctttgttgggaacttgacgcgtgaatggaatattgatgtaataacttttaagtcatataaggttggtcggcccaacatgacgttaaaggctgacaaaacatcaagtaccaggaattgtgccatcacaattattctcttcggagcttgcccaacagtgatgggtaggtgaatttgacctaaaggtgcaacactctagccggagaaaccatatacgggctggagacagaggatcaaatctttgagttggagccctattttttcatacggtgttttgaacaggatatttgctgaggctccattatctatcatagttcgagccactgttttgttggctatctgtacttccacgactaatggatcattatacgggaagcgaacattaacagcatcttctccattgaatgttatagttgttgggttttatgccctaaataaaactcatttcaatataatcagatttgtttattaatatagatcagaaata

SEQ ID NO: 233051 - DNA, 1308 bp, Cannabis indica
aatacaaaataattatagtggaggcatttgatggatgtcaagtgattgatattattcctccaagatcaccacttaaatacacatgaatagacataataaataaaaataaaaaaaacctttgtactttgatcaaaataagtaaaaaagtgagtccactcatgaggtctgaatattaagttaagaatgaatcatagttgtaatactttagtaagatatttcatatagtcctcctgtatgaatgattgatcgaacgatgaacttggatgactaggagagaggcgcatctgtctgaataatgaatgagtagcaggcactctgtgcttcattttgtcaaatttgaaatacctttatcaagatagaatgagtcaatgcgcactccctggtaagatgtaggctgatggcacagttggtgcattaggcaggttgacaatgctgggttattaccgttgtttatgccttgatcgcccaattggggatcacgaggcttttagtagtttcggggcgtttgggactacgccgtaaaaattacattgaggtgatcacgaagatcgcctctgtgaacttggtaccttcctcctcgcggtgtttccacagagccagacctggtatatacactaggagtacgactttgtgaggatgaagaatgagattcagcatcgtttacctcattacgcggttgggccctgctatgagggttgcgtcgctcggggtcctcctcttgtggcacttcacggttggagtttcgtgcgacttgatccctctatgttggttgatacaagtctagtccctgttgtccagtcctgcgttctctgcgagtgaaaattagttcgccgcctagtattcgttacctgggagttatctaaatgtgtggttagtactcgtggaggacgtcgggttctgacccttcaattgatttcagcttgcaaagcctgcatttggtcttgtaaggccgtatactgggtcgtggtcaattggatgactccttcagacaccacagtaggtgtaataggcgggaattgccccacaatggctgccggtgtagatgtttctccaacatgagcggcagtttcagggaataagttgagaggagtaatggttgtctgtcccactcctccgttgatggtgtggacaggtgctgttccattacctgggagtggaatattcatcattccaacattgattaatctagtgttgttatctccatttgtttggtttccagccatgatgattttcctctaaaatcaacagaaaatttctttcccatagacgacaccaaatgttgtttgaggaatttagacaacactaaat

SEQ ID NO: 233052 - DNA, 967 bp, Cannabis indica
ttttttttgtacgaaattgtaggatggactgtatttcttgttatatcgtacaatgatgtttggggtgttgagggttttaattggatttataaaggtgaaggcagtttgaagttgatggttaaaactgacataaccatacaacaattgcgctaaattttatatgaagagttggaggttgacctgttgacttacgatttgaaattagagatttgttccttatacatgaaggggcaaatggtttcgctagaggttattaagaaagaataccaactaagagcactcttaaagatgagggaaacagtgtcgaacacataatttatgccattatttgtgaccaaggtaagaaatgatgagaatttggagcctaccccctactaatcctctctcttgaagtgtggtagggtctttctgtaacaccctgattaatggaagaccatgtgtcatgattacatagtgctaatcccgttaaccaaggtctaataagccaagtaaatttaaataatttaatatttaaataacataacaacttgtaataataataacaatctttattttaaaacaaaataatataattacatatatgggatcccattgttgaccttgcttctagccaacgacaatgagtcaagaaataaagagattaagtaatgtaattaaaagaaagcaagaaaacaataaggtaaaatgaacaccaggttttaaggaggttcaaccctgtaagtacggtaatagcctattccgattgtattgtattgacttgagagaaaaaaaagtgttcctcctcttgaaagctcttacaattgatagtgacgctaggtcactatttatagagacttaatgcatgagagatggtttctcttttgcttataatgcacaaaataggaaattacaatgattctataattataatgtatgaaatagttaactaggataggttgccatttttctctgactcaatcccatgatt

SEQ ID NO: 233053 - DNA, 753 bp, Cannabis indica
aggtgatcacgaagatcgcctctgtgaacttggtaccttcctcctcgcggtgtttccacagagccagacctagtatatacacgaggagtacgactttgtgaggatgaagaacgagattcaacatcgtttacctcattacgcggttgggccctgctatgagggttgcgtcgctcagggtcctcctcttgtggcacttcacggttggagtttcgtgcgacttgatccctctgtgttggttgattcaagtctagtccctcttgtccagtcctgcgttctctgcgagtgcaagtagttcgtcgcctagtattcgttacctgggggttatctgaacgtgtggttggtactcgtggaggacgtcgggttttgacccttccattgatttcagcctgcatttggtcttgtaaggccgtatactaggccgttgtcaattggatgattccttcagacaccacagttggtgtaataggcgggaattgccccacagtggctgctggtgtagatgtttctccgacatgagcgacagtttcagggaataagttgagaggagtaatggttgtttgtcccactcctgcgttgatggtgttgacaggtgccattccattacttgtgagtagaatattcatcattccaacattgattgatccagtgttgttatctccattcgtctggtttccagccatgatgattttcctccgaaatcaacagaaaatttctttcccacaaacgacaccaaatgttgttggaggaatttag

SEQ ID NO: 233054 - DNA, 1131 bp, Cannabis indica
gagccgtctgcgattacaatgggagaggtgatcttgccttcgataaactgggtagattgattgtgattttcatacatattgatcgcctcttctgcctttgtgtccagttcattgcatttagatggtccaggcccgatgatgatcccatccaaagcctttcgtttctttgggccattctcataatccatggaccttaagtcacttatctccatgaggggattgaataaagatggctccctcatgtacttgtccaccgttccaagcctagttaaagtttgaaagcccatttcccataaatttttagatggccaagggatgagttgggcttggctgccaagtaggcttgaatatgggtttattgtctttggatccagcttgggctgtgccaggcccactttagcttgggattcctggagggttgacttctttggtattttgggactactgttcgctgttggggggattgtttcagcttggtcttgagaagaaatggaaataaagtgattgtttcccctgcaatcatgcatagcagacaggctattggacaacagaattgttgcatccgatgcacttccaggtacggcgttgctgtcgacaacctgtatcaaagccgaaggcacgccggaggaatggtcactatctgggttgacaacagaggctaccgggtttggcaaatttgcagtcgtttttttcaccataaggttgacagtatcctcaaaaggacagacttcccctatccctggtaaggaaaccaccgaaaaacaactcacccgttcttcctccgtttccggcaggtcttcaaccacttgttccaccattcgtctcttccctggatattgatttcgttgttctctagcctcccaagactcaatggccttcatcgagttatccattttccaaatttgtttgaatttgttatccaccgtgaggcgtttttgtattatccactcttcaaaccatttaggcagcaatggagagaaaggccatcttgcatcgtcgtcgtatgtcatccatgagccaaacattgggaagaatgcaccgttgacatcctttataacagtagggggcttgaagcagaacttttgttcatgtgatatgacgccgcatatgagacagaacttggggagtttt

SEQ ID NO: 233055 - DNA, 869 bp, Cannabis indica
agagcgatcaatttatcactactcgatgtaaatcatctatagaggatcttcgattatttgaattgaaataatggataattcatagcgtatctatatttggaacatatagagtattctatgtaataaggagtgtaattccaaatctatagtggaattaagagaaattaattggttacataggcccatggtccccaaattgtttgagataatattgtcttgcaaactcaattaattggtttttattaatcaattaaaattctaaataagactatgtcttgtttatgaaatttcactaagcaattgtttaattgagaagaaatagatgatttacgatttatttgttgattaataaataatttaaatgataattttatttgataattaattataatgattaaatagatagatttgacatttatagagttagaattaaaatatgacatttgtgaaagaaaagataagttcttaaataaaatgacaaaattgaaactgttgggcccactagggttcgaccacttaagggttcaattaagccattattttatctttgttgattatatataattcaaatcctaaccctatatgaaatccaataaatagaaagagacaactcttattttctaatctgaatgagaaacctattgtcagacaacttataaaataaagagagaacctctattgaatttgaaatcattgtcctcttttcttcttcatatttttgaaatccctatagtgagttgaggaattgtccacacaattcaagccaatactcaggcctttgtggaagattgtgaagaattccaatagtagaagaagatcaaggtttaggtcttgatcatacttgtgacaaaaaggatcaaaggttagag

SEQ ID NO: 233056 - DNA, 673 bp, Cannabis indica
cgctcacggattgattggttacattcgggggatcgcaacaccaagttttttcatgccaaagctttggccagaaaaacaaataacactatcaagtttcttcaaactgctgcaagtaatcgggtttcttcaaaaactcctatgctttctgaaattcacaattattttgctggtattttcactgcttcagacttagatgaagaagctcttgctgctaccttagacgccatccctacaaccgtgacacctaaattgaattcaaagcttttattgccttttgtagcagctgaagttgagtatgctttacactctatggctcctgacacaagcccatgccttgatggtatgtctccaatgttctttcaacaaaattgggatgttgtgggagatctggtcactaaagttgttttaagtgttttaaatgatggtgctgatccttctgggttaaacaaaacacttataactctcataccaaagatcaaaaaaccagagcgactccaagactttcacccaatcagcctttgcaatgttatctctaagttgattacaaaagtgcttgttaaccgcctcaaacatattcttccttatgtgatctccgagacgcaaagtgcctttttgccaaaccggttaattactgacaacattcttgtggtttttgaattggtcaatgctatta

SEQ ID NO: 233057 - DNA, 1350 bp, Cannabis indica
tctcaactcaagcccaacaaaggataagaaaaattataaaagaagcaagcacaacaggggctaagggatctcaggaagtcaagtgagagggagtcaaaacttaaagtgagcacttatgttggaattgatattcactatgttggcaaatttattcttgaatgacagtttagagttaagattgtcttaaataataccttctatgttcctacttttaatagaaatttagtttcgtttccgcttttagttaaacaaaaatattcttttattttttgccaatcacattgttgacattatgtttgattgaaaattatttaaaaaatttattctgatggtctttacaaattgtcattgactcccttagcatctcctcttatattaagaaaacatctttattattatgacatatataataaactgtgtcatattttcaaacaaagaattggtcgattacttcgagctaaaattcttcctcctcttgataattatagttgtgatacttgtgttaattgcactcatggaaaattgactaaaataagaaagaaaactatcaacctgttgtcgagcaaaattcgcaacaccaaaaatagaataataatactaataataagaagaaattatgtgaagaacaactgcgagtattcaacctaacggcgagtactcgaattaggaacgtaagtacttagtaaaaactggaaatatcgagaagacaaaggagtatagtggttcagtcacatcacagtctgcttagtccactgttgcaagagtttcgtatgtctcatttcatggtggatcactcctttatatacaaagcaagtgtccggttagttacacaaggattgcattcattatcaatccgtttgtacattgattcacaataattaaactaaaacgtaaacattaataaatgaataacagtttctattcactaaatacagcaacgtatgcgacttctaatgttcgggttggctgttcatattccggtgtaagctcgcgggctcaagatatacctaacatttagttaattctaggatgcctgcgttcttggatagtcgcatttacggacatcgtatgacgagctgatagaacctagacgcacaagtctatattggtttatcaaggcttttgggtcatcgggaccagctcacattatagagagtcgatctctatgttctcgcaggagaatggaaaggatactcgctcgtatcctggtatatgtaagttaaatccgttctttggtcctacataatgcaagtcacacaaatgcgattagactttagtcatattcgcatcatctcgctgattctggctgaggcgaggttgaaactcgaggagtctctcatggacatctca

SEQ ID NO: 233058 - DNA, 1381 bp, Cannabis indica
atctcgtgacaaaggagaagaagttgaaccttgagtattatgacatcgcttgagtaatttccgcatagacaaagagtcattggcccttttaaaagtggaatgtggcagctggttttcttttgcagaagtaatattagtggaaaagtgagtggtattgtgttgcataggcaaggtgagagaggttgaatgggagtgagagttcatggtgataggggtgagaactggtggataggttgcaaaagtggaagagtggacatcgggcacataaatgtgagtgaggtctgtgacaggtatactagccgaaacttgagttttagtggcagaggacttgggcacattgagtgatttctgatgatcatcaggtaataatttttgcttacctttaaaatcatggttcggatgcataggctaactcataggaaggctagttgtaaccgaaagaggagggtgagatggtaaaaggctgctgttggaaaatagtggaggggagtgcaagttgcagagagtatttggggatggatgtgtaaaagcttgtacggttggtgaggacacagtttgagtaacaatcgggatgggggagttgaaagcagaactggcagggataccaaaggggaaaccagcagtgataggcgtgtgagaggaaagcaatggcataggggaagacacaatattgttggctaaacttcttgggttaggatcagcagtagaagattcaccttggtagagagtagacggttggggctgcgatcttgaaaccaattaaggaatggatgaaacaagagctttgcgtgcaagtcgggtaacaaaaggccaagcattggctttcaaaaaattagtgcgatatttatcataacccgttgttggaagtctagcgcccttcatccacgacccatactccaaatcatcatcattaccattatccattctttccatgaaagcaacacatttttcaaaaggatgtccaataactccacattcaaagcaaaattccggtagacgctcatatcgaaagtcaatccaaaaatcatccttaattcggggcaaactaatcattcgacctcttggaagtggcttgttaaccaaaatcctaactcggatacgaaggaagggaccccatccctcatcaagggattcctcatgaacatcgatatattcgccaatgagatttcccaaagcctttgcaagatttttagacttactgagaaacggtagacgatacacctgaacccaaaaacaactagaattgaaagtattgactgaggcattttgtagagcatctggtgtgcagaaaaccacaaggtgattttggaagtgccatggttctttgttcaagaccctgaatagatcacctgttggaaatttttttaccaggatcttagat

SEQ ID NO: 233059 - DNA, 1763 bp, Cannabis indica
aaagacttggtcatgtgcaagctttccaattcaatttcaaccaatagaccagttgttgttgttttcttcgaaacatccttgagaaccttatctccaaggctctaaataatcacattatgagccctttccaagatcttagacttctctttctcagttagacctacaggtaagtcgttctctcctaaaatggcatcttgtaatgcctgcatcttaacacgccataattcaaaatcgttcttccctgtaaatttctcaagatcaaactttgtgcttctcatttcttctcatccagttcaccaagttcttgacaatcgatccaagttcctcgttcgaattttcaagctctgataccaattgttgcacaagcctctgtcgattcatcaccattttacactcaataatagaattatgagataatgcacacacagtaatagaattgagtctatgctctattattggaaatgataatggtgtcaaggttatagtcaatcaaatgaactaagtcacaagtcctattataagcaaggaacaaggacaataaaaaagtacctataactaacaataacagttagttatgagttgatcatgactaatcatgtattaacacctaagctatctgctaactactaactatctctttaactatcacggcattagttaggtatataattttataacagcctgcaaatgatgttagtctaagaccatcttcaattcatgatacaaatttgatagcaaatttggctcaaaaaatagctcaacgttatatttagcttaaattttctaattgtactccaatgcatggtatattaatataaagcttttaattagtaaaaattattaattagtgacaaataagtgaataaaaatgtaactttaattgtggtgtaaatttagctcatactatatcttgtattaaatttggcccaacttttaacttgtctcaaatttgtcatgtcttttacacgactattggagcttatttttttttaaaaaaaaaacaataaactaaaatataacaatacactattatcataactctctattagagatactctaaggccacagaaggaaattacttcaccatccccagataagggaagcgttgccctgttgttaattgactaaagctcgtgtatggcactgcttcgagggtggcctacactggattgaccactaaaacgggtcatagcatgctcccattgttggatttctagtcgctaactcatgagtgagcaactattagactccacaccacctcaaggtaaccacaatctctagctccacagagcacacctaagagcatctccaatggtaaaattttagaggatgcttagtgaggtggacatattataaggcaaaatattgagatgctataccattggagagaaaaggatgtcattcttgaaatttgcatggatgctatgttgtaacattgatgctattcaattttttattaaaaaaaatgagtagtatcaatgttattgtagctaaaaattagaatatagattaaataataatgtgcaatatcataattatagtatttttgaagagtgatatacattagagtatttttagaagtaagagtaccaaatatgacgtggaagagagataaaataaaatattatatttttaaatgatgtgtaaatttttaacatccttaaagcatgctaccattggctaagggcgcaaatccaacacttgaaaaataaaaaaagtgcatttccgcaaacaaatatccaagcttgaaaaattagcctatt

SEQ ID NO: 233060 - DNA, 1357 bp, Cannabis indica
tcttcttccttttacattagggcaaaactcttcgttttccattttcgtttcaaattaggtaaaactctcattttccattttcttcacttcgtttcgtgtacatactatgagggagcaagtgtgtggtgtacattattcgtgttctgccattgttgtggttgttacagtcgtgggtctcgacgattggttctacaagtaagtttctctggttatacttttcatgcttttcgttcttcactgtgagtaatcaaaaataaaatcttttttgaagtccattttagtgttctgccattgttgtggttgttacaatcatgggtctcgacggttggttctacaagtaagtttctctggttatacttttcatgcttttcgttcttcactgtgagtaatcaaaaataaaatcttttttgaagtccattttcgtgtattgatacaagtggtgcagttttaatagtcttattttctctcaggtatcgacgactttatcttctagtgagttaccgtttctctgttgaggtatctctctgtgcatgtgttctgattctgaagtgtgcattgtactgtattgtttaatttttgattacccacagtaaagaacgagtctgtcattttgtattttgatttatgtatttttggtgcaataaaatacttgcattgtttaatttgattaaataaatctttgtttgttaatttggttggatttttatttttggggattcgataaatggagttgggttgatcaatatttgcttgactttaggagagacaaaagtttgagttttcaattagtatattaaaaacttgattttcatttatatttgttcatgcatttgcggaaacgaatgattaggagtttctattttaggtgtaaatgtagttgatttatctctgattttggcgtggactcatatagtactactgatacaaatacaaaaattagaacttggtcctttttcactggatatatgtaaattaagcataaggatatactaaaattttacactattgtaactagtgattccattaaagaattaacatagggaaaattgttttattttgtaatgaaataaaaaatgttaagtacttttaaaatattttttaaaaaaattcatacacaacaaccattaaaccttatttcaactacactgttagtgatagaataagaaaaaagttcgcttgtttaagtgtatattcgtcctgaggagtttagtgttagtgttagtgttattcactcataaccaaaattatgtaaaaaattgttatgaaatagaaaatgttaattactttcataaaatagtttttaaaaaaaagtaacacacaacaaccattaaactttattttatcttcactgttagtg

SEQ ID NO: 233061 - DNA, 1066 bp, Cannabis indica
gaacctagttcattacaaagggaaaaacgctttgggagagccaaaacaaaggctaagcaatctaactccaccacatgaagaggaagactaagagtgagagaccaatccaacgcaaccattaatgcaacaacttctcctaatatgactggaaattacctacaaaaatcaacaaacagaggataagtttaaaaattaaattacaagcagaagaagtaaatggtcaatcctaataaataaaaacaataacaaaagaagcaaaactacaaacccgataaacaaaaaccatacaccagagagaagagtctccctccggtcgaccccataatccaaacacaaatactccataaaataaacagccttacaaactaaacttactagaagccgtaacctcccatccttagaaactacaacacttaacaaaaagctaaaagcttgtttgggtgtgttttctgttttcattttttaaaattgtgtttttaaaagtgagaatagaaaacatttttttgtcattttttaaaatataatggtgtttggcacaaattttttaaaagtatttttagattttttcttataaaaaaataatattttaacaccataccatgacatgaacctatccgggttcgggttcgggtacaggtatggttccgagtctaggatccgagtatgcgagcaaaaatataaaatataatatgttagacaaaaaaaaaattatttttgaaagctgaaaaacaacattttgatgttttctgttttctagttttttaaaactcaatttgaaaaaactgtttttaaaaatttttgccaaacggctctaaaattcctaacaactacgttataagattccttcctttaagaatagacaaaacatacatcataaaggaaacaccattgctcaccctcgtaactaataaatataataaacaacaaagttaaaaaagtttttgctttggaagggaaaagcccaatttaaaagttttttgtattttgatctcaaatgatcctaaattcccaccatcacattgtatcatttatacactttatagattataaaaataagtctccaaca

SEQ ID NO: 233062 - DNA, 762 bp, Cannabis indica
attaatgtgaagtatatattggacttgctgcatgcaaaataatattttattaatcgatttgatattgataagataataatgttttataatttcaaaaaagatatttattggggttagctaacggataatgtaaacaaattattgtgttttcttttttcctttttatttttcctcaatccaatactaattaatatatgctgacaaatcatacattataatattaatattttgtattgttattcacgtttctggtttagtaacttgcgcatgtttcagcaaaattaatcaaagcaagctcatttttaggcccaacaaattaacctatcaaccccacaacaactacaagaaataagactttggcttgggtataccattggcaaaagaggttgacaaatcaacgttgttactagagcttttaccggcgtaaaataaaagtgtcgacaaaaataactattatcagcgcattaagatgcaaataaaagtgcaacgccggtaaaaggtctagagccgaatgtaagcctagcttacagaaaggcaaggccagaccacttcagtccacaaaatgatgtttggcgtagatggtgaaagctccatcaagacatttctagatgctctcatggggtaatccaaatacagacaattgaagagactttcaaaaattatcttacgtgacgacctagactcggggtcccaccatgtcagggatttatttaaacaaaaccatcaaacacataatccacatatctacctatttaaacaaaa

SEQ ID NO: 233063 - DNA, 1171 bp, Cannabis indica
cttcctcaaccctcttccacaacaacgacgatgaataataccactactacttctaacaccatcaccggaaagatttccaaaagaaagtccagagccacgaagagatccaacaccactttcataacagccgaccctgctaatttccgacaaatggttcagcaagtaaccggcgtaagattcggctcggctcctttctctacatcgacttcggcgcctatacttaaacctgagccgcaaagagcttgcagcagccgttttccgatcgctaacggttgccttccgactcttgacacgtcagcgtttttgctggatcagccgccgttggtgccgctctctagtttttctccggtgagtatgggattgggaggtgttggtgaggttggattggaattggagagtttgccgagttttcctactttggaatcatggaaagtgatgtgattatgggattggattaggttttgtggtgatgatgatgatgatctctgttcttgtaatgtaagccatgttaggcagttcgtttgttttatgtaattatatcttaattatcttcttattttaaccttttgatgtatttttttttttcctttgattagtaagtaaacaaatatttagaaattatatcttgagttttttcttgggttatgttagtttgagagaacaatataattatgcaattatgtatgtaacattaattataacaataattttaattagtttacatatgtaacattaattataaccataattgtgcattacaacaaccacaatgtatattattcttgttgatgccaaaaaacatcaaacaagaacacaaaactaaacaatttgctctattacagaaaaattctcaccatgaaagagcccaatcaattaaacacatgaaactacacttttacaactctcataaacactcattcatcctattgaattcctcacaatgcatgttattcttgtttatcaaacaagaaccaacgagcaacaaaaacacaaaactaaacaaagataacaaattaaacacaatcacatgagacttgctatatatctagaaagacttgctctactacagaaattctcaccatgacagatctcgatcaattaaacacacgagactactcttttacaaccctagtaaacactcaatcatccaagtgaattcctcgctaatttt

SEQ ID NO: 233064 - DNA, 1843 bp, Cannabis indica
tatcttggtagaaccagaagtttcagatagattcaatcagtttgagccctaaaaagacttaacttatgtttttgtgttgtgcatgtgatcaatgtttgtgttttgagacctattgtgttggtctttggaaactggcaagtgtcaaagcccttaaatttctattctcataactaataataattcccaactaattaatcaactttacccatttcaaacaagaaatcaatgaatcaatggaaatgttgggaattttccaaagaatatattgtgaactttattgaaggaataaaccccttattttaaacataatgtatgacaggttacggtaaagaagtttttttttctttaattcaacaatcaacaatgtctaccaatttttctcctgttacaccttacataggatactcttacaagatgatctatttgacaataagcttgtaagctttcctttttagttattttaatttcttggcttgatgatatataataacactaacttttggcattttctttcttccatgcatgcttaatttctagaaaatttcaagtgagtctatgctgaaatatgggactagtactattgatacatcaaacccaatagtcctaaaagttcctagtggtggagcatgggaagttaaattgaccaaatttgatgatgatgatcatctatggttgggtgaaggttggccagagtttgcaaggcatcactccataaaatgtggatatacattgtattttagaaatgaaggccaatctagatttcatgtagtcatagttaatgaaaatggatcagaaatagattaccctgttaatgattccaaacattttgataagatagatcccgatttcgatgagctacccttacccgagataggtgaagaaaaccaagatcttcattgtgatgaaattatcttcaacagtcagtcaccaccatttccttctccaaagaaaaaagctttggttaaattgttttgtattgtatattacatgtttatgttagtgttttattaacattttgattttgcataaatttacagggaggtttaaggcttgtgctaaatggggtgatggattaggagaacattttgttgttcctagcattaagactttaatgactacaaaagagaaagaaaaagaaatagatttatctaggaatgaaaacttggcatcccaaaatccatttttcaagtctgtcatacaaaaagcacatttacataatcaatatgacatggtaagttttctttgtaaattgattaatacagttatactaattttgtctttatttatacagttatactaatttctttacttgttttaatgattttaggccttaccaaaagatttttggagacagaatgtggatgaaaactcttgtcattatattactctatatgttcttcatgatcaaaacaagatttggcctgtaagactttatgcacgtcttagaagtacttgcccatttcgaagggctgcatttcgaaaaaaggattggcagagatttgttgatgaaaatcatttgaaagtgggagatgtttgtatatttgaacttattgataaaaatgaaatgaagttccaagttaccattaatcgagcagattctgaagattagtaacttaattaacaataaggtgaataaaggttcaaaattatttacattttaagtgttcttgaatttagtatgctaatacaactttgttgatatgttaaggacaatactatgaagtttgggactagcagcaaggctattaatggcactgctgttaaattatcatatagattatgagatattcaaacacattaaattttaatgctaatcttccttactcataattattaaccaaga

SEQ ID NO: 233065 - DNA, 1166 bp, Cannabis indica
aaggaactctctcatctactattgtctgacagagaaaactacgtttgatttggttgaaggcatcaagttgacaaagtggatgagatgagagcatcatgttccttttatactaaactctcgaatcgtctcatgcataagattgatggcatggtttgagattccgggtggggttctgagaaaggtaatcacggtatgcatctaaaggcttgggacaaattgtgccttcccaaatcccatggagggttcgagtttcaaaaaactaaggaaatgaacatggcatttctggcaaagtgggggtggaacctgttaactggggtcagcctctctgcagcaaaatcttggaagcaaagtacccaaaaggaaaagatttcctctcctgcaaatacaatgattttgattcgtggtttcggaaaaatgtggttaaggccaaggcaattttgagaaaaaggacgtgtaaattgatcggggatggaaagaatacgagaatttgggcggacccgtggatatcccatggacgggatttcttccctagggcgaaaggagttagtacgacggtgcatagtagagtttgtgacctcctttccaatgatggggattgggatgttcagaaattaaatcatatgtttgagaaggaaacagttacggctatcctaaaaggggcaaaccctcgtgtaagggtacggataggtggatttggacgaaggagagtaatggccagttctcgtgtaaatatgcttatcttatccaagcttttgaaaggatgccacattttgatgttgctccttctttttggaataaactgtggaatagtaacattttggaatgccataagatgatgtggtacggtggagcattctcactaaggctctccctgttcgtgctattctttctaaaagaatccacattgaggatgtgtcatgcccattatgtgggggctgtgaggaaacgttggaacacttatttcttacttgtaattgggccactcatttgtggagagcatcctcgtgggggatttttcctatttctgactggcagtcgtttgtgggactgggtaaaattcatctgggggctaggaaaaatgggcattaatacagatgaagtttttctttatgcttcgattatggttgacaccatttggacgacgcggaacgacaaggtacacaata

SEQ ID NO: 233066 - DNA, 1286 bp, Cannabis indica
ctttaatatctaccaaatcacgcccctggaactttgacatgtgtcaaatcatgccctttaagtttcatctatgttagactatccttactgtggggtagattttttttctttcaaaaatacagtgtaagttttcattgttatttcactattattttttagttgtaaaactgttactttaaattgttctgttttgttattttatggttattttataaaaagattgtattttggtaaaaaaaaaatttgtgtggcagtaaaattataaatttttgtctaaaatctaatattttttgtagaaagccctaattagaatacaaaaaactcaaaacaaagcacgaggcccaacctttaaaagggattttgttgcaaaatccaaaattgctaccatggatcgagtcaattgaatcttcacttttataagggatataattttccttgaacttctgtgtaaaagacatcactctctctaattgaacttctgtgtcctgacctaggaattttgttgcaaaatccaaaattgctaccatgtattcaaaatgtcattattaacagtattacaatattaaaattagcatggataaatttataaatgcatggtgtaaactttaaaattaacacaaaaaagttattagaatacatggggaaaatgggagaaatattttgaaactacctgaatcccaattctaaagtgacatgtgattacactcttaaaatgagaaataatatacaaaaacataagatctgcacatttttccttgttggagctcattgcaacttctatgattttcaagcctaattcttctatactacctgatcttctacccttaaaatatatggcttagttaaaaattctccctagaacataacagttacataattatcgccctttctattatgttttgtttcttttaccattaaaaattagtttttttaccccttaaactttgcctaatacaaaatttttcccttttttttttaattaaaaacgttaactttaaaaattataatgttctactaatactgaaaaaaaatgataagaattgttagaacacctgataaaaatattaaattaattaaaaaataaatagtttacttaaaatgtaaagaccgcctatgaatagtactttgtattattaattatttaaggtttatgtattaataattatggaatgcatattttagaaatatattttatatatcatatatgtttttatgctattttatatttaattacctaatttctgtgattgtgctcggaagctgtggaaagcgacgttgggcctaga

SEQ ID NO: 233067 - DNA, 820 bp, Cannabis indica
gcataagtacgagtatagctcgctatttttcggccctctccccttatgaatactttcattgtttataggagttgttacatatggctccataaatggagtaaacagaataataaatatccttattttctaagatatagttacgatctgataaagttcctttattctcggatagatttactagatctgagtttgtaggattcagttatagatatttaaagaagcttgttgaagacgaaatcaaggatcgcgtatctctgactggtaacctggcagtgctgaatctggccagcatgttggctatccagccagagcccttgaaacttgtcttctttataaaattggtttgtagaatcagccttgcaaggtgttgctctcattttatctgcccgacaagttgagcatccagctagaggctgcatgggacatcttgaccaccttatggctgtccctccttatattgacctgctaggaaaatttctgcccaaaggttctttgccaggttactgagatggctgagtcatgccacgtggaaatgccatgtttgttgtgcaaacattgggataatatttgcccccaagtccccatatgaacatctgtacggatggggactttggatacctgtacagctgctgataggcatatgaagtccatgtagttagtactttgacggttgtaccgtgcagcaatggactgtcacacttctgtctcttcaattgaccattaattgtcagctctcataatgacagtttttaaagcacattttgtgggaaacgtgctgatggttatatatccatgattaaccgttttttttttttttctt

SEQ ID NO: 233068 - DNA, 614 bp, Cannabis indica
tataaaaattttgtccttgaaatttactggaataatttggggatacagctcccgcatctgcgactctaattcccaagtcgctcctcgtaaaataagttgtatggagtttaatatcatcgtaactcaaaatacgtgtcagatctgacacatactttctgaacatagaaatgtggaagacattatgcacccctctcttttgtggtactaagaaaaaatactaagtctgtgaccatcaaaatatatcacacatgcttattacagactctctcagcatttagatgtaaactttaaatctcaatctgagataattacttttcggagcatcacagggttgaactattcccttgacaaatagattagcacactaatccccctcaaacacattccactctaataaagaatctgtactgatcttatatcttagttattctcgagtataaagagtatagtgtagtatgaaactattttagaaccttctattcaatacccttatcagactgatacaccaaccttgtctttatgtcataaaatcccttcaaataaaatcaaaaagttctttgtcaatccggttccaagcctttccttgtacttctaaagttcagagtcactctgct

SEQ ID NO: 233069 - DNA, 696 bp, Cannabis indica
ctaagagtgacagcaattatgtcgatacacaagaaatagttttttgatattttctcgaattgatgattttctttttggtcacttaactcttgttcctttctacattaatttgcaaaatgtatcgaacatcatcagcatcagccatcttaataagaaagaaagtctccttatttgtcatcaaacatcaaatgacacaacagtagagtttaccaaaaatacccattaattattgtttaactaaaaacagccaagcaacatatcctgccacgatatatattgcattgcatggccttcagttcagcctttcagacatatcacattatcaccactaaaataaaataaaattacaccacaacaagacacatccaaacagtttcttacctactctactctaaatctttatgaagttaaagactctcttcaatgtacaactatctttcagaggccatctcagcactctaaaattctaataattagaaaagcatcagttcttgtatgacacctaactcgcaagtaaaattagagaaattagtttttctgttgagccgtttcattctcctcctgcttattgttagcagtaattttgggcttgaaatatgccaaaactacataattaaagagaccacccaaaaactacgcccttgatcacgcccgccaccacagcatcagctctcggtatttgcatccgaggagttg

SEQ ID NO: 233070 - DNA, 535 bp, Cannabis indica
aaaaagggaaccttaatcttgctcataatcttgctcatggtgtatatgaaactttaccattttacaactaaaataaattcagttatcttcttattatatatatagttggagttaagaaatcacaatattagcaacaaatgaattagcagtaaaaacaaggttagatatttgtgtattccgctctcttattaatactaatataagtaagcaaacaaataagtagaaattcctactaattttaaaattcttgtcagattctattaactctgatctgtaatcaacatcctttgtcttggtacaagaccaaaggtattaaagagacctgcaatcaattcaatctgcgattgacttccttttggtcttgtcttgctacagaccaaaggtattaagagacttgaatatatgacctgctaaaggaaaaaaaaattcagagaatatacttgggtaatgataggagaaaagaaactaaaattgtaaggtacgaacctttgtcctcatcagtttctttataggtgattaaaggattagactctcc

SEQ ID NO: 233071 - DNA, 1367 bp, Cannabis indica
aaaaaaaaaaaaaactctaaatttcaccgataaataagaatgaaaaaaataaataaatgaagggagtgcaaatcagagatatcgagccagagatgtgcgcaaaagcttgcttctctctcttgcagagacatttctaggtcagtcgaccctttatctctatcatttttcttctccaccggctttaatggcaaaccaccgtggatcctgtcgaagaacagcattttccttgcatgtatagaaacgactaagaaccatcgagctgatcccactcgcccccgcaattctcttccttcccgttattgatcactgccatgaagagagccatcacttagggagatttcagatcaggaagaagaagaagaagaagaacaaggaagaatgagatctgataattatatgtaactcatcaagtggaccaataacagatccacatgtggcatataaaccaaattctgttatatttaagagagtggtagtaataacggaaaggtataaaatttaatctgttaaaaaatatctttatatataaaatatggctatctaacagattttgttggtttaacggtgatactttatcgttttatttttctctttgtaaaagttaacagaagttaactcctccgttaaagaatatgaatactaggccttgtctcacgatctctctcccacgatcaaacctacaaactgtacagaactccaaacccccaacagagccacaatcgaacctactaaccgcataaaacttggctgggcaccgtccgatattgtagaccccttgatcgaacccactttgcttcaaaatctgagagtaatcagccgttcccgaccttccaattccaaccactctcctcccgctaaaggactctttcatccatcccatgtcgctaacctaataatacagattgtgattgtagagaatgtgatcttcagatcccttcctctcctttcgccaatggcactaacgtcaccaaaacccattttcccctctaatttgtctcttagccaacatttgaattttgggtttatcaataagacatttatgtgggttttcttaactcttaatttgacattccaggcttgttggtgactgtgtatcagacatagtggactcttgcctaacctttaatgaacctcatgtcttctgcatgcttaccattgtcttggactatcctgatatggtggaggttgcaacttctgcgttgccaatgggcgaagaccaacatgctatgaattaaataactatagcacactaaaagcctatgactatagtctatatccatgaacgaaggtatttattccttataggtgctctattaaaaaaaatcagtagttgtaagagagtttctttttgtcatatttggctcact

SEQ ID NO: 233072 - DNA, 3302 bp, Cannabis indica
tctatgttcccagcttgaaaaagttcagcataataatcttgaataattagagaaatcccagcattggaccgcaccttatcacccgaatcattaaggaggaatttgatgtggttgtttgatttcctggcgctagcttttgcatgaaaaaatttagtattccgatcaccactagctagccaatcaacccgggaacgctgctgccaatatgtttcttcttgttccaacaactcatccaaaattgtttcagcttgttttaggtcatcaagatggctgctagtatgtaccatagagttattaagcttttccacctttgcttggccttgtttgagttttttttttcatgccaccatacttgtaatcatgccaagcttgtagtctttcagcacaagaagttagattttgtactacagcagtaataggatcaagtcggagcgtattggaccaatttgcttctataatttctgtgcactcaggatcagctagccataatttttcgaagcgaaaccgacttttctttctagaacaacttggctcggcagtgaggagatggaaagttgcagaaattgctcgatggtctgactgaaaataatcaaggtgatttacctgtggtgtacagaaagagctctcccaaagatgattaacaaaacaccaatcaattcgctctttaatagtgttcaaagcagtgcggcttttggaccaagtgaaagggtcaccttcataaggagattcatgcaatcgacatctatccacaacacttcgaaatgcctccatttggctttcatttcgtaaggcaccaccagacttattggaattggataaaatctcgttgaagtcgccaataactaaccatggtaatagaggagctacatcagaaagacgttgaaggagggtccatgaggctgctctattgcaagtttctggtgcaccatagaagcaggtgaagtgaaaagtcgggctgtcttcaaacttcaaatagcaatcaaaaaaggaagagcccatatgtaatagagaaatgtccacacactctttccaaagaagcagaatacctccgctaaggccaatgcggggagattccaagccatgatgaaagtgcaaagattgtcgtatccgagtaatagaattttccggtagtttagtttccataagaaacaaaacttggggcgattgttgttgaacaagcaatcggagatgtctaaacgcactcgggctccccaaaccccgtgcattccaacttaggattttcatgatgagttgcggggttgccttgcaacctccgcacttaagtcattggagaagcttgaatcctcaagatcagaaactaacttctcaatatcatcctcccttgacaatgaagaagatgatgatccttcaatattacgacatcgtttcagcatttttctcatggaaagagagtcattatgtcgcttaaaagttgtatttggtagctgattttcttttgagtccgacactttcgcagccgtgtatgtgaagagaggtgatttgggttgtgtttgggaaaatgaagggggattagaattaatggggatagatgctagaactggaggataagtagcgaaggtgttgttatcaatggcgggcatataaatgtggctgagatcagtgacagcagaagaagttgaagatatagtcacggagttgggtgtggtagaaactggtggaatggcagtgttggtataggattgatgcttggattttacatgcgcctgtactggttttttgctgtctaatttgatggtaggctgctggtgtggaacaattggagatgatggttgtttgttgaagtggcggctggagtgctgagtttgtggtgaagtgggcatggcgttggtgattgaaggagtggagaagtgatcatgattgggtaggagatgagagtgatccattggtgatttgtgaacattggcctgagaagggttagttgggttgagatagccagggggaatagatggaggggggacactattacacgggtgatggtgtgagtgattgtgaggagtgaagtctgattgggaagtggaaataacaccagaaatgggagtactggtgtgagtaacagtcacgggtgggtgagaattcatagactgtggagtgtgatttatagtatggttgtttgttgagtgatgcatcaggttagtggatgattccccatgaagcaaaacccgtggatgaggttggtgatgagcgtttaacgctggtagcgtagatgttaaagttgttctagccagcctagtcaataacggccaagcattgcctttggcaaaatcagtccgataacgatcgtatccattggtcggaagtttagagcctttcatccatggcccatattggaagtcatcatcattgccaccatccattcgctccgtaaaagcaatacatcgttcaaaggggtggcctaaacgaccacattcgaagcagaactcgggcagcctttcatatcgaaaatcaacccaaaattcatctttaattctgggtaaacggatcatttggcctctcgacaaaggcttagttgtgtcaagtttgactcgaacccgaaggaaaggtccccaaccctcgtttgtagaatcatcaaaaacttcaataaactcaccaattatattgcctagtgcttcagccagcactttcgatttgctcaggaagggaaggcgataaatttgtacccaaaacggagtgtagatgaaatcttcctttgtgacattttgcagaacacctggtgcccgaaatacaaagagatgattctgaaagtgccatggttccttgttaagaacccttcttttatccccctcacaaccaaacttaacatgaaacaatccctcatcacctttgtattcagaaatcaaaacagagaaacgcccttgccagtgtccggacatttggtcgataaagaactgtttatatacagtttgatgagtaagaactcttgccagaagagttggagcatttctttcaattgaagtgggacagtactcggggatagttagtatggagctttcttcctcagtgagagaaagggtgttgcggatgtcattcaacaaaggatccatggaaatgaaatagtggaaatggaggtagtaagaagagtgaagtcgccggcggtggaggaagatggtggaaggaaaaaggggggaacggtttctgctgtaaaatttaaagaaattgaaagaaatagcagttaagatgaaagaagaacagttaaaaggatataacggctacagacccaaacagggcacttacttaataacataattaacttttaaaatatatgaaaatttattttcatttta

SEQ ID NO: 233073 - DNA, 1035 bp, Cannabis indica
caggtgcatccaaatgtacgcagatggcttagtcgtggagtttttcccttccatagttcatatgctgtttgagtggttcctggtcgcagatgaacacggttgcagatgtaacaggccgtgttgactgcctctgcccaaaagcgaattgcaacattcttggcacataacataacacgagccatctcttaaagtgtgcgatttttcctttccactactccattctgctgaggggttttaggagctgcaaactcatggttgatacccagtttatcacaaaattgagcaaagatagagttctcgaattccttcccgtgatcacttctaattcgaaacaccttgccaatgggtgaattttgctcattttgtaactttagacacagagacgagaatacaccaaacgtgtctgatttttctttcaggaaattgacccatgaaaaccgagaaaagtcatcaacacataccatgacgtatctctttccagctatactctcagtttgcattggtcccattaagtccacatgtaacagttctagtacccgagaagtcaaaaggccattgataggagggtggggtgaccgagtttgcttcccttgttgacagggaccacacatcctgtctctgctcatagtcagttcaggaatccctcgtacagctttcagcttgacaattctttttaaatccctgaaatttaagtgacccagtctgtaatgccataagtccagtttgtccataaacgtgcgatgatatgtcacttggcttccgagtgcatagcaatgatcagctgtgcgatttccaactaaaacttcacttccagctaaggacaccaagcattgtgatttggtaaaaacgtacatcatactctgcatcacagagttgcccaatgctgatcagattggccttcaagccttgaacaaacagaacacctgttagagggaattggcctgccaacttcagatctccgtaacccactgatctttcctcgattaccatctccaaacgtcacagaccctcttgattgtctttgaagttgcttag

SEQ ID NO: 233074 - DNA, 2371 bp, Cannabis indica
gagtggtatccaatacccagaaaccctagacatccttctcataacaattccctagctattagtacttaaaataccggaatccgagatccctgaacaggtccgacaaaaacaaatggttcttcaccttctggttggaagattaccatcttcctcttacaatcaatactagcttagtatttggacaagaaatacattcccagtataatatcaaaatccactaaattcatattaaatcagcactcaactctctatcctctattctgatcggcatagacctaattcaccttttggcgatgactaattctccgccaggcagtagggttccaaaccttgatcataactatcatgtgatctatccaatttactaaaatttttggctgtcacatatgaatgagtggccctagagtcaaacaacacagagaaataagagctgttgaccgagagctgacttgttaccactgaggggctgccttctgcatcagcctgagttatcgcaaacacccttgctagagtgggtttcgctgcagtctttggtgcttcagtgctgagttagggacaattcctttcgtaatgccctggcataccatactgaaagcaccgctgccctttacgttcccctagatggtgctttttacaactggggcactcttggtaagtgtatcgggttatagtgccaatctggcgattgcctcaacactgcttcccccaaaacctcttgttctgacccgagccactggttgcagtagatgcctttcttttctgatcagcagccgagccactacctcccttgctaaagcctgatgcaggaggggcaggagctccaccaacaaccggagtcccatgagactctagggtgcaccccactgcgccctcaactcgtagtgccttacccaccatatcagcatcagtggtattgtcgtcggtagtaatcattaaatcatgtatttctcattcaaccaatctaggtatttctctttcttactaaaattggtttgcaaaattcccaaagccaaccttgccaaccgatgaaactgagtcgtgtattcagcaacactcatattctccttctgagtcagctaggtgaattcttttcttttagcacttctaactgcctcgttgtaatacttggcattgaacagttcctggaacttttcccaagtcattgtcgtaatgtcgtgaatcatggacaccatgtccaaccaaaccagagcgtcttcttgaaattggaatgtggcacaggccaccctatcattaccggtgacgcccataaagttcaagattctggtgatgacagttagccactgctcagctttcatgacatcgagacctcccacattaagtagaggtgcctgtttacaaagcctttcatacaggggttccattcggttcactgcaactacaggttcggcctgcacagtaggggcaagagctactggtatttttggagcaagaactgcatgagcaccctgctgtctcaaccgctggatctcttcatcttattcattaattctggcttgcatttctacaaactggttttcataatcatgggcagcttgggcaccctgaggcgggttagcatcaccccaaccacgtgccctacctctaagacctctacctcaaccatatatatttaggggaatatgagctccttgacaaccactagatccagtcgaattgccctggctcctggtgtttcgcctggcgtccatactaattagaacaacctacataaccaagagctagtctggtcagatcgtgatcaagtaaacacttaatatagtcgcttatttggaaattaaaaacatgcgcctattttattatcaggctactaatttgattcctaacaagcttttcttaaatcatactattaaaataaactactaatgcaataaaagcttactgaaccgtgaaacaagctgactgctgatgataattatacatctcgttattatcttcggaagacaacctggtggcttcgataccaaattgtaacaccctaactaacttacgcatgttacaatgattttaaacgtattgtgcagctcgttgctaatcaacgagattattgaaaaatgtgattaattaaaatttgcttaattaaaaagacacttgaagtattacatatataaaatatcgggaccccgtttacaaaatacatttataaaagtttgctatacacatatacaaaagttttgttgccaagcgactaatcaacaaaagccttgatgtcccaaagatcgtacgatccatgcctaactgccccgacatatacaatcttcatcttctctccctcacgattcctcagctttatcttgcccttacctacacatggaaatagcattgtgagtcgacagactcaataagaaaaagc

SEQ ID NO: 233075 - DNA, 1136 bp, Cannabis indica
aaagctccctagattagtagaaaatatgatgaaagcaatcattccctaaaaaatatttcaaacaaagttgttattatcaattaatgaggggaatcaactattaaacttgagctataaacataacgactcacctatattgattgaacgattctccaagcttaacaatcataaaaagccatcagattaataactaaacttaagaaatcatttcaaaaattacaagaatgcaacttatacttcctgaaactattgcaccatatttttcaaccttaaaaattaccacatttttggtaacacctgttgtgacttttgagctctccacaacatcatcatcaaacacacgaatctgaaaaaaagaaaaatcgtcgattgggagaatccaaaacgttctttatgccttcaatcgtcgactccaatcgagggaataaaatcgaatgaccccactcccaatcaccccaaataatccataatccttttttcccaagacactcaaataaacaaaaccctaaaattaaggataaattatcaaatatactaccctgattcaacccttgaacaagttacttcaactaaacaacaacaataaataaaacgagtatataaaactcatatggctgtttagttagcagtgtcatattttcggaaccaacaaaattccagcattttacagaacatgcttcaattattgaaaatgtataccaggaataaacacaatacatagaaatatatatatatctagtgagagagagtacgagttttttgaggatgcgatcgtagtgagagaaggggtgagcgaaagagacaaaaataacggcattcgaagagtgaggagagagagtgcttgaggaaatgatgaaggagaaaagcggcggtggtctctactgagagtgaagtcgattggtttgaaatggaagagtcgattggttttttaaatttgttaataggttaacggcgttagaagagatctgtttaaaaaataaaaagaatagtctttttcgttaaaaaaaaaaattggaatcgttaaaccaagaattgccgttagataggcacttttaatatataaagatatatactagcaaaaagttaagtgtatactaaattttatgctagtttttttttatgttatttaaaagtga

SEQ ID NO: 233076 - DNA, 667 bp, Cannabis indica
atttcttttttttcattaatttttttggtagtagtattattttattttatttctaaactttacttagtagataatagcaaagaaaatcaatttagtttacatttagacaagacacctaatcaccttatcttcaataaataaatctataccatattatgtttttatttaaatataattttttttaataattgtttaaatataattaatgaaaataaaaaatatgattataacccacaaattttaacaggtattacctgtaatactattacttgttgtctagcacttaactccacaactagtatctataaatatttgcatcatatatttatacagggacacatttttgtcttgttattgtacttttacggaatgtatttcgtgatatacggcagccgttagaaagggtaattatttaatctgaaggctggggtgcatctaggggtaattagggttaaaaaatagtaacgtaccctgagacccattattacgtaccctgagacacatctaaaggccgttgtacatcgcctaaaggcttaagtacatcacgaaatacattccgtaaaagtatactaacgggaaaaaatcatatccctatatttgcccaatctatttatatattaattaatcatatccccggaccgcgaactatataactcttctttttctt

SEQ ID NO: 233077 - DNA, 1234 bp, Cannabis indica
ttctttttatcaattaaattacactttttggtgttgcgaaattcactcgacaacataacttaaaatacaatttttatataatttagataacaataataattgagtatatgtacttgattgatctacaataattaccgtaatttgataataaaatactattaattaagtcttccaccttaaatctctaaattagaaacatttttatttatctaattatcaaaagtgtacaattgtgatgaggcaatatgtatttatagagttaaggaggggacttaattacataaccctagttgaattgagattgctcattaaatatttcggttaattaaaaaagcccacacttctgcttcaactagaatttatatacacagatgctaagtccattaattattaatcaccaacaatatggactaacacagtaaaatactatccaatcaacccgagaatatgtaaagaatttctctagattgatgcttgacattaaggacatgaatgaagttgacatgcttttccatttcctcgatggactcaagccatgggctaaacaagagctgcagaggcaacgtgtgtcagacctagctactgctgaagttgtagccgagtggctgactgactacatctcaaagaattcacaagcgaagaagacgaatccccaaactagctccaacaatattgggagtaagaagtctgagaagcagtggaagggtaaaagtgggggaggggtcaagaagactcctaaatctagctcctcctctaagagtgatgctgccactgggaagaagtcccttaagtgttggctttattaagtcccacatagggcagctgcttgcccccatcagtccaagtggagtgccataaaggcatccattgctcaagaggagcaaggatgtggggaagaagatgaagatgaagactgcgtgcacatgagtgttgaatgctctcaagaagcatgacacaaatggcaagaaagctcaagggaagggattgatgtttgtggaggccaatttaaatggaaagcaagctaagagcgtgttgattgatactggcgcaacacacaacttttatttccaaaatcaaagccaagagagtaggcctaaaattggagaaggatatgggccgcatgaaagcagtcaattcaaaggccatgaaaaaaatggattggccaagaaagtgaatgtcaatattgatggaagagaggggcaactggaacacgtagcagtttgcatggatgact

SEQ ID NO: 233078 - DNA, 1789 bp, Cannabis indica
tattgggtattgatgattttagtagtgtatgaacactcacaaggcccaccgtaaaagaaaagccatggatggacatcctgttcaatacttcacctgattcaaaaatccccatacagcctatctcgaacctaacctccactactcaagtagtttttgttgtgaccaaaagtcacatttttagtcataaaaattttatgttgtgactaaaaaattgtcactaaaagtaactgtttttttatagtgttttctattatttaataaattagaatttatatattgttgttatttaaaaagttttagatcaaaaattaaaaagatatatcaatactattaaaatattttagttattgaactttttttatttacaaaatatttttccagtaaaaataataaaatattttttgttgttgtaatttatagttatattataatcactacaaaaaatagctatttttagcgataactttttaatcacaatataaattttttgtaactaaatatgattttaagtcccaacaaaaaattacttgtgactaaaacataatatttagactaaaaacacatttaatcacatcaaattgtaatttttgtgactaatgtctatagtcacgaactttttagtcacaacataaaaataatcatttataattaattacattgttacattaaaaggttattttagtgactttattttgttataggatgcttgataaggtctagtattttcttgttcatttattttattttattttttttgaaaattttattaatttgctatgttttacttatgaatgggggagttgttataatttagatcttcataataagtaaaataaactaaataataaaagttaccttaatggtgttggccagccggaaagatcagcaatagatgttaaagcagtcctccacttagtcaatttatcagactcacttgatctaaagcattcttcatgtgcaccgttgaagtacccttcaaaaaattaaacaatatatatgtacttattagatatatatgtcttcaattctaaatttaatgtaatataagtatcttcaaactagctagtaaataaaatagtatgtaatgttcattatttttcttaagcaaataattcatattcatctaatatcaataataagataattttaccttttatcgatgttaaagcagtcttcatcactcgagtcaatccactaagctcggtgacatttctcttaaagcgttcttcaagttcacgaaatgcgtccccaaaactccctacttgttttctaacgtcacttggagtgacgtgataaaatatcgggacaacaatttgcccatctctttctttacacttcaaaatatgaacgagttcatccaaacaccacctcgaagatgcataattctttgagaaaacaacaatagaaagctttgattcctctattgctttcaaaagagctgaagaaatctcttcacctctctcgagcctcttatctatgtaaacttgtaaacttttatcagacaatgctttttcgagatggctagtgaaattgttacgagtgtcctcacctctaaagcttatgaaaacatcgtatttaatatttggtgtcatattgatattgatagaatcataattcactcaaaaattctcaattcaatagaattaataatgagcaaaactacataaattttcataccaaaatatagtaaatattgactatatatatacttacctttacgtaagcttggtggtcgttgtgtgaaaagttttcttggtaaaattttagttggatggtgagatgaaagaag

SEQ ID NO: 233079 - DNA, 773 bp, Cannabis indica
tgtgggatggacgtattggcggcaacgatttacgtatggcttttcttctgaccaactttatccacacgtcgaactgcttcttcaagctttataaatccatcagctcggtctaagaattttgctattgaccctacagtgagttgtttaatgtctttccataattctcccaaaggttcgattcctttgaggatggcagccaatctcccttcttcatttagtcctttcacctttgtagcctaggtcataaacctattattgtaaggccttaaaggctctcctggcacttgttttacctcaatcaggtcttctaaatgagatgggaatttcctaaaggaggagcactgtgcgtgaaactctgccatgaaagaattccatgagctgaattttctcggagctaacttaaggtaccactattgggcggcctccgccaaggtagttgggaaaattcagcaccggacatcaccttttaccacttgtaagtccatttgcatctcaaagtatttgatgtgagatagaggatcttctttgcccgtgtacatttccatgttagcattttgaacttgggtggtagatcaagagcattgatttttggtgaaaaaggtgatccccttgtcccgtcaagttctaagttcgcgagttttgggtcagtcaggctttgtacaaggttcttgagttgatctatttaggcttgcaacaatggatcaacttgacctaccagtggactgacttgtctcacttagaacattatcaggcacataattgtttaaattggt

SEQ ID NO: 233080 - DNA, 438 bp, Cannabis indica
ttttatgttggatgctgaagcttgtttcgactggtttcagctccaactattttaactaacagttttgccaactaggattaggaagcaactgatggtgaaaagtgagtcaaatctaccacaaatccacctaatttgattcacttgttcactacctgatcagtattgacagatcatactcttgcaatgctcaagaggttcaaacagtggataaatttgtctctagttgaattttttgtgaaactgtcaacagggttatcatgagtacaaattttccttacctaaacctgttttgccatcactacatctttgataaaatgtagcttgatgtcaatgtgttttgacctctcatgaaacattagattcttcatgacatgtaaagtgttggaatatttattttaccatgatcttagatctactcacaagtatgttgtttaaaca

SEQ ID NO: 233081 - DNA, 1197 bp, Cannabis indica
acctcgagatcgataggcttggcaagtaatttcttcttatgggcagtggttttcctttgcttcttagcaggaaccacttcggcagcagtagggactccggggttggatgtccttttcttccccttacggtctaggatgttttcataacccatgtctgcaaaaccggacgaggcgttacaatcattataaaagccgattaaaaaggggaggagtataattttccacctaagatatttaccaaaatcactagaaggcgagctatcactagatgaaggggtagaacgaccataatattcgttaaaatccctacagcctgtaattttgaatatatcaaaagggtcgatttgttctaaatcccagctcgcatctatgtgaccttccctatcttccatagtatcgtattgctcagctataccataaaatgactcgtgacagttaatttggacgtggaatctaggataccaactatcaaacttatgagcaatgtggtccacgagaatggcattccaagtataaaaattaagacgggagtcttggaaggtaactaatgtattatactcagccttaagtacagtaggtgacaagccacattgattatctcgagatgctccttcaccggattcctgaggggtagtgctttgaaggtattgtgattgggctaagtgatcttaggcctggtcttcgggtggaacaattatttgttgccaagaagaatacttaggaaccttgtaattgcaagtgtattctttgtcagcaagaaggcccgccgatcgcaagttaacttcgttcgaaaggaatttgcatgattgaagaccataagggagagtcatcaggcgcctgtgcctacttaccatctcggggggtaggagtaggtctcgtcagaagagctgtcagaacaaacaaaatattagtcaattacttgaaaaaggaagattgatacaaataagtaagaagagagcaatcacttacggagtttgcaaaacgtggttgttctaatgggggagaggccaaatgtctagaagagcttgtccttgaaagacaccttatttggcaagtctataataatttttggctcgctagcgtgagtaccaaaatagactgtggcgtgcttcctcgatggaatggccttaactgagtaaagatacccagtcatctctacgggtgtgggacaacaccaattcataattttgtacaaga

SEQ ID NO: 233082 - DNA, 1062 bp, Cannabis indica
gttggaaacaacaatcacagcagccacttagagggagaattacgaatttgagactcattaccagacgagcaactactggtggtagagcaagcacgggtgccatggtatgcggacattgtcaattacttagttggtggtgcccatccacctgattttaccaaacagtagctcaaaatgttccttcatgatagcaagttttatttttggtatgagccatacttgtacaaacaatgttcgggtcgtataatgcggagatgtgtgccgacaaatgaagttagacacatcttggagcattgtcattcagcctcatatggtggccattttggtggacaatgtacggctgctaaagtttttcaatcggggtattattggccttctatattcaaggatgcccatgattttgttcaaagatgtgatcgctaccaaagagtgggaaatatttcagcaaggaatgaaatgccactaaatttcattttggaagttgaattgtttgatgtttgggccattgactttatggggccatttcctccatcttttgggaatctttacatattggtggtcgtagactatgtgtccaaatgggtggaagcaatatctagtccaacaaatgatgctaaagtggtgatgaaatttttgcataagaatgtcttcacaagattcgggacaccgagagcattgattagtgatgaagggacacactttgtgaacaaattcttggctgcccttttgccaagtatagcgtgaagcacaaaatagccaccgcttatccacagaccgacgggaaagctgaaatttccaatagagaaatcaagggaattcttgaaaaagtggtgaatcctagcagaaaagattggtcccagcggttagatgactcactttgggcctaccgtaagaaatttaaaactcctctaggcatgtctccttatcgcctagttcatgcgaaggcatgtcatcttcccgtggagtttgaacacaaggtattttgtgttggaattatatttatccaggatcttagatctactcacaagtatgttgatttaacaacctaatattgaacttcta

SEQ ID NO: 233083 - DNA, 816 bp, Cannabis indica
tagcaatggcagcacaaagagatggttctctttttcttactctattttgtgtataaagcttaggaaaaatgtgaggttgtatttggtaagaggtataaaaaaaataaaagaattgctaaaattatagggtaattaattattgggtcttaatttcatataaagaaaatagtttttaagaaatatcgttttgcttataaaaagtgatgagcatcacttgtaccccaataacaatgttcaaaaataaaaattatatttttaaaaaatataagtatttttataatagtaactgcaattattaaatataaaatcgtaaactacacaagtttagcaaaaaataaaaaccacagacagggattttataagcaggataagaggtagtatatcgtgattagtacatttcaataccagtctcatataatttaatttaataaataatatgagaaactgctaacgctacatcgatatggtgatgggttccgaagtgaagtgaaagaaaataattttatttctattttctttgtttggttacattttaaattatttgaatgaattttttactattttggtcaaataactattccgtttcgaaatagaaagaaagaccattacaatacaagatgaaatttttaaatttttttatgcattttaaatttcatttcattctatttttatttatattcttattctcattctcaattatattcatgtattttcattatttccaaccaaacacaacctaagtgtgtttagctatgctccctatttgtttccctatatataaaatcagtttatgtcactctagtcagtttcttcatc

SEQ ID NO: 233084 - DNA, 526 bp, Cannabis indica
acacatcagctgactcattgtacaacattctcaccacctaagcaccctttattcctcatttaatctagctggaacactgtcacgattttcttactgggcttgccgattgctacatgataattgctacaacaataatagtcagcatcatgcatgcatttccctgcttctttttcttctgttcccaaaatttcccaccacctacttccgcctttttcttgcttaacacacacaaaattagtaacataagttactctaacaattaatagcacaaacacatttttatttactacaaagacacaacaaactaaacacaattacataaaatagacactaatttctctactatttggtttaaaactcaagtttaaagatatcaaaataactctaaatcttagagttatcacagacgttctccaattttgatttcttcaaaagaagagaagatcgtgtttgcaagagagatagatgttctttgatttcacgattattgtttgatttctttgatttcttgagacgttcttttttt

SEQ ID NO: 233085 - DNA, 1358 bp, Cannabis indica
gaatctatgtgacccgatctatccaacatggtcccgtactgctcggtaatcccatagaatgagctagtgcagctaatttggacatgaaactctgggtaccaactattaaacctatgagttatgcgatttacgaggagagggttccaagtgtaaaaattgtaccgactatctcggaaggatactaaggtattacattctgccctaagcactctgggtgatcatctacattgattaccttgggatgctccttcttcccgaggggcagctctctcaagatagtgtgcgcgagccatgaagtcctcactttcctcttcgtctaggaccgggaccttttgccacaaagtgtacttgggaattttgtaatcacaagtatatttgtctgaggcaagaaggtcgacgttcttcagattcttctcatttaataagaaatctatagctcgcaacccatatggcagactaagtaggattctgtgatgctcggcaatctcaggagtagggactggtctccgaggaaccgctgcaaacagataaaagttcaataagcgactttaaagatacaagttaatatttttattgttaaagtttacgagaaagagaacttacgtataatgcgaaaggtcgatgtatctattggagagaggcccgttgttgagaagaagtcttctttaaaatctgtcttgtttggtagcctaactatgatcttgggatcaccagtttaagtcccaagatagtagaagcctcctacatcattcttcctcgctgggactgctttgactaagtaaaagcaggctatctccaaaggagtagggcactcccatcctaagatgtgatataggaccttcaggctcgcaaggatcctatacaaaatggggtttagctgcaatggggcaaccccgaggtagttgcagtactccttaaagtaatcccttaggggacggaccgccccaaccttgatatgtttaaggctctaggctccaacgcccgaggaattactcgtgctaggcccactccgtgtgtattatcctttttaggggataacagctgaattccccaggtgccacggactttatgacacatcccttcctctgcttgataccgcaggattttaagataccgccaacataggccccaatcgacctaactttggattcgataatctcggcctcaaaagtaacactgggatcgtgtggcgtctttgatttgcgaggcttaggagacatgatttcaaactcaaggtcacctggttcaaaagcatcagtgacttcgggtaaaaacattggtctcgcgagtggaataaaagttaatatcgtgggttcaagccaggttgcgtctcgcaaaaaatgacgcttgccctcaga

SEQ ID NO: 233086 - DNA, 1644 bp, Cannabis indica
taacatagaaaaaaataacataaaatttagtatacgtgtctcgcacgtaatttttgctagtaatttatatatataacaaataaaaaatagtgatcaaaaatacttatttttaatataagattaatttgtgttgttctctatttatatatactactttacatgattaaaagttgaaaagtatttattagaaaataaataattagaaaaaaaaaactgtagaaatttaatggacaaagaaatataaatagtggtcaataaatttctcattgattttagtggaagtgcaatatgtaagagtgatattgatttaattaattgtataaattgtttcaaaaaaaaaattaattgtataaataaagttgttatatacttttttcttaatattattattaaatgaaaataattataaaaaaaccgcaaattaggtaaagtacaaaaattaaaaggagataaagtcaccacacttatttttctttcagatttatatgtagatataaaaatatatagataaatagattgattagaagacaacttaaaattaaatattaataattcaaattaagtttatcaataacaagaaaaatttcttaaattaataattttttagaaagttaaatgattaaaatttcttaaaaaataattaataaccgcctccgtaaggtccctacagcgtaggttgtttttaacccttatagtgtcgcctgataaagcgtcagtagcgaatttcaccaaaaccgacgctgaaagaccttaaaaaccgcctctaaagcccagttttgtagtagtgaatatatactacatatatcattttcaatatattaattatatggtgcaaataataaaaaaaagaaaaaaaaacccaaaaattaatataaatgtattgtgatgttttttttttataaagtaaaatgattaaaattaataaaaaaatgctaaaatattatcttcaatacattagttgtatagtgtaaattattaaaaaattaaaaggcatcactaaaattaatataaatatatgtaatttattacaaaatagttaacataataaaaatctaaagctagaagagaaatataataaaattttaataatttattatgaaaatttattaaaaaaaattaaaaaaaagtcatattagctattatgttaattttttttttttaggttttcttagatatacatatatatctattataactagcaaaaactacgtgcgaggcacgtatactaaattttatgctagtttttttctatgttatttgaaagtgatacaataaaaaattaaagaaaaaacattattagttattaggtgagattatttgaataaagaacaataaataatcacgtaaaaatcaaaaataattatttgaataaagaattcaatatacacatttatatatatgaatctcattaatcaaaaagaattattaaatatatgaacaataatttgtcacgctatatgtttcccaataaagaaatccacctcctcatagtcaaaaataaacaatatatgtaatacagatctttgtaatgaagtacctaaaagaaacaaaacttcagttagcataagtcagaaaaggtttaagtgaactaaataatgactaagaagatctaaattacaaaatgaaaaataacatgtctatatg

SEQ ID NO: 233087 - DNA, 1301 bp, Cannabis indica
taatctttatactataatatatatatatattccaatatgaatgtatttctgacgaaatgctatggattttgacagtggaagaagaagcgtatgaggagattgaagaggaagcgccgaaagatgagacagcgatctaagtgatagcagcaccagcagcattcgtggcggcggcgacttcgtttccttcgcctgaactcactgccgttggcgtgtcggtctcatcggttttgattgtcgttttttctatttattttatttcagtctgtgttaggattaattttgaagctttttggttatgttaatagccagatttttgctacatttgctagtggaattttatttagtttaaactcaaatttcttatgaatctattattagattttggctttgttcagtttttttttttttgtcattttttactctatattacgattttccactcttttaataattatatacatcatgttagggcatgcagagtgtgtgattttgcataaattttcacacaaatctcaaaatggtatttttgtttatggattatggcacttggattgtagaaattttcggtgtgactatgaatgatggtgatatgatattggaaatatcattcttacgtataaagttggattttgtgaaacttctcttaattctcatttgagcaagagtgacaaaactttactgtgttggtattagttgggttttctttattttaagcgtaatgcatagaagccttattattacccttagagattttttggtggatgttatcagtttttagcgtgatttatacatggtagtgagatatggtgtgtgaaaatgtcacgttctttttatggagacgagtcctttggcaaaacaaccttaaacgaaaacttctgttagtaaatatgtttcttaacaaaattacacagtactagcatagatttatattgttcgaccattatggttaagtgaggttattttacaaattttaatatttcatatggtttgttctgcaaatttcaccaattttactaaattagaggttgggttttgtcaagtttcctgaatttttgttttgtcaaagacaaatatctctattgggttgggttttctttattttaagcgttcttagaaattttaccttccgagaaattattgacaaaacaaggtcgatggatgatcttgccaaatgactatcatcgtgaaagttacgtgttatttttagcccattttgcacattacgtgtattcatcaagaaaataggttgtgtggaggtcattttaagaagaagtctcatatagttctattatttgatcaaa

SEQ ID NO: 233088 - DNA, 2304 bp, Cannabis indica
aacttagtatattatcttgggaaaccccaaggttaactattaagaaggaagataatttatttcttatgaatgttagctatcaaatattaaatcagcttttaatcatgaattaacaccatttgttagggagttataagcagttcaatcagtcttagggaaatgtagttatctttaagaatgaccctttctcgagttatcattaattaagaatctgataagagagcatttcaggtagtgttttctgtacaaggtacgattatcaaaaatttctaaatatgccttttgaactaatcaatgctctagtagtttttatggatctgatgattagggtaattaaggattttctcaaaatatacgtcacagtgtatgttaatgatatcctttggtaccctttattaaaaacgatgtatggacaacatctatggatggttttcagtgattatgggatcatgacggacacggggtaaggttgaattggtcaagatttggctgagatcagaaacaattattggaaattaagtttttatgggtttgtatgagctatggcatcataatacggaaaggttattctaagatttcaacgcttttaatacagttaattaagaggaagtaatgatctatatggacaaacaaatgttaaactggttttcgagagctgaagtcacagttgatttcaacttagtgttagcttggtcatcaaatcaagaaaagttcatggtctgcaactagactggatctagagtgtgttttgtgtaaattggtagggatactgctcaatctccttgccaattgaaggggtttaggtaatgttactcaaatcattacctggaacttgtaaacaaaagtcttgtacttaagagctggcagagctatctctatagagaaaatttaaagtatctagttactcagaaagactggaatgcggattagaggtaatgattggaaatagctcaagatagggactacacaactttttattaccccaagaaggctaatggggtggcagaagtcctaagtaggaagtgcccaggcgagttttcagaaccatcgtgatttttcccttcagttagtagatatcatggtcgaagttaagtatggagtttgtggtaagtaaaatcagtgagttgacaattcaactcggtttatttgataaaaagaaaaaggctcaattgatggatatgaattcagggaaaacccgtaagaaagctttaacaggctagctcagagatagcttggtattaactcatggaatgttatgtcataaaattcaagtgtatatcaagtagtgttaagctcagaaatgatactctaatgaaagtttgcaccactccttagttgttatactttggtactattaagatatgctaagacttgaaaattctacttatggtgtaaaatgcaaaaagatgtggtggacaaggtattcatatttatagtttgtagtgaattaggtttaatcatcagaaactggtaaggttactatgatcggttatatttctcgtataagatgagatgaagttgctaggaatcttgtagctgaattacctagaaccttgagtatgtttgatttggtatggtactacttgggtacaagagctagtatgaaaaattataaaggggatagtatgtttttttttttttgcgactctaaagtccattatttcggataggaaactgaaattcgtctttaggttttaacgaagtctatagaagactggtattgtgtagttaaagtttaggatagctacctatacttaggcaaatggcctgtctggagggacaatttaagtattgaagtatatactgcaagtttatgtgatgaattacaagaacttatggaataaatatctattttgatcaagttctcgtgcaaccaacagttgtcagagtgtaacagggatggtttcatataaagatgttatatagtatgaagtcttgttcctgttttaaactcggaataggatagatctgaggtcagttcagcatattaataaggctatagagaagattatgattagggtacttgcttctcaacatagacagtagaggtcatgttaatcaaaagctcaaaagaatgcagaattcctaagtaggagaaatactttgggaacaagaataagattcataaaaattttagaatttccagagaacatcaggataataattttgtgtttaaccttacaagtagcatttgcagcacacaagatgttttcatgtaatatattgggaaatttggctcatatctttagttatggaactcgagaacttcagctaaacctatctctttaaagaaaaataggttaa

SEQ ID NO: 233089 - DNA, 1381 bp, Cannabis indica
catcttttagggtttaggacacttataacaatgtttttattattattattattattattattattattattaatctctatcaaactaaattgtgatggagaactaatgaggatgactaccccctactccttgtgacagttggtggggaattaatgatgactttttttgtatgtctttgtttctcttaacaaaagaaaaatatatattaataggaaacatgaaacggacatactaaataaagatgtaacatatgattatataatacattgaaattagataaaatgagacccataggttgggacagtgggagaggactgacttagacactttagggggccaaattccaccccatagaaggactaacagaaacccaaaccatccatatacaaaaaaaacattgttataagtgtcctaaaccctaaaagatgtgttatgttaatgttatctcatataaatatataactaatataagtaaaataatactctttactatttctcttatacctgttcaacctttttattatttattacttcaaatttgtagtagtggaagacaaacaccacttatttattaagttgatatgtataaaaataaatattatggtccaacagtatttataggggaaatttgaaaagtcaatgactgttcagtttgagcagtggttgacagagaaatttattgaggatatttttttgctcaaatggtttggtttattggttaagtttttttggttaagtttattggtttattggttaagttattattaaagaggtatctgatctacttaattaattaattaattaattacctctaaaattctagttaatgttagtcaacaaacacagccgtacagtctctcagagtatattaattaccgtagataattatatatgataaagacacaacaacattagcattgaataatgtatatatattaatatgtacctagctaccttacttaaattcatgtacattcattcattatatatccattaattttgcgtataatatatgttcaagttttcgtgctatagagaaaagtcattttaatgtagacttgtaaactaacaaaatagattaattaattaaattcaatagttgaatatttgtttgtgctataaagaaagagtaataagatcatcttcattatatcatgttgttttagggttatgatggttcatcacattgatttggtcttgatttttattctttttcttaaactaaattactattattgtgaaaaaaaaaattacaattagtgtttttatgggcttagaatttttagtttcatgtgttgaaactaattaggttttcctattagttttgtcttttgacataattctatagtttctctcattggttttggtttattggtttttg

SEQ ID NO: 233090 - DNA, 1105 bp, Cannabis indica
catgagagactcctcgagattagacctcgcctgaaccagactcagcaaggtgatgtggatatgaccaagtctagccgcatttgtacgactcacattatgcaggaccaagaaacagatctgactcgcatataccacgatatatacgagtatcctctcaatcctcctgcgatagagatcgcttctctgtaaagcgagctggtctcgatgacccaatagcctcgataaaccaatatagactcgcatgtctaggttctatcagctcgttatacgatgtccgtaagtgcgactatacaagaacgcagacatcctagacttaattaaatgttaggtctatcctaagcccgtgaggttacactagaatgtgaacagtcaactcgcatattataagacgcatacgttgctgtatttagtgaatagaaactgttattcatttattgatgtttacgtttttagtttaattactgtaaatcaatgtacaaacggattgacaatgaatgcaatccttgtgtaactaactggacacttgctttgtatataaaggagtgatccaccatgaaatgacaactacgaactccttgctacagtggactaagcagaccgtgatctgactgaaccactatattcccttttttttcttgatatttccagttttcattaagcattcacgttcccagtttgagtactcgccattctaagttgaatactcgcacttgttcatcatattgttcttattattattattactattattattattattattattattattattattattattattattattattcatttttggtgttgcgaaatttgctcgacaacaattacaaacctttaaaatcagatacattatttaaataaagtaaatatgttataaaagatgcataataacatttaaaaataaatacgtactcctatcacaaactaaaaccaatttaggtaacatttgatcaaacaattggagtttttttgtaaaaaaaaaaatacatgcatttcccttgacgaacaatctcaccaataatactaataatgttttctgcatttcccttgagaaacacatgcaccaataactaaaaacatgtcacgacccgagccctag

SEQ ID NO: 233091 - DNA, 1302 bp, Cannabis indica
atatataggataaaccgcccaaatcgaccgatgtatagccctattcaaaacaagaaataatgttcacgaattcatggaaaaatcaatcagattaagtgaaagagcgggaataagcttacccgctacaagattccgacgaagatgaaggtgggaagcttggatcgttgagataacgtagaaatcccaaggaaaatgaagcttgtggtttcgaccgactagagagaaggaggagcttttccaagagcaaatttctagtgagagaaagtaaaagtgaaaagtgaaaatgaaaaaaagggtttccccctaaaactcatttatgtagtacatgtgggccctctttttctcatttacttcaccatcacatcataaaggcacttaaaacaattatttttcaactgcaatgagatcagatagttaagacaaagtgcttcaataaatgcatcactttttattcaacaaaggtaacaacaatcccgacaacatcaatatagctggtaaagtccctatccgtacagacgtctgcacagggacttgggggcaaatattatctcaatttttttcctcatgacatggcatgcttacgtcgatagaacctgtgccacatggcagtaaaatcattaaaaggaaggtcaagtgagcacccgatcaaacaaagaccttgacactcaaatgggaatcaagtggcaaaccagcttcctctcaagagttggctggccagcctggacaccacaagggcttggccgggctaggagtgctctgtaggccttactagacactcctacacgtggccaggagtaatgtgctgggaattgggccccaaaagcccaacagaatggctaaatattatctagaatcaagggtattttggtcttttgtaaatatctaactaactatacaattgttaagggatttgaattgtaaacttagggtttaaggcttcctatataaaggccttcacctctgactgaaaaacctaagttgcctaagttgcctctctcttcctcattctctcacacacacataccttaggttgtccaacaccctaggctttccaacacttgagttatgccaggcattgattcatacattgtaatcctaagggtactacagcagatcccacctatagtgatctggatagtaattctctcggtataatattactaaaaggggagtaggtcattattcgctatcacaagggggtcgaatctctataaaaaatcctattgtcgattacttttcattcttatttgtgcacacacctggcaagtattagatctacacgaccctgctgtcggttgatca

SEQ ID NO: 233092 - DNA, 1023 bp, Cannabis indica
gaagaggttaacgacgtttggtagtaatatttcgtctaacagcagtgaaggaagagcaggagatagttggaggtttctggaattttttcgaatgggttggatggactaaaaattgaaaggtggtgaaagtgacccagtagagaaaagtgttggcttttataggccattaatggtgcaagactgtcttgatcaggcaccgtcatacagtgaagattcgtaatgattcgaattctgtgatccaacggataggatgaataggtgtaaatagaagaaaaggcggttgaaacgtttgagtatcgctctgacaccaacattaatggaagagtctatcaatggatgggaagcgaatcgttgtcaacaaatggaaataaaaatcaatgatgacgatcataaatgttagccacgcgcctggggcacgtgccactctatttattaagaccggagatggctcacaagtcttatttacctggtactaaataagactttggggtaattgttgccccggttttttcctaaaatacgtggcagctgccaggtatgacaataagagacaataagtagggttcggagagttacctctcgaacaagggaaaaaggcacactttcttcttcgggagttaagatatagtaaattacctccaggtcgagaagaacccattcgaacagtcacctcgcatttaatgcagcatggggatgaaaacgtctgtgaatatccataagagaacttgtcagacatcgtaagcctgatttagggcgattacacgataatcaaagggactagtgacaactccattatgatggatcacatcaatcaaggaaggatgaaggctaatctcacctaacctctatgatacctactatacaggtaatgcatgccctagtttgtatattttggaaacttgcgcttatccatggttggcactcaaagacaagttacccctttttagctattcccaccaatctctataaatactcctgagaaaaatgagaaaggggacggaaaaaggagagaaaaaaacacac

SEQ ID NO: 233093 - DNA, 1405 bp, Cannabis indica
gtatgcctctgtatggagataagattctaacaagtgaaaactggtgatcgggttttcaacaaaactgtgataaaatacacaacagaaatattgatcaattaccttcgataaaaacccttcatcttgtcatttaaaaccccttcaaactcaatatccaaaatcccatctccaatagggagtgtctgtggaaactccaacaccaaaatctcatcctcttcgaaaatttctacttttgtaggcttgaatacctgttcaagtttccaataactcataaaattaggaacagaatccaatccaatcagtaattcaataaaccgaacacaaaaaaagccccctagaaatggtaacagcaattatactcctgatgatccactctcttcactgcggcctcttagtaaccatataataagattcataattgctttagcaaaactccaaatgatctttccagcaaaaagtaaactccacatcaaatttcctctgctctgcaaactctaatcattcattgaaaaaattcaaacacacggcaatcaatttaaaaagaaaaagaggttcccaatttactctactggagatcagatcaaatattaggaaattatatgtatatgaaagttttgaaaaagttaacatagtataacgattgtaaggagtagaacctcaaaatccataataagatcattaaaaataaacttaatactccacatgaaatttcctctgctctgcaaactctaatcatcccttgaaaatgttcaaacacatggtaatcatttgttatcttcccaatttcactctcccggagatcagatcaaatattaggcaattatatatatattaaatatattataagttgcttcaacccactaaaatagatgctctggtgcaacccttagatgtttcgctatctaaaaaaatttcttagttcaatttttttcatagtcacgtaagctatagttatttaagacattctgtaaaattttaagaaattcagaataatttacaatatagaattgtatgttccaaccgtctatttcatatgcttatgaaataaaaaaaatcaatagactttttaaaccctattttcggcgtgtcaaatttttttaaatatgagtaaaaaatttgtaagttgttttagatactgaaatggataagggagttcgattaaccgtttcattatagaatttttctatattatatacacatatatgaatatattgaaaaaggtaacatacataataacgattataaggactacaatcactttgaactaacattacacaatccacaaagatcactaaaaattaacaataatactcctaataatctttccagcaaaaaataaagtccacatgaaatttcctctgctctgcaaactctgatcatccattcaaaaagttcaaaagatctg

SEQ ID NO: 233094 - DNA, 677 bp, Cannabis indica
gttggtagtatcagctagtggtgaaccccttgtgcgacatcttttcagcacattccgaacattccctcctgaggttgaaagttgtcgtttggtgaaaagggaggacatacggttctcagtgaccggtggtgaagttgcagcaatagacgctgagatgacagtggaagaagacatattggaacttgtattgaattcagttgacatgtgaatataggctggagggattggcatagaaagagatactggtttttttgaagtgagtagagggtaaggggggggggggatatgtggccactggtggagaggctagtgatggattaatattaggtgttatatgtgataccggtggggcagatggcggcactccgagaggtatattcaatagtagatgcaggagtaggaaatccactgttatttgaaggagataacttatcaattggaatttctttagaacaagatgaagaagcctgatccttaatagagagccttttgggagattgagaagatacaccagtgagttgcaaagagtgtaaattcatgttattggattctatgatgtttgtggcatccaatacttgtttgcctttctctgaagaagtaacattggcaggggcagcaggttgatgtcgtgggtgctcaagaatcggattgattgtattacgagccaggcgagtgag

SEQ ID NO: 233095 - DNA, 1045 bp, Cannabis indica
tatttataattttttaaaaatatgcacgataacaagtgtctactataattataatgtatagtgtcatatatataaataaattataatttatatatataaagaaaatggcccctataatttttttacggtaataatatctaagttataattcattgaatttctataagtatccgattgttaagtgttaagtaaatagccacatggtaattacttaaataggtcaagatgttaaagatcgttaaatttttttttttaaaaaaatagtttaatataccaataagaaaatgacaagtggataataatttgacatttaacgaccaaataccgatacagttttaaaaatataacttaaatattattaccgctaaaaattaaacgtatgtatttatttacaactaaaagttaaacttatgtatttataccacaaattaatctcaaactaacaatcaacttcaacattaaatttcctattgtgattgtgttaaagacatttcattaagtttgttgcatatgtctaatcttcatcatcaaactaccatatgaacatgcaagtactttcatgtttggctctcattagacaaatgggaccattattattggaccactaatcaaaaatcatacaattcaacactccaaattccaacaatattaaaagaaaaaaagaaaaaatatattatctttagttagtgactacgtgtataaatacatatcatacgtgacttaatgaaaaatcaattacaaacatgaacttttgtaggaacttttttattttggaaaaatttgctaaactaacaatataaaatttacaagataatactatttgcttagtgtaaaatagtactcccaaataattatgagcatgtttggtattattttctgttttttgttttcaaaaaattgtttttagaaatgaaaataaaaaatagtttttgaagtttttaaaaacaagtcatgtttgattagtgcgtttcaaataaaattcttgttttttgtaattttattttctgaaaactgttttaaaaaaacaaggtcaaacaagccaaat

SEQ ID NO: 233096 - DNA, 1780 bp, Cannabis indica
tgagttcaaagctttgaaattgagcagttttaagtttgacactgactacaattcttacaagagtactcctgttccagaagaaccttctgcggttgagagtgacatttctgtcaagcttgatggtttttctaaaaagtttgatggtttggaggtgaagattgatttgctgcatacttcccaacagaagatttcttctgttttggttgagttgaaagagtttatgtctgcacagtttgtttcctttgctgctcagatggcttcaacgcagacaaagttttctactgttttcgccgattctattgctaagatatgttaattttttaatggttgttatttagtttttttttatgttgttgtcacttgtttttaattatatttttttataggacaaagggagtgacttttccaatgatgatggtggaagtgataatgaagaagacattgaagaagaaaatgctgcaggtgatgaagaggaggagggtagtgaaggagaagagaaggatggtgatgctgatgaaaattcttagtgcaaagaaaaagatgataagggcagtgatgatgaatgcactgatagtgagaagaaggtagataattagataatgtaactagattttagttactttgtatattttattttgttgtaagtccatttaggtaatggatttgtacttctatgttgttattatgtcctttttttattttttagtcttttttttgtattaatttgctactaatattcagactatttatttgtatttcttatgttttttattactatattatagattatggtgtttgcaattattgttgatctttttatttttaattttatgtttttatattgttacttagtttttctgtagttgtttcttagttttttttttaactcttttttaaaaaataaccttttttttttgcttgtattttttctttatcaagaattttgtcgattcaatgacggagctactcaaataaatgttgaggcaactgttcagtctggtgtgaaagcagttgagcttatggtaatgttgattgtttgttgttttttggttgtttaatggttgtgattgtttagattttttctaattatttttttaagatatataaacagatgtcttcagaggaaattggtggtgattctggtaaccagtttccagtttctgaaaatgttgagcctacagattgtcgtgttgtttgtgttgaggtatggttgttttatcgtttttttaggttctcaacaaaatttgccttaatacttactgtatgtttcctttttttttttaaatctcttagatgggtacaacaggtgtctctgttgattctaatattcaacttgttgaagataatccgattctcgttgaagaaactcctcttcttgacaagaggaaatctaagaaacccatagcgttgacgtctccgtttatggagttagactcttcgatttcaagttctaaagatggttttggttatggagttgttaagtatgttgctggtttgtgtcctcttgatgataaaattggagaagatatagaccataaagatgagaatgattttgacttgtggcttggtgaaggtcggcgatcaaagaaagatcaatatgtgttttattttagcatttttgttgtgttttatgtttattttgttttttaccttactatttatatataatttttttattattatttttctatcttttagccatgacaagtacaaggttgttggaaatttatttaccaggatcttagatctactcacaattatgttgtttaaacaccctaaa

SEQ ID NO: 233097 - DNA, 859 bp, Cannabis indica
gttggttaatgaagtaatgaatatttatcatcttatatataatttcacaaatgagatatttgcggtataaatatcataagtttttagtattatacacttaaataccacatatttgttttcgacggactaaatatcttaagttacatttccgttacttccgtcactacttttctgttaaatcctatcaaacataaagtatttgcgacataaatagttgatgttttaaatttcctacacttatataccacatatttttcttctgggggattttttttttttttgaaaggaacattcatttaaatagattttagacctcccagtcgttacgaaataagttcataggaatagacgagatggcaagatgcccaaactgattatgggcaaaagtctacttggccacataatgagccataaaattacaagttctagcagtaatatagaataaataaccaagaaaggaagaagagattcttttacaaaataaggaatagttctcaatttcccatctaggatctaagtcgttgagggagttgattaccaccttagaatcactttccactaggataaacttgtggcctttgtccttagccacttcaagagccagacaagcagcagtagcctcaccacagagagcatctaaaaaatccagctttacagtatgcacccaaagcaccttacttagatagtctctagcaacaactgcaatacacatgtgctcccctcctactttaacatcacaatttaacttgatccagtcttgaggattaaatacttaaagttacatttacattaccttcatcactacaagtctcttaaatcctattataaggaattttttcaatattatacctaaaattga

SEQ ID NO: 233098 - DNA, 1383 bp, Cannabis indica
atcattgtgtgagtagcaaagttcataatagtgatttattctcacattaggcttgttggtagaaatagtagggtaactatagactacgtgttagtgatgtgttttgattaattcactttttaaggttatcacaatataaatttatttatgtataaaaacatttaatatatatatatatttgtatatattttgtgaatgtaaagtatattttgtgtatgaaagttgtctcaaatttagaacatctttcaagaaatcggttggtttgggttatatagagttaaaatgtgtctaaccacataaccaacctataattatatggcctatcactttttaacccaataagccatgacttactcttaacataaccctttactacaaaaaatggattgggttggccaggttgaatagtttggcccatattttgtgcacccctatgtgtgagttttgaattggtaattgagctttgtgtatgaagtgtttgggtgtttgggcatgtttatttgtagtgtaaatgtttggaaaataccttatttttgacttgaaatataattgctaatgatttggtaagtttgggataatttggtctaaattcgaattgggttaaatatgattttcttggcattttttgagtttttaaatccagtggtcgcggcctagcactaaactagagaggatgagtccctgtttgggctctagtcgcgaccatcgcaagtttggacgcgaccatggcatggtagtttattatatttttttttttgtcataacttttgactcgagactccgttttggacattcttggtattgttagaaagctctttttgagctctatacgttaatatgtaatggaattctaattatgtgattattgaaagtgaattttggattaaccctatttgtgaaatcaaggaacgtgtgactaggactactgcttgctcaggaacacccgggggatttggaatgtccacatacttgggataccaggtaagatagtagttagaacatagagttaagcgtgatggcgctcatgtttggtattattcttgtgattaagtgagagaccgggattagggttattaccctaaagtgagcggttatatggtctaggattattaccctagtcattaaatgattttgaatgcaatgccatgctatatatatggagataaaaaattatgcaggtaaggcataattagattagactcggtgatcaaaaccgagataaaccaatctaaggccttattgtaaatagacgtgtgagagcaacacgtaggtctatgctaaatagacagtagatgcggtggcatcagtatttatctaaatctagaatatatattccagattgttatttttacagttttgctgggcttggctcacgggtgctct

SEQ ID NO: 233099 - DNA, 1765 bp, Cannabis indica
ttattttttttttgaaaaaaatgggtcgtcttttaaaaataactacatcatcaatcacaagcctattttattaaattcagaaatattattttttttatttgttttattagaaacacacatgcaatttcttttttagttacacattttttaggatttttacaccacatactcaaattttccactttttattactgcgggtggaatttttttttcaaaaatactatgtattttttatacagtgtactatgaactatgttaagtttttactgttgttctactattatttttttacttattctactgctatttttaattgtttcgttttgttttttttgttttttttataaaaagatagtatttttatttaaaaaattttgtggcagtaaaattgtaaatttttaccaaaaattccttctcttttttcagatttcgtcgtgaggcccgtgtaattttctccagaattttttgagcccattaagtagcccagcccaatattctgtttgtagcgataaaacctaataaaatcccaacacatttgttaagcaaaaattttacatttaaaatattaaaaataaatgctaaacacaatttcacatatgccaaatttatagcataagagtttattaatttaagttcgacccatccaagattataagaataacctcttaattacaattcttttatttaaaggagataccctttgattccaattacgatgatattaaatgatttgaaataaattagggaaatttggggtaaatttggagttacagctgaacttagtcaatttaattaaccgagctacctacatacattctttgtgaaggatcaagccactagtagttcagaatacggtattttagaacttggatataaggattccggtagatgaccattttcaggaatcctttgctttttaaaagaaatttagaaaaatttctaggtggatgaccttttgttgaattttgagatgtgtgttttataccattttgcagtatcggtgactgcacttagtcttagcaactaagttgactacgtatccttttataggaatcaagtcgaacatagttcggagagtgttaaaagattttgtatcttcgataactttaatattttgaggtaaatgacctcatttgggatttttgagatagatgacctcatttggatttgatgaggtgaatgatctcatttgagattttgaggatttgtgactatacctaatcttagcaattaggttgcctacgtacccaaaatgggatcaaattgaacgtagttcatactgttagaagatttttgatcttgtattttttagagacatagtttattttggaaggaaactcatttttaatctcacatgaataaatttagagatcacttgaattacaattctattttagtgagaattgcgaaataattcaaacttacttgacttggtgtctttaactatgaaagtaatttgaatagtaacggttgagagaaatttgttttgacaaaagataaagatatgtattattttgctatatcttgtcatatatttgatactggaaacttgctttcaatttctctttcattaaattaattgtacatttttttttgattcacagtacacattaatttttcttagccacagtaaatagtacaatactaatatatatatatatataaataaatatgtatataacatctgtgcatatttatgtatatatatagggatatgattttgtcccgtgatgtactttcacggaatgtattccgtggtacatta

SEQ ID NO: 233100 - DNA, 994 bp, Cannabis indica
atctgatcatcatgtagctttagtctcactgttcctattcctgcaactttgcaggccttgtcatcacccaatagaactgatccaccatctaatttcttgaaactatcaaacagatctcttcttagtgtcacgaggttcaaacaagtgatgatgaatactcctcggccagaacagccccaatggcttcagtctttattgatgttagaagagaggattacaaagttgtttacaaagtgttcttgacacattcactcatgaagcaaagcttcaattacaaaacaactcatctcaccaagactctctctctgttacaatctgaactagcactcaaaactccctcttaattgctacctgaatgctataacaattggctatttatagcctttgtttaagacccaatcctaactgtcataactgatagttaagtaaagtcgttaggggcagttggaatgtattagccaatgttgtctattcctctattagtggccaatcacaacagtatcgctagccaatcgcaacataacatgtcgagaaggtgctaggcaccactggtacttaatagcaatgctctaaaaattatataggtagcgtctcaacattaattagtaatattacttaaaaattatttttttaagttatatgagagtcaagtattagagatttaatttgaaatattattaaagttagagcattgttattaggtactagtaattttcaaaatcttttatgagtggcgcctcattattagttaacaatattacataaaaattataagaaattttcttatgagagtaaatatttaattacactaatccctattagtgcaaattgcaaagtagttgttgaagttaacgcattttgccattacttagtaacgtcagtcacatctatccttttgtggcgggggtttccgaggaatgcaaataaccggttacttctcttttctttgtggcaatatttaactagttgaaaataatactagtatatatatata

SEQ ID NO: 233101 - DNA, 827 bp, Cannabis indica
gtcataaccagagatacaaaacgactaccaaaccccatatgaagcatcaaattttcaataaagctccattcaactcgatcataagctttactcatgtcaagtttaatagccatgtacccatcttttccccttctcttccgtttgagatagtgcataatttcgaatgagaccatgatgttatcagatatcaaacgatcaggaagaaatgcactctgcgtatcagagatcaccaacggcaaaacactttttaatctgttagcaagcaccttggaaataattttatacagaacattacacaaggagattggccgaacatcagtcatcatcacaggttgcttctttttcggaataagaacaatgttagtatgatttacctcatttgggagagaaccttcaagaaaaaagtccttcacaaacttggtaacatcattaccaaccgtagtccaacatttttgatagaagcccggtgtcatgccatctggccccggagatttatctgggtgcatctgaaaaagggctcgtctgacttcatcatcaacaatcggttcaactaacctttcattgtgctcaggtgtaaccgtgacaggagtacaatgtagaatctcagcaaaattcacatcagaaaacgaaaaaaagttgtgtaaaataatcacttataagagagtcaagcccattctgccagtcaaaccacacaccatcatcgttcttcattttctgaattgagtttctgcgcctccttgccgtagcagtggcgtggaagaacttcgagttactgtcgccctcccggagccaaagttgtttgctcctttgcttccaaaaaatttctt

SEQ ID NO: 233102 - DNA, 1084 bp, Cannabis indica
caaaagttacatggagactgtgccttacactagtcttgttgggagtctcatgtaccttatggtctgtactagacctgatctatgctatggagttagcatagtcagcaggttcatgaaagaaccaggaatagagcactggaaagctgtgaaatggattgttaaatacctaaagggaactatggatgttggtctgatatatgatcagaccaacaacaacaacaactctgatgtaatgggatttgtcgactcagactatgctggagaccttgattcgagaagatctcaaactggatacatttttcaaatgagaggctgtactgtaagctggaaggcaaatctccaatctgttgttgctttgtcaacaacagaggctgagtacattgcttgcactgaagcagtaaaggaggctctttggctaaagggaattactatggagcttggaagtgatcaaagatcaattcctatattctgtgacagtcaaagtgcccttcacctaagcagaaatcaagtctttcatgagaggacaaagcacatagatgtgagacttcatttcatcagagatactatcaatgaagggaaggtgaagcttctcaaagttccatctgctgacaatccagcaaacatgcttactaaggctcttccatgtgacaagttcaagcattgcttgaacatgctgtctatctcacctgtagaataactacctggtttatcgacattagtagtcaaggtggagaattgttattttctgctttgcctacataatgtcatggtagttaatataggtagttagttagcctaggtgtcaagttcttactggttagtcttttgttagttaattgctgacagtttagttagttactgtccttttgttctgtaattcattgttctataaaaggggattgtaattcatcattaaagactaatgtaatggacaccattttgaaataatacaataacagagctttgctctttactgctgttgtgtgtctatagttcttgttcttggtttaaacacatcttaggttcttagattgatgcatacagaggtgaatttgtgtaacacttatatatcaggattccccga

SEQ ID NO: 233103 - DNA, 1382 bp, Cannabis indica
ggtcttaaaaatactttttttggcgaccgttgctaaaaaaattaagtgactatttaaaaccgtcggaaaaaattagtattcccgacagtttataagagtaataatagacgacaattttatttggaattcacgaatttattaggcccttatacccgatggtttaaaaccgttgcctatactaatcgtcgcctatactaatcatcgcctatagtataggcgacaattttaaacagtcgggtataagggcccattaaaaaatcgtcacctacttctcgcaaaatttcctacgtgctcacctacttcttttctatttcccacatgcccacctatttcttttccatttcccacaccataaaacgaaaatcttaactctccaaaaccccactcacgcctccgcaccattgccctcctctctcgccgtcttcctccctctctcgatctccctttcttctcgtctctcttgtccatcgatctccaccaatacctcctcccgtcggtctccctttcctctccatcgcatacgtcggaccaccaccatctcccgtcggtgtccctctcatctttgtcttagacgtcggaccaccaccacctcccgttcgtctacctctctctctttctctctctccgagcttagtataaatacatttatctatttatatacttttttatttattataaatttatttatttatttattataaatttatttatatactttttattaatttattaattttgttattgtataaatttaatgtgtcttaaagttagttgctattgtattaaaattaattattttaatttaataactataaaaactacttatttttagaatatatggtactgttataaatttgttttattaatttttaatatcatcgttaggagactaatttattttttatcttattttattttgtaaatattttgggatcattcttgatatgttaatgagttggcgtataggatgaagtgatataagctaaagctctagctctttgggtgtgctgtttcaagacgttatagttttattatttaaacttctggggatagttttctcccatgttgctcgctgactttagcagttcatagtttgttaaagcctacttttcggttagacgatgatctatccaagttcaaggaggttcttgtgctgtttgcggatgtatgtatcctaaattcatgaatgattctaattactacgtcaaaaaaagacaatagataagaaaaaaatgaagataaaacgagaaattgaatgcgattttttcaatgatttatttcaatgggagtgtccccttttatacaattatgtaagtcatagattaggatgccaaagagaggaataattgttgggttttatgccctaaataaaactctgtttc

SEQ ID NO: 233104 - DNA, 893 bp, Cannabis indica
ttttgatcttccgaaagagatgtgatatcttctgaaatagtgattcattctttaatgtttttctatagattttgtgatcgaaaataggttctcattttctccatagataagagtggttggactctaaactcatattgatgagtgaaaaatattatgtccagtgataagatcgaacgaagctttgataccagcaatagtttgagaatagatttgtattagtttaaatttgaatagtgttaaatggttgttatggtaacgtagtgaagtagtgatgttgatgagtagttgttgatttagtatatataaatagtttgacttagaagtgagaattatatgtaaaatagtaagctcttattcaaagtttagtagctttggcttttgggtgttggtttcaatttggaacctttgatgggtatttatagttgtatttgaggctagaattgtttgctctagatctttctagtttatataaggatttcatccatacatttctacatatttcttaagcttgcatatctaaaaaaatttagactaaagttttctaaaaattatatttttttacatgtttagaaaattctaatatattttacaattatctaaaaaaatttaaagtaagttattctagacaaattaattaagtattgtagaaatgtgttataatttttaatacatatcactacaaaaaaatttaatttttagtcacaacaaaatttatgactaaagataaaaaaatttatggctaattataaattttcattatttaaaaggtctgtggataaaagtattagtcacaaaaataacaatttgttgtgactaaatgtatttttagtcataatatttgttgtgactaaaactaaattagtgacaacttgtaactaaatactatattttag

SEQ ID NO: 233105 - DNA, 2452 bp, Cannabis indica
gtgcggatatccgcattttgcggattggattggattggatcgtgcggattggattggatcggatactttgtgaacacccctactttcttggaccgaatatggatcaatacaaatactccaatgctcatttatcttatcactgattcttttcaatttgtctttgaaaaccttactttcaagatcctctgccattgaatgaaacacttcaataaagtttttgttctctatagggatgaattcaggattaaaaaagcttatctctaaacgaagaacttcattgatgatacgatgaacaaattcgtcttcgatttcatcattcaaataaaatattgtcttctccctttctttcttattcgtctcattataccaaaatggttcaatcaactccattgtttttttgagaaatcgcaataaagtatcaaaaccatttattacaaaagacttgttaccattctcttccacatttaagcactggattaaagttatgacctcatcaagaaacaatgacaccgtttcatgattacttgcattagaagcaaagacaatcaatggtaaataattcataaagaagttggagatttgagtaccaatttttttaaaacaagtcgagagagaattggaaacaatacaatcttgttcggagcttcttgtcatctctctcatccaatcgttcaaactaaaatactctctttctctttttttcttggattcttctctccatgtcatttccataaactcttgtaatctttctttgtaatccgccaaaggttgtttttgaccattttgatatcgttttaggatattaaactttttgaacctctcttcaatcttgtctaacttctcattttctaattttaatcttgcaataactttcattatatccttgtattcagacaaatccatcgcgtttagcccatgggtttcttacgtttagcccctgaatgagactcaagatcccggttagagaatctaaacactagcttcttgtggactcctttaggtcccaccatctgaggctttttcaagtggatagccgatttagggggcttcccactagcctccccttcacgagttgcaccaaaccggattggccccagtttatcttgaaagattttggccacatgggccacatgctgagcagggaacggaagctgaacataatcattgtacgccaccgaaaaagctgtatctgaccgttgtctaggaacaccttccatccctccagcaagtaagttcttactaacaagctccgaatgacgcgaacccaacccagcaagatcgcttcccatttggggggggagagcagcaatcggataaccagaagaaccaccattccccgattccaatcccacaggttgcccatccgatttttccaagacctctctgtcccgaatatcctccacttccaatagagcaaatccgttttcaagtcgagaccccccgaatccaagggccaaacaacggaacactacgcccatcatccaccaagaccactctctttcgcccaaaacacatgttctccaaatggcctataactccacatttaaaacagaaaaccggtaaacgttcaaatttaaagaaagcccagtgttttttcttaccatttccttccagagagacaccagggaccaaagggaggcggatgttgattcgagacttgaaccggaggaaagagttcattaggattcccttcttcctaaccttatccgatgtgacatatatacccactctgttcgccaacagaaccgcagcttcatcagtcataagttccaggggaatgccgtgagcttttacccagatatcaagagagtccaggtccgctgatgtccattgcccatcctccggcatcgcagcaaccatcataaagccatcacacggagaccacggaccattggagaggatgaaacgagcctcccccacagaagaaagacgaaagatgaacgtcttggttttacgatcgaccatttgaaatcgccatcctctttggagtctccacatcccagtcagagctcctctcatggtagcagtagaaaaatccctcctggaaaagaaacgccccaccacggaagaagctattgtgttctttgccgcctctgagtcaggtgccagttgaatcgagaaatcttccaacgagaaattttccacttcctcagccacttcctccaccctaacattcgaagacttatccatactagctgatgccatagaaatccaagtcagttgtttctggtaaaggcagagtttcactcgttttttgcaggtctgaaaatggtagatgttgatgtaatttcgcagagcaaaataagggataataaaccctaggaccacaatgaattggtcaggggatagtcggccaccacccctcttcgccgtaccggccatagaacaactgttattaattgaataagcccaataactaaatgggcctaaataaattctatcaagaactatg

SEQ ID NO: 233106 - DNA, 2273 bp, Cannabis indica
attttaacaacttgatttatcttcttatactttaattattttttttcatgaaatttgatattacaaattcatacttgatggaatgttaaatgagattgagtaagatagctgttatttgtatatgaattatttaaattatcatatatggaggttgtataggatggatattatgtagtgtagtatgatgatgttgataagttaagttgataagttggatgattggtggaacaaggaagagttatgtgtttaatttttacgtatgtagtaagagaggagacaaaatagtaagtagtaaaagacttgatttggctactcaagcttggttacaatttggaagctttgatggggtatttctagttatctacccctatatttaatttcatctagattattctagttttatatatgacttacaacttttctaattgatttacattcttcttgaatggttacttctagttttctaaatattctaggcttttctagtttatttattttgctaagttcctaaagttttcactagaatatattctaagatacaaatattctagaaatgtgtagcacattttaacaatactttcaacttttcttttttctctttttctttttgagttagtaacagttaaaatgataatttattttttaaaaaattaaataaataattacattaatattaaaaataataaaatcttattatataattaatatgtcaatatctactattgcatattgtgtcaattaaaaaaaataaaaatcttatcattctattttaataaaatatgtcaaaaaaataaactaaatatatatatatatttaaactacaaaacaacacacatacaaccgaaaaaaattgtgaggaagaaacgaaaatatacaccataaaaaatacacatgaataaagataaataaaaaataactgctaaacaaaaaaatattttgaaaaccacttaaacataacaaaacaaatgcacatatatacaacaaaaaaaattgtatagaataaactaaaaatatacaccataaaaaatacacataaactaaacaacaactgtacaaaaaaaaagataaaaataacagaaaaataacgataaaacatctaaacaacaacataaaaacaactctagaataacaaaaacacagcatatataattcaatagaaaaataacaagacatcatatcattgttaaaatatgtaaatcattcatagatcaactccgaataaactacaaaatatccaaaaaaaattactacttttattagtcatgtaaaagagagaaagatataggagtgctcttaatcatttttttaagatagagaaagagtgttaaaaaatatgagaaaaaatgtgaaagtaaaataatcatattttagtaaaggttataaaaaattaattgagattttttttataagatgtgattaattaaagaaaaatagtatagaatattttgagtgtgaatagtaataaaatataaaagagagaaaaaaatataataagtgtttgtatttttttaaaaaaataataataaaataaaattttgtaagagagtaaaaaagtgttaaaaaaaaagaaataaaaaagtacacttattacttatacatttttatatatattaattatatttttgacatctttaatttgacaaaaatattttataatttatttattaatttcggctgagttatttatttggtttcaatagtttgtatatttgactttcacatttttgtattaatggatttatatatggaaggaaatatgtctagcttttcaatttatgaaaaatatggcataaagggtaagtttgataactcatcatttttctatctatccagttgtgtatatctgatctcgtgtgagattcttaatatatttgatcagatttgttgtgaagaaaattgaagcaagactttctttttctatataaaaaaagtcgcacttgctgctcacgattttgtagatacagaaatagaaattactgaactgattgaagatatattttagagaattatctagtgagttgtggtcttgttcagaccatgtatgagctgtcaataaggtgcatattgattataaatataccatatagtagctaggtcatgtatctctttcatatactttgacttgtattcatttcttaagaaaagagtgtctttgttttgtagagaagagagtgttgaatctgtatccaagtctgcaaaaaaaaaaagaacaatagtgctactttcgggagaaggttttacaaaactttcgggatattacttttcaagtcttg

SEQ ID NO: 233107 - DNA, 991 bp, Cannabis indica
tgttttcaaatcattgaatccaaaaactctttaaatacccacttacttttttgttttaagatttccaaccaatcacagattcaactttttataactcaaaaatactaaaattacattacaaccaatcacacttttcaaaataatttttcacataaaaaattaaaatttttgtttccaaaacactctgtttatccaaattttaacgatgatgacatgtcaagagtagcaacacgtggcacaaaaataccgagactaaattaatgaagaatgtgtaaagttatgaccgttgagatcactgccaaccatgaagggttagtctaggaatatacccctacctcttacaccttcatggtacgagtcatgcattttatcatagatacaatgacattctcaaaggtatatggggacatccacattgcaccataactactgacaatggacgaggggtcacccaacgaaggtggtggtcgcccccatcaagtagggtctgggggggtcacccaacgagggtggttgttaccccccccccctttaagttgggtcttgggggggtcactcaacgatggaagttgtcacccccctcaagttgggtcttggggtggtcacccaacgaggattgttgtcacccccaacttgtcgggtccaggggggtcacccaatgatggtggttgtcaccctccctcaagttgggtcttggggggtcacccaacgatggtggttgtcatcccccttcaagttgggtcttggggggtcacccaacgatggtggttgttaccccgctcaagttgggtgccgggggctcatccaacaaggattgttgtcacccccctcaacgagggtctcaggggtgttgcccccaagtatgggctttatccccaaaggtggttgacgaccatgttgttgggttttatgccctacataaaactcatttcaatataatcagatttacttattaatatagatctgaaataacatttaatgttgcatggtt

SEQ ID NO: 233108 - DNA, 973 bp, Cannabis indica
gtttttgcttgaagtatttttctagtgtatttaattaaatagaaaaattaatatttaagttgattttttaatcatgatacttaaatatttgaaatttttcttagattattaaattaaataggaaaattaattttagaccaacataaattctaataattttttccagtttttattttatttcattttatatgaattttgaaaaatgtatctttatacattggattttgaattcaattatatatttatagaaaattaaatttcagttaaaaattaatttttataattaattttggactaacttaaattaagtaattttcatagtatttataagaaaaagaatactaagaatggaaaatatttatttatttttcagatcttcctaatgtataattttttaaaagttaaattaaaatttatatttagagttatctaaattagtaatttttgttaaataaatatatgtcaaagtaaatagattaaaataaatatcaaatgaaaatacaagtcttttaaaataaggagctatagttataaggataatcgatctccattgttggtcctacatggttaatttttttcaatataacctcgagacactagacttcgtggccctaagggatggttattcgttgaagcatttaacaccataacgatctcttatgataagtattttgtaagttttcgtctttattagactctgccctacggtgactacttagagataaatttacaaagtatgaaacaatggtggaagctcataaaataagaataaccttgactctcgcctaccgggacaatgtaggattcttagttttatcgaataaagggttgctagaatggtgtccgttttagatgagctgacaactttattcaatgaatgattactttgactcttgcctactgggacactgtatcagtttgttggaaaccttgaaaattatttaggattgtaagttttagtattttcactagt

SEQ ID NO: 233109 - DNA, 693 bp, Cannabis indica
cttagatatttatttgcaaccgaaagttaaacttaagtatatatatcgcaaattactctcaattaaattgataaaaatttattaacaagttaactatagttaatttggatcttaaaatctattaacaagttaaccataataaatttagatttaatcaataaattaaataaataaataaaataaataaaacatgtaacaaatattgttgagatatttaataattacataatttaacatattgttaaaatcaactatataattcgaaaaaattatagggttgttgaataatcaataatatcttttcaaaatttgaaatttcaactaactttaaaatatctcagttttcaaacatggttaactcagtcaacaattgtgtcaagttgaactttagcttgttcatcatatagtttgtagtgaaagccttgaagtaaggagatagcgactcaaagatcatactcacttgagtcctctcgtcaataatagccctatgtgtctctgcctcatgaattagctcaatcatgtgcaatacaagagtcctaacaacgacacccttctttatcttacaatttatgtagctacaagtagcatcatacgtcttgtttgattagattgctgcccaaacatggtctgtagagaattcattctctatatcttcatgtgtcttacacataatatcgtccatgcttacaagca

SEQ ID NO: 233110 - DNA, 1843 bp, Cannabis indica
aaaaaccccaaataggtaagaagaaaaactttcaaaatgatgtaaaacaatcagaaatattttttccaatctcgaatattttaaagtggcttgaattctattctagataaaatatataataaagctagcagagaaggaaaaatatttttctccctagttttcttccatcgctaccatgatgatagagctcaatacaagagaggataaaagaagcctcttatctgtttctgacaggattttgtatgatttaaagaaaacaacaaagttgtttattaaattcattttccacaatgatattaagaaggagaccaaaacacatacctgaaccactatagctgtagcaaataagaagaattgcaccctgaagtttccagcaagagaacaaattaataaacattcactagacagaaacaagtcactgagaatccgtttgttcaaatttatattcattaagaagttgtgggaagaacagtttaaagtcacgtaatagatctttgcataaaatgacaggatatgatgagaaacaagaagaaagaagtaattggagctagtgatatataacagcaaggaaaaataccaagactacaaggccaatagatagtaatggtgatgagcgtgttttagattggacagcacccacaaatggaatgcttcctccatcaccaatgcgcctagcaggatttactggcctccttgacatgattatatatatagttgtaatttgcctgaaaaaaaaaaaaaacaagcacaaaaataggcttagacaacaatcctttcagatcttaaggtattacttaagttgatacaaggactatcattagctcatgaaaaactttcaagtaatggtattagtgccaccatttaaaagaacccatttccaattgtgttcctgatctctttatcatactaattagtttgaagtgttcgatactatgaatgccagtattaattatctaacccaatagtgttaattttttatatctaaaagcataaacaaaatacagccatcttttcaattgctaaaagggttttacaaaatctacactatacattcttcaccacacaaatcatccaagtacataaaacaaacagataaatcttattgagaaacacaatgatctaacttccaaataaagggaagaaaaaacaacagtcatcaagcaaaatatggcaagtacatccgtatgataaaatttaaataaatttataaggaaaaaaaaaacaaagatcaaccgaaatattcttactgaatcgttgctacaacccaagtaataatggggacaataaacaattaaaaaagaaagaacaagaaatggatccagattcggaaaggataaagaaaggcaaggaatgaaaaattgaagaagaattacctgaaaaaatggaaaggtttgaagaaggaagaggagaaagtattgtgttaagagaaccgacagatctgtgttgatactcttcttcactataagcagctcactcataaagaaagctgtgtgaaattacttaattaaaagcttttaaaaatctttatttattttctttatttgaaattaaataatctagttcgggtgtgtactgatgctattattttcaacagcggtttaatataaaattatacatacggtggatacagtattttgttggttggaggaaattccacctccacctccactaatgactattatggagtttgtttttaaattaatataataatctttttttaaaaaaaaaaatccaaattatacatattttttatgttatttgatttgaattttgggaaaaaaacagaaaaatacaaaaaaaggaaaaaaaattacaaaaatactatgggccggcccattaaaca

SEQ ID NO: 233111 - DNA, 1284 bp, Cannabis indica
ttgtatcacaacccgtaccttcaatgtgctcgtcctccatcatcacctccttagtaccattaccccctttattcttggatcgtttaggaatcacctttcttctctttgatgggccctccatttttttcaacgaggcaaaactatgatcataacttatgggaaaatctattaacttcggcattggatcagtgtgattattgagaggactcggttgacacttaaaagtataattagtttgttgctgttgcagaatttcaaccatatctagaaagctttcttccctccaagaaccatccctttttgaacttccctgcccagtaatattcactcccaaacccaagtcaataccagaattctttgtgtaattaggggcttccaaatcaatacagaacctctccgccttgtgatctttctcaatgtttttacccttccccaatattccagaattaatattaaaggaaggataagaactcaccagtggcaccttagacggattcgagattatggtgtgtgaagattcaccacttgcacccttagctcccaaattggatccagtcggcaataaccttgaagaaacattctgcttttcaggaaaactaggaggacctttattcggagttgaattaccacacgggtcttgaatgaaggaaggattacactcgtatcgttcattcactttgagcaaagaaccatagctcggttgtagcttccccgatccatcatcaaagaatttaattggttctgcacaaatccgagtatcatgtcccacaaaaccacatttaaaacacataaaaggtaatcgatcttacctgtaaggaagccagattttccgaccctcatacggaaataggaagcctgggcagagaggagtagcaatgtcatgccagactttgaaggtgaagtagccctttgatgcaatcttggggatatctgcattttggacagagatcaattgtcctgcatagccagccagtcgatccatgttccccttcgtaatcgagcggttaggaagattcaagatacgcccacttaatggaaatctggtgaggaccttgttccaatcgcacgacattccttcaaatttctccattattaagataccattgttcaagaaccatggatttttggccagaattctattcaaatcttgggtagatttgaatgaaaacaccaagaaacttgcagatgtcgtcttgcctttgatttcgacgccccagttcctttcagcaatcccccagactcgtccaaagatggtcttcaaaagcgatcgactaatcggtcgat

SEQ ID NO: 233112 - DNA, 909 bp, Cannabis indica
tacctatcctttttaataaaatatttatatttatgattagatatgttttgattggtcaatttttattccctatactatgaggaagaaataagaggtggtacagtagatttctcctatatatttatataacatacaggcctatcctatactacataaacatgttttcctgaaaaagaaaagcaaaaccaaacataatattttgttttccaacaagtggccaaatttcttcattcccattatggctcttcttcttattctaatagctatacccaataattcaattagaatttaaaaaaaaaaaaaaagaaataattcaattaggttggtgacgaaatagatgtttcctgtattttgttcttttaaccttagccacagataatgattttttttttaatatcttttttttggaagatcagataataattgttattattatgataatatatggtattgaaattcctttttacatggcacccgtaaaaatgtagggcaaatggccgtccacagggagaattcattgtaggagaacaatagccaaaccattcaaaaccgatagatatacatttttattttaataaatatgatttgtcttcagaaaaaaaaaaaaacatttgtagcattttataattttttttttcccaaactaaactgttgcacgtatctcgtttagttacattatgctttatttttttttttttttaaaaaaaattattcatgtagcactagtctacttaatttaagagtctaataaaataccaaaataacagtttaattataaaagttattggaatacgtatctacccagttaatatttatacatttaatattaataaagtgaattttaggtaatttaaagttgttaagtaacattcactctgtaattatattcttgatgtataaacacattac

SEQ ID NO: 233113 - DNA, 1067 bp, Cannabis indica
tttttttttttttggttctttaaaaaaagtatatattattcaaactttgatttcatgatgctagaatttatcttttcattaggtaaaaaataaatggtagaaaagaaagaagtaaagaaaagggtcaaaagttaaaatagtaataatgtggagatgtgtactcaaaatgagtcaagcctatataagagtgagtaggcgatgtatgattaacacttttgagaattaaaattcatttattatcatttatccaaaaaaaaagaattattatccaaaatgctttatcacttaattgagtctaggatgtttgatgcataccaataaaaatagttagtttctaactaatttatgttgagaaaacaggggtatccgagtggaggagatttttttttatgtttcgattgtagttgatactatctggagggagcgaaatgaaaaaatacacaataacaatcatccggatgtattaaaatgtattgaccttattcatacttcttttgcagaattacatgctgctctggtgccatgcccggctctgattttgacggaaacctggaatccacttgtaaagaccgcatatgattaatactttggtttatcaaatatttagggtttgtgtatgagattaaattaatatttatgaaatgtatattttagaaatatatttaatatcatatatgttattatgctattttatgtaaattatttaatttctgtgttgtgttcggaagctgtggaaagcgacgttgggcctttagagagtcatattttgtatgtctagaattttagcgcggtgtcatagtgagatgttagaggcgttagaattttcggggttcaaaatttgaccattttacccgtgggggggggggtttgtagtttttttttaatggaggggcaagaaggtcttttggcaagactctttttttgtcttatttggttaattcttggctgggaatagattattaatttaaaacaaaatgataaagaaaagggtgtacttaagcttgaaggaaaaagaagaaaatagttgtccctctcttcatatctctctctctctctctctctttcga

SEQ ID NO: 233114 - DNA, 1695 bp, Cannabis indica
aaaaatatgtacccttttacataaagctcatgatgagattggagaaaaaacataataatgaaaataaaaatagaaaaataattgtaataatcttttagtacaacagatctacaattttatttttcatataaacacaccataaatactatttacaattttataataattaaaattttaaaatttagatgacatattagatattattattacagtaattaattctagttagaaattacttttttaaaagatcatctttaataaaagtcgttgagtataggcaacgatttaaaacagtacttactaaattgaaactttacacttttaaaatagaatctttgacggattacaaacattggctatactatagccaatgcttttaaatcatcgactatagtgtagctaacgtttaaaaactatggaagattttgttagcccaagatatgttttcaagagaggagtaaattagaaatttaagctagtttcggtaaattaaaacttttagcacaaaactatacaattaaacacttaatcaaataaatgcaagtaatatgacaagcaataatgtatagcaaataatcaaacttgtaaagtaaagagtttaagggtaagaatttgcaaactcttgattcttacaaagttgggtagaggtaaccacctatgtccttggtcttcaaagctatggacctagttttgagtttcaatatcgagccaagttaacgggcttgactaacccttacgatagttgtaaaaggccactattgttgtgtttggtacaccatacttcgcacaatttcccaactccgacttagggcataattgcctactttatgatggattttaggctaccaataggagtttggtgggatgttatatatcccttctttatgattaatgtatagaagttcgtgaaatcaaggaataatgggtttaaacccttaaacacgtttgacggaataggtgtctaacgctctttctcatgacgcattagatgcatgtatagtatctcgatccttgagtgacatgtcatcttttgttagtactctcgattgaatctccgtatgtacttcactcgtggagcgaaaggggtgagagttgctcacggagcaagtggacccttcggagattaataacgtgttagtactccttgaaaatagtagactccaagagtaattaaggtgatgcgtcatgtaacatgggttccattgccacatggtttctcctggactgccacgtatttaagaagaaatctcaaaaaacgacaaaataaaacatttttcttagtagactatataatataaatttaatttttatctaaaatttaatacaaattttacatcttgttgcattaagcataactaaattagttataaaaaaaaaactgtaaataaattaaaaggaaaatgattattaaaaaaattaaaataatcactaaaagaaattcacaaaacgacaaaataaagcattttttcattcttctataaatgttatgatacatatttttattataataaataactcttaaaataatataagggtccacctcatttgtaggtacactcactttgcattttattgaaatacggaagtagtaatgagctaagcaaatggtttttgcacccaaaaccacagatttcttccaaactacaggtggtgaagtggtctctaggtttgctcctctttcttcaatcccaataa

SEQ ID NO: 233115 - DNA, 1129 bp, Cannabis indica
tttcattgaaaaataatttttgaaactcaaaatatcacaaaatgaaatttggcacaggggagtatgcaatgcatactacccgcacgcgcataaggctgaaaatggcggaagaggctgcattacagcctgttgggccgagctagcttggcatgagcttccttcggacaattagctgtttgagaaacctcggtcaagaggttgtcttaacctcgatcatgaccgaggtgttcccaggctccgcgcacgcacatgtagtgcattaggttgagatattttcattcaaaattcaaaaaaccataactaattcaataaaaattcaaattaagttctgtaaaagcctaaattcattaattttttgtctactttccaaaaaaaatactttcaagacgaaagtaaaatatttttcatcaaaagtttataattcgcatacattcatcaaataagcacataaaccaacatgaatgcatccaaatcatcacaatcattgttttaaatccatatttcatgaaagtaaatcattaccatggctctgaagccagttgttggggattattttaccaggatctatatttactaccatgtatgtgcttaacatcctaaatatgaacaatataaaacaatggaattgaaatacatataaagttaaaaaactttacattgattgcagcagaataatatgtctcatttcactcaaatctctaacccttgttcctttctgtcgtaaagtattatcaagacctgagcccgattctctttcaagtgttggattcttcagtcttacacactatgattgagtacttgacttgctatgggtgggcatgtactctttcactataaggctcaaaatttatcaagaagaagaggaggagatatgaattctatagaaggaggttctcaagtctctagttgtctgacaaaaaatgaaaactagaattacttaggttggatagaatgaaaaccatcttattccttttataggatttctcctagggttagatttaaattatatgacattaaaaaatgataaaaaaaaattggctaaaattacccttgttgaccgaggttttcggcaactaataaaataggattatactattgagctgtaagaaagtgagagaaggatttttac

SEQ ID NO: 233116 - DNA, 3024 bp, Cannabis indica
ctctctctctctctctctctctctctctctctctctctctctctctctctcggcatctcttggaaccaaaagcaacaagaattttcttgagaaattcttgaggatttctagcagaattctagtggtgtaatccaaggtataaccctaagttctctctttagttttttaagagtttttggtgtgattcaagcatgcaaattgttgtaattgtttctgtttgagttagagatttaggttgttctttatttttttttttttgcaattttgtagggtttttctaagtctgtttgaggtggttttattgagttgaacaagttttgagttttgaactaaaacttggctcaataatagtgggttgtgtattttggggttatttctagttctatcacttggaaatggttcattatgatataattaggtatcctagacagtttggtgaagtttagaatcgatttggttgagtttgaggaattaggccatttctgtagtaaaaacggcacgccgtttgtgggaaaacgtcctaccgttttccaggcaaaaaactcagaaaaacagcatgccttttttacagttagggctaccattttttggttaatattcccaaaaattcatttacagcgttttctcaatatttaggttttagtgatgctatttttcgataggaaaacttttagtttcaagtctaagtccccaaaagtgatttagtgtatcacttatcaattatgcgtatgttgtgacttagggacttgtaaacagtcgagcagcagttccactcaggttgaccggcacacctaaatttggaatccagataagattagtataatgatatgcatatatggttacatatttagtgtgtatttttatgaatgcctgttagataacaaattaataatagcggcattagtgtacatagagatgcattgaataccgacagttaaatgtttggcagagtactgattgacgctatcacattggagagtaccaagtataggctgatattatggtcaacaatactttcgtatgaacgttctagactcagtacgtgtgggatgcgggataaggttatgattgggtgtatgggcacctagttatgatttgatttaagttatgatatgattatgcttttcttactgagtctgtcgactcacaattattggttacatgtgtaggtaagggcaaggctaagctgagcagaagtgagtgcaagcggatggacattgtacctatcgggacggttagacctggagtgttcaatcttcagggcagtaggcttattttggtagtcgctaggcgaccatttttgtagttaatattttgtaatactgttgtaatttttcaaatacgggatcctggtttatgtaaaatttacttattttaattaaaggttaattaagtaaagttttaattaaacacgttttccaacaaaccccttgattagcaacgaattgcacaattagctttaaatcataataacacacctaatttagtaggatattacaaaaatattgggaagccctgaagtggatcatgatgtacataaaaaggaccctaaacaatggtataatgttcaacaatgaaagccaatgtaaggaagaggttatattttatgttgacttggattttgtagtcaacattaactcaagaagaagttgtacagggtatgtcttcactgtattgggaggctgtgtcagttggaaattgaaccttcagaaagtggtggctctgtcatgtatagaagcaggatacatggctgcgactgaagccatcaacgaagcattatggttaaaaggtttaccagtaaacaagggttcaactaagaagacattattgttcactgtataatcaaagtgtcttgcatctcatgaaaatttcaatgtttcatgggagatctaagtacacattgatatcaaactgcacttcatcagggatgttgtgctttcaaaacaagttcaagtcgagaaaatttgcttatatgataacccctgtagatgtatttaccaaaagtgtcaccaaggacaaatttagacactacttgaatttgctgagcattcaagactgttaagtcttccttgcttctacattcttttagaccgattgtgatttagtgagataaatcaagtagaattgttaagaattcataaacaactaagacatgtcatcagagttagttagctatgtcagcacagttcaaccaactcccaatctattaatagactctcttgaagctacattactcaattcaacactttccaattctgtccaagaatcgagtgaggagggttgtattagattattcactctagaagtcacttctctcaaagtgaggatctatatactgtttctgtgattaagaggccgaaactcgtattgtatagtgctaacttcaataaagtatcatcattccatccattgaattaagctaagttccatcttttattcaaacatttggtttattactttgtttattttttagcttctttttgggttcttgatccctattattggcataacagttggattaggtgagttgaatcaccatacaattataaatgataatggatttatttttttggattgtagtcacattgggtgtaggaatgatctcatgagcttggtgtttaattgactactgaagctaactttgctattttgcttgtttgaagggattcactttcaaaaaaataaaaatagaatcatttggtttgtgcggtgagggctgctgccaagaaattagagcagagcaaagatataaagctggtcttaaaatttgagaataagatgaatgagattctatctcaaaatcaattagtaatgaaaggagtaactcattcctcttatatatactattatttttccacacattaacgatgttgtactatttaacacatttaaataataaagtgatggagtcttctgaaggagtaattagagctcaaataaatagaaaagcccgagatgaaattttgataaggcttgcactgtgagaagttatttgaagttgattgaagtatactttgacagaaa

SEQ ID NO: 233117 - DNA, 1398 bp, Cannabis indica
ttctggttttattaatgcccttaaccaacccccttttctccctttctcatctctttgaaattttcttgattgtaagagttgtgcttgaagttggaggtgaattgtgtgtgattcttggtgttagaagcttgggatttgtggtaagcttctaagttttcttttgcttagttttatatctgttatttgaagttgaaaagcatgttttgttgttgtttgtgttcttgaatgcatgtatgttatttaggttaaatttgaggtgttttaactaagttttcttgctagttaggaattctagttaatgctatggttattgagaagatttgattgagttttgaatatgtgatctcaagtttaatttttatttttttgagatgaaaggttgtattgaacttttgaggtggtgtttgaatatgtgaggttatggttttggtgattttaagttcaagattttggatggtggtaactcttgttgagtttcacttggaattgtatatttggatattgttcaaagcttgaatttatgtttttaattctgtgttgggatggctataatctgtggatattgaatttgggtttgagtgtgtttttagttgagtttggtgtatgtttgggctggaatttgtgttgctgaattggagttttctggttttggaacccaggcgccgcgacctcctctatgagcatcacggcccgcccacttgaaattctgggtttttcaacccaggtgtcgcgacatgcttggggagtgtcacaacccgcctaggagtttctgggcagttttaatgttgaattttgtttcgttcataacttttcgatccggacaccgtttggggtgttccttatatcattagaaagctcgttctgagatctatatgattatttgtatttgaatgccaattctatgaatatgtgtgagtgtattaaaggattaacccaatttgtaaatctcgagaattgtgactaggattaccagcacttgatcaggagcacccagggatttggaatctccacgtacttgggacatcaggtaagacagtagttagcatgtagagttaagcgcagtggcactcatatttgatatgataattgcaattaaatgagaactgggattagggttattaccctaaagtgagtggttatatggcctagggttattaccctagtgattaatgattttaaatgttatgccattctataaatgttgaagtaaagaattatgcgttcaaggcataatttggttagacttggtaattagaactgagataaaccgttctagggccttattgtaattagacgtgcgagcataacacgtgggtctatatgccacatagatataaataggcgtgtgagcgtaacatgaatgtctatgtcaaaaagacaataagtgtaatggcattt

SEQ ID NO: 233118 - DNA, 922 bp, Cannabis indica
ataatctaatctagagatgttatgacaaaactgataacattttctgtatctgttcgtattagaaactgtcttaaagttagttatattcaaaaaaaaaaattgttaaaaattgagcccaaggttctaattttaccattttggaaaatatagggtatattttatcatttaataaaacagggggtctaattggtaacttttacaaaatacaaagtccaaaatagtatttacccttgtttaattgcaatagtatttaagaagaatattattgtatggaatattagtagtattaatactacttaagctacacatttagtaacatttaatcccacaaactcaatttttaatggtaaaattctctaaactccgggttctgttatgctctccaatattctaaatgccacattatacggctgatgtgtacaataacatacacatggcatattttcatgcacacatcatatatattatttaaaactataaaaatatttcaaaaataaaaattaaaataaatgaatgtttaaaatataaccttcttttatttcttttttatttccttcttcttcatatgatgcttcactcttttagaaaaccctagccaccacccatccacctgaattgttgtccatccatcgcccaacaggccttcctccctccatcttgttgtcttcaatggcggatagtgaacacagaccttcctccttcctctatccctctcatttttgctctctcatcttcaatggcggattttagatctaagcttcgtggcgttgagaattggaatggttgacgacacttcgggctctccttggagtgcaattggatgactttgttttaagtggtcttgggtgatgcaattgcaaaaatggagtctcgtacgtggggcggaggtttgtgtttcgcgaagcagatttggacgtggtat

SEQ ID NO: 233119 - DNA, 1357 bp, Cannabis indica
cgaaaccatacaaccaccagaatgaaaggaggcttcctttccaagaaaggaattcagcaaaaaagccctctgtaattattacgaagctctttttactaaacaagaacttttgaggggcaattgttatacccgaaattcggctggaggacacatgtcaaggtaaagggaatgtgaattggtgaaatatctttttatggaataactcattaattgcgtaagtatcagagtatatttatagcccgctgactgtgaggtgaatagcgaggcaccagagaaaagtaacacataccttagcttgcaataagcaaactaagtgtgaaagttagatcggctcgaagaacaaaaatacgagatgccatctaactacgaggaaacttcctacagttttatccaactaacaggagtgaggctcatatccctggcaagtcagaagagttctgtatacccacgatcgacatatgacacatcttgtcgacctcagaaagaagaatggttccaactcaccgttgggatcactacaattaagtttctgtcaagacatctccagattcaacaattaaagacatgtttaatacacgatatttttgacccagtaaaaatgggaaaatcactgctatatgattttaaaatcatacaccgcatttatattttgtgatatgcaatcagatccgatgattttagggataatggctgtaaacatattttggtcagctttgtaattaactgctgctatgcaattataaatagtggtagacaagatcaaaacaggggacgaaaaaactcttatgaaagaggcctcgaaaaagataatcaaaaatctgaataagagtgactcgtggactatgcagaattttaactgcaaaaccacgtaaaaaactttctgttcatatattattttttatagcttttattttttctatggtgaattatcatcgtgagctcaaatttggctaacaaaaatccgcgttaacagtttggtgctttcattgagagcctctgtgaaaaagctcagaataagccttccttcttttaaagaaagaccttctcctacatggctgaaaatccagagaacattaacaccccacatgaggaaactaaccgtcgttctggaaaagagcccatgggctctagaagatctactaatccgcagtccagaaggaccatccgttccaggagggctcaacttgaggatggtcccgatgctctgaccacacgtccccagagaactcaacccgatgttggtcttagtacgtggacaatgcgctcgaggagaactcggcgtgggaatggtcagaatcccaggacaagggatgaagagctcaaccatggaggtgccaaatctgtgggagaaagaact

SEQ ID NO: 233120 - DNA, 863 bp, Cannabis indica
gttgatgtaagagaattttaccatttacactatgattatattattgattgtattagttattttatgattaaataacttgaatattttctactctttcagctataattactattgactagaaaataaaattaatatataaattcaaaattaaaaaataattaattaaaattttaaaaagttataaggtaaataagtaagaaaaattataggtttggagttaactttggagtattgttcgttggatctaattattaatatttaaaattaattataaataaaagaaatattaattatagtgtagtttttaagaattaatataccatttaattaaatcaatggctataaatgattatacgtatcaataagtaaaatgtacaatacctattgtattagctccctaacttataatattaatatacaaagttacaaacttggggatcccaattaattttacaaatacaaccaaaatatactgtatcaaaagtttcgtccaacgactaattaaactgagcccatgatgtcctgaagatttgaaccctccaggtctaaccgtcctgatacgtacaatcttcatggagctccagactcactgctcaatcagtttttgccttgcctttacctacacatgaagcacatatttgtgagtcgacaaactcagtaagaaaattataaaattatatgatatgacctgcccataaaaatataacatatgacctaccttcgtaacttaggaacccatacacccaatttcaaagtaatcatcactcgtccaacacgtacgagtcttgaacgttattgaaaagagtacaattatctcataccccctgaagcactattaacctctttaccatatgcactcagta

SEQ ID NO: 233121 - DNA, 812 bp, Cannabis indica
taggaaacagggaatcacccaaacaaggcactaaaatggacacgaatcgaggaaatgagtggttcagagaatctgccaaaattggttaaccgattttataggtcctggcaaacaggtgaaccagtttgcaccatgtttccccaaacaattcataacctgctcaaaacatgtccaaaagctaccaaactttccagataacctataatgacctcacacaacatattccaagaaatagaaaccagaaaaacactctaaattaaaaatatgccatttatgactcaagtttgagttttcaaactcaaacttgatcatccaccaccacaaccatcaaatacaacaacaataacttaaaatcaactcaaataaagcttagaatttgaatcatacacagatcaaaccctaacagcccctatatctcaaaattgcttcctcaaccaaaataaaagctacaaaaacacaagtctatgaattctagggttaccttggtttgaatcccacttgaatctgtaacgccccgatttcccgaaacgtcacacttactagtccgtttaaaaccgtttataatagaaacaataaactaatttattgaaaataactaaagcacgagatctcattattttaaaacaaaaacacttgattcatttataaatttttaaacattaacttttacaaaagtgatcgagcaataatttttatagaaatattctcaaaccaaaacgtcgtgacaatcccctaacatgtaatccatgcctcgagctcgccaccctcactgtatagttttgccttacctgcacacagagtacccgtgagct

SEQ ID NO: 233122 - DNA, 1145 bp, Cannabis indica
gtttgacagattttcattccactattcggaaaatcaaataaagactgttgtgtgaggatatggttcctgctgagaattttggagtccattaaatatgttaacctattgatttaaagttccatcataaaagactaccatattgactagagtaacctaatactttctaaagccgttatgcctcattttcttttttgttaatgtaggtacacccgacaaagagtcaataatgtaaactaagcattataagaattaagcaatgttccatacaaatcatcaatagcaacataagtactcaactttttaagtttgtaagcagcataaatctaatgtttgttttagcggtataagtacccaatatttgtaaaactgtaattttcctaaaatttcgtcagtatagattctgttttgaatttattaaaagatcatttgaaagtaattgatactctatgtttctgtctagacccaatagagtctgtactgacgaaattagagaaaaactataatattacaaacattgagtacttatgctactaaaaataaacattgaatttatgtcatttacaaacttaaaactttgagtacttataccgctatttactcttaatataataagtgtaaatactttttaaaacttgttcgtcacatctcaaatctgtcttctgaagtcatggactctgaaaatgtttcagctcggccgatatttggagtgtggggtgtactatgattgagatggctacaggaaagcctccgtggagccagcagtatcaagaggtttgtatattagcattgattagaattttcttaagcatttttcctccttaaagcattgctaactgaaaattaatgtattttcaggttgcagctctcttccatattgggacaacaaaatcacatccgcccattcccgagcatctatctgctgaggcaaaggacttcctgctaaaatgtttgcacaagtaaaattacattttctctaaattgttctcccctttcaaattgtttgacaataatgcatatttatatccttacaatctgttaaatttatgaatactgtgtacttgtgtagttattattattattattattattatttttgtattcttcaaatcaaatatttaactatcctattccttaagtcttgaaaa

SEQ ID NO: 233123 - DNA, 941 bp, Cannabis indica
cacatgtgaccctaataaaaaaatagagacggaaaaaatattttatcttacgattttgttacaattgtaccattttttaactgttaagtgtcaactcaaaaacacgtgttgacatatcattatatcacgtattaaataagttgaagaaaattgtcactaccaatttctgagctgtcacttaatgggcttaattgacatttaacaatcaaaaaatagtactacgacaacaaaatcgtaaggtaaagtacttctgccaccactttttttttattaaaatcatatgtgtaacaattacaaatgttaaaaaatagtgttctagatataattttagtcggattttattttaattgagcttaaattagattgtaaatgatttaaaaattttaattgtttaaaatagacaatactgttactctttttaaagaaaaaattcactaaaaatatgttaaggacattatttttaacattttaattatcagatgatcctttttatcattttttaaaacaggatgtctaaaacaaaatttaacatgatagggcagaccttttttttctttttatactatcctttttttaacctttaaatctattttactacaacatttttatttcacaagcaaagtctataattcaatcgatataaatttttattattttatataatttttgttccaaacttattggttaacacattaaaattagtttagttataaatgttgagaaacatttaaattacacatattttacacattatctgtataattaatctcaactacaataaaatgtgatataatacttaaaaatatatatgaataatatttaatacacattattgtaagtaataaatgtgttttttacattctcattatttatatatactatataattgaagctaaacactttgagcatttggttgccatgtgtattgcattaatcaaatt

SEQ ID NO: 233124 - DNA, 1132 bp, Cannabis indica
taactttaagtatgaacatcttccacttttgctttatttgaattatggggcattctgaaagcttttgtccgcgacggttcgaggttagagagggtcagataatcaaactgtatggggaatggatgagagtgagacttatacgtagaaagcacatgatcggagctaaatggcttaagcagtttaatgctgctttggacgaggtttctacaacaaaaaatgcggctcgtggtgaggtctctcaatcgacgatggcaatggttgaggggaattatggtgtgctggggtcgagtccgatgatagtggaggaaactttagttcaacatgaggcagggataggaacatcaaaggttgttaatggggaccctataattatggaagatattttaccagctgctatgcataaggaattatctgaggatatcaatgaggaggcttgtcttttggttcttgacacgaagaggagaagaacgactttggaaggtactgatggggcccatgggagaggtgatgtggcaacgggcgaagtggtaaatggttcaaagaacttgagtttggtgggtctggtgtctaggcccaccaatcattatgaataatttatcttagaattgccatgggcttgggaacccatggactttacaattccttaaggatcttgtgatccaaaagaagcccaatattgtgtttctctgtgagactctatccaatcgttctcagatggagagagtgtgtgtgacattgagttttgatggtatgatagtcgtagatgttaatggtcggagtggaggtattgcgttattatggaaaattgaggaggaagtgcctttgcttgggttttttgatgcttacatagatgtgagagttgcttctgaatgtgtgcaggaatggcgttacactggtgtgtatggggaaccgaatagaagtaggcgtgcttctacttggaatctgttacgtactctggctaatcggtctactctatcatagtgtgtgatgagtgatcttaacaatattttatctcatgatgacaaaaggggtagtaatcggtatcttctagggatgcacacggggcgggggaattagcggggagtgctctccccgtccccatccccgttaaggattttaatcccccatcccc

SEQ ID NO: 233125 - DNA, 778 bp, Cannabis indica
gagattgcggtttatgacttgtagggttcttgtccttttatcaaccttcaataaagcttccatttcagaaaaaaaaaataccctgaagttttatggtataatttttcatttcaaatgaagcttagaacaataatttgtaaattgtaaatgtgatcgtattaggagcaacttctatctatgcaatgtttgtaatttacactttagcaaattacaaatctagagagataggtcgtaaaaaaaattagataataaagtttaaaataatattttaaactaaaatcttgagccaaataattggtttcgtcctacctgtaccacaaaccaacgaaaacaaagtaaatacaatttatatatttaaatattttttttttccaatttagatctgttttaaattggattttgacaatatcatccaccatacaatccaatcctaataaagttgagttattcaaatccaattcaataccattgtaataccaattttttgtaattaaattggtgtagaatctttcaatgctacttagggtgtgcataaatcgatctaattctattatatcgaccaatccaatcataattggacgccaaacattgaatatgcaattgtgatcgaatcagatcggatgttattttttaatatccaattggtcggatcagatgttagatgaggtgtttaaaaattcaatatatataatattcaattaaattaattagtattttcatttagtttagacaaataattaaattttatattgttgtacgtaaaatatatatataaaaa

SEQ ID NO: 233126 - DNA, 1381 bp, Cannabis indica
ttagggcataaaatccaacagatgttgggttccatgggactggaaactggtttagtactaaggtgatcagtatcttttaaaagttgtatggtgaaaggtctttaagagactgagatccccttgttgcaacgtgaaatttcaagaccaaggaagaaatgcagggttccaaggtcttttagtttgaattgagcatcaatagttgcaaaaaaatcttttagagccacagtgttgttggtggcaactattatgtcatcgacatatattaataaggccatgaatgtccctgcctggtgtttgaggaagagtgagttgtcattttttgactgtttgaacccttgttgaagaagtgtgctactgagttttgcataccattgtctggatgcttgtttcaatccgtacaaacttttctttaatttgcatacatcattagggggtatgacacccttaggagtgtagtcttaaggcaacttcatgtagatattttcatttaagtcaccatgtaagaaagcattgattatatccatatggtggagatgccattttttgattgcagcaagtgcaaataggagtttgagggtgttgaattttgctacaagggcataggtgtcaaagtaatcgataccttgttgctgagtgtaaccttttacaaccaagcgaactttgtacctttcaacagacccatccaagttatatttagtcttgtaaacccatttgttaccaatggtatgttatccttggggcaatgggacaacaatccaagtttcattggcttttagagcatcgatctcactgtccattgcattgttccacactttagttttgcatgcttgtgcaaaagtggttggttcgatgaaatgtgcagtagcaaggacagctgctcaaaaagaagctgacagtttgttgtatgataggtagtgtgaaagagggtgatgagtgcttggggagtgaatggccatagtgtagctgtagtcctgcaaatatgcaggtttttgaagaggcttgccagattgagttgaagtaggtgttgttgctggtaagtttgaagcagtatttgtgtctgttgtggggattgttttgtagttggggacaatttgcttagtttgattatgaaattttttttcctggtgaagaaaaatattatatcaaatttaaatgcatatatactgatgaatgttaaaatataacaaactccaatttaaaaatataatatatatatatatatatatattactacagtaatgtgattttaatcgagtcaaaatcaacccatactaaaaggaaaacttacaaaaatactgacttttttccttatctttacaataatactgccacacggcttttttattgcccaggcccgttttttttctttcatactgtccag

SEQ ID NO: 233127 - DNA, 951 bp, Cannabis indica
gagaacaagtttgactagtgtatttatatgaaaattagtaggagtcgttatatttttttttgtcctttatgtccacgtcattttacttgctagcagtgatttttcactactatacaaaaattttttgtctaccaacttcaatatgaaggatcttggagaggcatcttttattctcgagattgagattcattgtgacaagaatcaaaattttcttgtcttatctcaagaagcttacattaatcgtgtgcgcaaaaagttcaatatgattttatataaggctggtgcttttcctattctgaaagggtacaagtttactaagcaacaatatcctaagaacgacttgaaaagagaaacaatgaagaacatctcatattcaagtgtagtagaaatttttctgtatgctcaggtttgcactagagtacctgacattatttttgtagtcaatgttcttaggagatatttatttgatcctagacatgatcattaggttgcttccaagaaagtcataagatatttacaaagaatgaatagtattatgcttatttttaagcatgtcgagaaactctgagttattagttattcatattcaaattttgatagttgtgtagatgatttaaagttaatttttagctatattttcactttggctggtgtagctatagaaaagtattaaatcaactttaatcacatcatctactatgtatgttgagtttgttccatgttatggggcatgtttgtaagctttgtggtcaaagaattttgattttagagataggactagttgattttattttctctcttatactaatctattgtgataataatagtgttgctttattttcaaagaataatgagattagtagtgcttccaaacaaatagaaattaataaagtatctcattgttagaaacttagtcaagaaaggagacattgtgatagaatattacaagac

SEQ ID NO: 233128 - DNA, 1490 bp, Cannabis indica
tttagaatttctatatgggtgtaatgaaaaaaaatgaataatattaaagtgtatagataattagcatcaaatatcagttcaaatattaatgggatttgttttatttttatttggtatatataaataatattttattattttattaaatataaataaaaagtcacccatgaatttctcataaaccaagaattcacttatataagcacactttatatagaatagatataacatagcctgccttgtacccctaattgtttcatcacaacttaaattccgatttattaactcaattaaaaaccactaaaggacaaagaatcatatggcaaatgaccaatttgcccttgtctaaaccaaaaaggattcttgccacctaggggtattttggtcaaacctaatacctcgaatactcccgatatttccaatgtctaactaaattgccccgctattactaaaatactaactcataagaaaatgtaattctattggccaaatgtatttcaatattaccggacataaaatataaaaaacatgaaatttcatacctaacataaataacacacttagaattcaaatatatcaccataaattcataaatcataattaaaagtctaattctgaattaaaccctaataatctactaatttgtcatattaaaaattaagcggtctatacaagtgctgtagtgttgaggtgcacctacctaaatttgaaaaaaaaaatatttttgatacttttcccatacctttttttttaattttttttccagctatttaaaggagttggactttcactactatttgactaagcaattagagagtacccgttagagagaataaaaaatgatcgagaaggcttttcaaaggagtttttaataatttcttctccttattttccacttatgttcttaattgatgtatgtcgaattgttacgatgatcaagagtagctaagcagtttatgttattttccaattttctatgtattctattttattggtacttatttttatttaattgtttggacatcgattaaatatttatgattctgatacgagatctaagaagtgagtgtgctatagtgaaatagaaacaaattttgatataggacgagagtacctatgtagtttggatagcttatagaatttttatgtttaatgccttttacatattttaattttttatgaaagtagaaaatttgcatgtaattgggatttatatatatgagaagactataaattacttgagtaaacctgctattgcataaaaattggtaataaaaattaatttatgttagaccataatatattgatacaattaaaatcaataaccctaaattctaatcattgttaattcacatattgatttacttgcttcctgttttttattattgtttttattatttttctagtttaattttatcttaaattcgaaataatcaaataaaaataaaagtttaattttaaagtacgtaactacaatttttgtgggatcg

SEQ ID NO: 233129 - DNA, 733 bp, Cannabis indica
ttgccaggcagtgcaaaatgcgctggtaaaagttactgttactaatgcagttgcagtagcgaactgtgctgataaaagtgacatttcttgtagtgctccttatgaattatttataatatgggttacaaaattaagaataagctcttgaatgcacaagaagtgaaagtggcaaagcttctgctctctaagtgataaattttgcatccccttcccagatcaggtgggaccccttatatagggaaagggttggtctatctcactttagaagacgtgacttagtgctaaaatatctcaaatactcccttgattttcaaaagtggtttaggttcgattcttgcggtaatattccactatttttgtgggtttataaccacctttaaatttcatctaggattggatgatgctgagtgtttgacgtgtcagactatgtgggggtagccccctagggtgtagcctgattggccgaccctataggagtagtactcacctcgtggtggtacccccgggacatctcccccttgctcctcatgattgtctttattgcttagtagtatgtgatcttgatacctataccaagtattgtattattcatgttatacataagtagggtgggataccaagatcgtgtagggggttaaccccctagactaagatatcacccttgcatagacgacctaccctttgcgggagggggaggtgattgtctaacccattttaggtggtagttacctat

SEQ ID NO: 233130 - DNA, 1374 bp, Cannabis indica
atagtaaattttgtagtagtgttataacagttggctttgacaccaactcaaagagagccccaccaacatatataaataaaaatacctctactctcttaagtaatctccaatgctcatatttcagatttcaaagtcaagtctagagagaaaagtctaagatcacaatgagtgtttgtgtggagggatgtaatgtgagtatcactcttgaagtgatttccttcaatgtgagagatattttttttgtaattgtttactgtgttgagttgtaatcttggacatatctactcgtgtactactgactattctatcaataaagattcatgattcatgatttattcattctcgagctaagtttattcttgtttcatctaagttcagttttaatttgtgatttgttctaatttaaattgtgttttcttaaatattattactgctgtaacaattagattttgaggatgatcatttaccacactatattttcaaagagttttccaatgtgttttagctagtactattaataaataggcaatatttaaacattattattataaaaaattacatgggttttgtttctatagtgtagtataaaaatcaactagttgtgtgtggtagagggttgattttctattcaggttgtgtttctttttctttttcttttcattgtaataatagtgtttatcactcttgttctttgtgacattggctttagattgtttttgttagaatctgtcccttcatgtttcttttggtgctttgcatctctttgaatcctttgaatcaatatggattgtcgttctttgatcatttccttatgagatttgtatgattttatttcagctagttttttttctttttttcttttttttttttaaaaaaaaaaaatttaaacatttatatattataatgcataatttgagactagagccgaaccttcaacacacacctatcctgttctttgaaataaattcattcttttaaaaaataaatgtacatttaaatatagagaaatttgcggccaaactcctttaagttttaattagtatacacttaaccccctgttctttttttttggtggtaaaacccccttaacttaacttctgtttgcaaatctattgtatcagttaaatttcagtgttaaatgccaactaggacaccaacttgtattgtcaatgtgtacatagatacagatggcatgtttttattggtctaaacaattttaattattttaataacttttattattttagtaattttcaaattattttaaaattcaaaactaatattattaattgaaaaaatatataatatcagatttttttgtttccttcttcactattaacgacagacacaccaccatcaccattaacggccacc

SEQ ID NO: 233131 - DNA, 1336 bp, Cannabis indica
gttaatttgaggtgttagggttggttttgggttttcctgcactgaaccggaattccggtttagggggacctgtagcaaccggtcgaccgattggtccccagaaatcccaccaaattgaaattcaggtttgggaatcagtctaccggttgggacaattttggaaacccttgctttcctatttttgtgatatttagggtattgccatgttttttatcgataaggatatttctagttttgattctaagtccctaataggtgttatggtgtatctctcatcaaatttttgaatgttatgatatagggccctgtgaaacatcgagtggttgttccattaaggctgaccggcacacctgagcacgaaaatgaggtaagattagcataaagtatatatatgtgaaagaatgcatgttattatttgtttacactactagcactgaaatagatatagttttaagggtgctagtacagtgtaggattttaagagagggtgttaccaacatgagtaccagagggtacgtagtgcgtggggtataacactcggtaattctcgaaagtatagtaatggccctaccaacaagagtacagagtcaatactctagtgcatgtggtacagtggtcggccctaccaacatgagtatagagtgagtactctagtgcatgtggtacaatggtcatacttctgttgagaacgttcttaaccatttggtgagcttagcatttgggctcaggacggctttagcacaaagccgatattgcattgtttatatatgttttatgcatatcttactgaatctgttgactcatcagtttgctaccatgctaagctgaaggaacaatgagatggggtttggtaaggattgtacatatcgcagtagtgcaacctggaaggtttcgatcttatcgcattttgagttttattctgttgttgccctgtagtttgtaaaaaaattatattatgtagctatatatagtatatgtattttagacaacaatttgagactcgtgattccgacttacgaggttttataaataaaataaaataagtttaaatctgatttagtcaattttcaaatatgagcattacaaaaagagtctaatatgctcatttggatgagaagtttctattaaaaaagtactttgctagaaattctaaaagacttgataattcgcaaagctatttcttagtaagttcccttagatcttagagatagggagaaataagcttttggacaaaggtgtagtaccttttgcaagtcatggtgatccccactaatctacacttaaggttgtgagtgtttctatacatattatcgttcttctacttttcttatatata

SEQ ID NO: 233132 - DNA, 813 bp, Cannabis indica
tgattggttttagttttgtttgtatattctttaatattgttactgctctaacaatctattttgagggtgagcattcagcacaaatggtatcaaagctcagggtttagagttcaagaatcacattcaaccaatcaagactcatcttcaacattctaagaattaaactcgaactttcaaaaaccagattcaagcaatcaagaactggtttgaatggcttcaacaaggtttgagtggacaagttcaatggttcgaatgatttcaacctatggagaattaaaatgaaggtctttctagttcactaagggatctatgagacacttaatgatgaagacataaaattaattaaagacaacaagaaaaaacttgagattgaagctaaagtacatagtgtcatcctcctcagtcttggtgatgaggttttaagggaagttttatatgaagacaaggccttgggtctctcgaacaagctggcatcaatttacatgaagaaatctcttacaaataagttgtatctcaagaaaaagttgtacacacttcgaatggatgagtcaaagaaattgagaaagcatctagatgattataataaaatcatcttattagaagttgtgcaacatttaattccacagttttattaccttgtctacacaattctctaaaaacataaaagtagtaagatgtgataatgcaaaggagctttatattaaaacattttatgttcaaaaaggcattcaactttataattcatgtgttgaaggacctcaacaaaattcagtagttgagagaaaaaatcaacagattttaaatgtggctcgt

SEQ ID NO: 233133 - DNA, 1074 bp, Cannabis indica
acttttccttctgtttgtagtgatgtagtctactttattttattgcaaaagctcggtcgatgttgatgttgttcagattaagggagtagaattagaatttggtgaaattgagaaacaatagtacctgtggattgcttgaaagtttcatgtcaattggagtttaggtgtgacaatttccaattaaacaaacctgtattaactgctgagttgttctgtcttcctgccttgtgtagtttatttatttttttcattccatttgtttgttggggttaagaataatgattgttatacaccagaacaaaacatgtgtgcttttcacctattaagaacttctaattttgctaatggaaggaataacagtgagtgtgataatgaaataacacatgagagttagcgtaaatggttaaatacattatgtttcggctgatgtttgaggcacatctacttacctacatctacatggtagttggtatagggagctcaaatttaaaacaataatgattgattaataatggaattacaacactctttttttcttacgtatgtctgtacagcactaattatggttgtagtctattgattcgcatgcttctgctgccaaatgaaaaaaaaatcttggatgaatgtattgtaagtgttacactatgaacacagtgtaaaggcttattagtaatttgtaaatggcgtgagcctataaatgtgtaattggatagtcattaatggatatggattgaaaaaatagaactttagttcatttgggagattgacactatttcgaagagtgcacttggagattcgtccagtctcgaagagaactttgtaaatgacagtgtaatagtcctttttgagacaggacaaatctccaaacgcactcttcgcgacagtgtcaatgtcctaattaaaccaaagttctattttctattccatatccaatttactaataagcccttacactattttcttagtgtaacacagtaagaggctgtttggctttatagtttaaaaactattttctgttttttaaaactgaaaataatttttaaaaactaataggggtcgtttggtaaaattttt

SEQ ID NO: 233134 - DNA, 1226 bp, Cannabis indica
tgaccttattgcaaaatattattctgttcctagcacctgaatttagcttaaagtaatagcgttatagtacgaattttttaccgaaaaattcgagaccaagctcaaataagagtgacacgtggactcgcattcttttaggactgctaagctgttaagaaaggactcctcaagaataaacatcgcctgaatcaaactcacgagaggatgtgaccgtgatagagtttagtcgcattattacgcctcgcgtaatataaaataagcagaacaatataggtcgtgcatatactgagatatatgtgatgactaagtagccttctcctgtgacttagtaaagattattctttacatatcgaattggtccaaatgacccaatgtaatcgatgactcgataaggactcgcatgtcctatgttatcaacgttgataaggtgtccatatacaaaactcaactaaaacgcagataccttaatacgaggtctgttagcctcccatagaatgataaattgcaccctaaacctgcgagcttgtgcgacaatatgaacaggtaactcgcgctatggaagtcacatgttgttgtatttagtgaaacggatttaaactgttcttcatttattcttttacgtttattataatttaatgttaatatttaatgtaaaacggttctataaccgattaagttctatgtatctaaaatgacacttgctttgtatataaaggagtgatccaacataaataaaccaggacaaaaatcctttgcaacaacggactaagcagactgtgatcaggctgaaccactttacatatttgtgttcattgtttttcctgcttttctattgtctgggcagtctcgtttgaatactcgctattttaggttgagtactcactacttttttgttagatattaattgtttattttctatttagtgttgtctaaatttctccaacaacaaatagtattagttagtagcacatctttttcttacaaaactatattatttccaaggaagtattttttgggaaatttgcggtaaaagtctccaaaaagtttattttgatgcagattaatccccaagctcgataaatagcactaatagtccccaaggtcatgtttcttgtaagtccgttagtccttattttaacggatccgtttacttatttaaaaatgccacgtgtcgaaatattattggatcgaattataattttgatttaataaatattaaaaataaa

SEQ ID NO: 233135 - DNA, 3831 bp, Cannabis indica
attgctctgccttcactccataatttccatgcctatatatacatgtatattatgttatatttttatcttcataagaatgactcacacacacataatatatatttatattctggagattcaatgaagaaaaaaagaaagaaatactcacataagcaacaaggcttcggtgttgctcctcatgatagaaacttgtgttcttccttccactaattatctccaatatcaaagataccaaagctaaagacatcagatttctcagaaaataatccactcatagcatattctggagacatatatcctctgcagttgattgaaacaaaaatatgtttatcaaatgatttatcaaaaactgtacttataactaatctttgctcgtattacttacaatgttccaacaatcctgtgagtatttgcttgatctaatgattcatggaaaattcgtgcgagtccaaaatctgatatttttgggttcatatcctcatccaacagaatattgctgactttcagatcacggtgtattatccttaaaaaagagtcacggtggagatatacaagaccacgagcaacacaatgaatgatgttatagcgggtatcccacttgagttgttctctttttcttgcatctgatgataataactaaatcagaatccattatagtgaggtaatattgtaggagtaaatgttatttatagtgagatctagcattatatggcaaattatataatagagcaagagaaatttggctaagaaaaacaaaccaaaaataaaagtatccaagctcttgttgggcatgaactcataaattagtaatttctcctcattctcaatgcagcaacccacaagtctaacaaggtttctgtgctggagttttgagattagtatagtttcattcttaaattcttcaatgccttgtcttgagctacttgagagtcttttcactgcgatttcccttccgcctggtatttttccctacaagtttctcactaaaataagtcattgaaaaaatgaatttgtttctctcattataaattaagaagcaagtaatgaccttatatacaggaccaaatcctccttctccgagtttgtttgatatgctgaagttgttggttgcagctaaaatgctaccaaagtcatagaaaggaagctggggttcttgcatctgagtcgaaaattgaacaatgtttcctggattgtctggtgactgaatccaattgatcaagtgctttgcggtctccttacttttgcttactgtgattttcaagtcagaaatcaatcttagatttgagaatggtagaaattcaaatcagttatttttatagttaccattgtgattagctctccatctgcaaaaacaaaccagtagtacgatgccaaatatattgcgctagaagaaatagttgcaaggccgataattttgttcttactaatctgtccatctgaaaaaattatttgaaagaacgtatacaaagtagataagtatgagaaaaggaaaaagaaataaagacatgcatttatcttattgaagaatttattttctaaatttatctacattctcaccaagttctgcatttgcaaggcgaagaaagagatcttgcccaccataggaaaactcctgaatatcaagcagaggactttttgttgaccaaaccaagcaccctattccattgacataggcataagctaagcaagaacaattctcaaggcaccatattaggcaattatcaacacccttaacgtctaaatattcataaaaatctggaagttttgtcattcccatcttaagaaaaccatctgtttttcctccttgtgacgatgaagatgtcgcgttttgcagacacagtaatttagtacgtctcacacaccctcctgtccaatttcccttgctccattcgtcatatgattttggttcaaatcctttcaaacacttacaaataggagattctgaaattttgcataccccaaaaggtccacaaaccccataaacgccacattcattttctggtcttttccatttagtttcccaaatattacttccactatgtttcacctcagatgtcaacacaccatttgatgaaatggaaactttcaagacagctgagccattgtatcggtccacaaaatgcaaataagttgttcccatgtcaagatcttccacgagatgacagtcactagagtatgatgaatccatgtcaggtgaaccaacgaacttagatttatcccaaggcccacttctccagtaaggagttgatccattaatcaagatgaagacttggggtggagcctgttgggaaactttataagagaaattcccaagtgatggattgctgtcacttttccacgaggtcaaaacaagattctcccctgttttgacattaaagcccagcactgatccaggtaagaaagtattcccgggatgtttgaagctttcccatgtattctctccagatatgccatctctgaggaccaagtttccattgtctaagagaatagcaagagaactactatttgaagggacgacagcattggttgaccagatagagttgaattttccatccaaaagctctaagtttccatttctggcaatgtttaaagttgctgaagtgtctgtagctgcaagcggattctctctgttagccacccacacaactgcaagtggagaaattcccttgtaccaaatacccacatattgctttttaggcttatcataaggactgaaaaatcctaactcgaattttaggctgggggatattagagtctgtccttgagccaatgattctgattgagttatgttagaaattgcataggaaaactctagcggaatcgagtagaagagtatgaacatacttactgacacaatccggtctttatttttcacttccatctggcttctcagtaagagaactactgtaagtttttcattaacgtgcagaaacagagtttttcaaactagaactttaaccaagtccataattaagatattcatatttctactgaagtttgaaattttcaaatcccttccttatcatagttgtcatcgtttgttatgtttattttatatgcatttgggattgatattgagtttagactttgttacatttactgacaataaaaaaataaacgagtcatccgcactgcttcaaacatccttttcactagacttgtataattagaaaagttgataaatattataagagcgctacttacatgtaattataagaataaaaaatcatacacacatccatatatagatatatatataaatatacattttaagatatgactggactgtgtcaattgacaattgttagtttccaaacacaatgagcataacaaaaccactcaaacaacaatatgggtggtaaatgctgacttggtattgtttagttgttataactatagataatgcatggatagaagattcttcttgttatagcttttcgaatcaatcttattgatcctgatgcactgcccgataagccctgtcccagcacccaaggcatattttacaaggtttacttccctgccatcagttactgttattatggctgaattattttaataatctcagtttcttatgtttgccaaatagcactctaccagaccaacagaagagttttgactcgtcataagaactcaatcggtcaaacagttattattattattattattattattattattattattattattattattattattattacaagagcattcctatttgacactgtgcttaacaccacaccaacactgattggcgcgtcaagagaagttagcagttttaattatattattattaaattcaaatgtctgtgattcgatacttaa

SEQ ID NO: 233136 - DNA, 625 bp, Cannabis indica
aacagctaacctgatctgcaataataccaataagaagctttgaagttattcccttagctgttgatgtcactgatatagctttaactcgttggtcaataatgggagcgaatctagggtttcgatgcgcccccaaattctcagaattcgaaaccagaaagaatgaaatcgctaagagagagaagaagagccttatacaagttattgacgttttagaaatagactcgatcgttcttgagttttcttggcaatcggattgttgggcaattgcgaataataaaagagggagaagagtcggtcaatagtcaatggtattttttgaatttaacctcagccaaaaaatattgttatttttgaataaatttttttttaaaaaaaactcacccaataatttctcataaaccaagaattcggttatatagccacactttatatagaatagatatagtggattatagtaattatctttcaatgattttatagatatatttgttgcaagtataattagtttttcatcgatcatgtcagatactttttgtgcttcatcattgacaaagcgaccccatatgattaaacaaattaacttaaaatttaaaatatttgattaattagtttatataatataatt

SEQ ID NO: 233137 - DNA, 1588 bp, Cannabis indica
gatgtaaatttaatttgaaatgaaagtatctaaattattttcttaatttttcagagttgttatgtttaatgctttcttaatgatttaacttgccatagaaatataaggagttatcatttagattgagtttgtaaatcttaagcagattatgaactattttgaaacttgtattgaataagaagaagagaatttgagttctttcattataaagtaaaagagtggatagtagatgatcataattgtcctaatgtctttctcattgttattttattaatatttttatttcaattgcttttattttatttatttgaaaattttgaatattatttgatcaaatagaaataaaaaaatgattgactggtaattggtaactcagtccttaaggacgatacttagttttactaattttattataaattatgactgtgtgcacttgcatagaaaaaattttacaacaagtttttggtgccgttgttgaagactaaaatattatcaatattagtctaattaatctttattctaatttaatttatttttctcttatttctaacttgtttagttgctcttcttgtctatctcaagtgaagtttttatatgcgtagcaaaagaggagccaacaatcttgttcatttgagtccgtagattgaaaagtcttgtaagcaaaatagaaagaataagaggaaaaactagaagtctgtggtgatggcacaaaatgatggggatcacaggaatgatctcattcctacaattataaaagagggttaggctcagaataatgttgaaaggagcttgagagactatgtactgcccactctgacgaaggtacaaaattgtataagaccaccaagggttgaagccaataattttgaaatcaatctagctaatttacaaattgtgcaatcttttattcagtttagtggattatctactgaagatcctcgcgctcgtctatctaattttttggagctttatgatacttttaaatacaatggggtgagtgatgatgcaattaaactgaggcttttctcattttctttgagggacagaagaaaaagttggtttagttctttgcaaccaaattctattgttacctagcaagatttggctcaaaaattcttgtctaaattttcctccatctaaagttgttaaactaaggggaaaaattaataatttttctagaatggtggagaatcggtatatgaagcttgggagcgatttaaggaactggtgaggaaatgtccacaccgacatttaaaagtggatgttagttcaaagcttctataatggtttgtgtcccacaactagaactattattgatgttgttgctggagaaacattcatgagtaagagtgcaactggagcctatgaacttctaaaagatatggctatgaataatcatcagtggtcttatgagagagcatctaggaagaagaaaacagttggaatgtatgaattagatgcgaaaactgcgttgactgctcaggttgcaactatcactaaaaagttgcagcagacaactatagttgttaatgctatccaagctcaatctggttgtaaaatttgttgaggtcatcaattgataacattt

SEQ ID NO: 233138 - DNA, 1992 bp, Cannabis indica
ttatctcgcacatgcttatgtgtcagcgagtttgaatatttctattaactttaattaattgaaacgagttatttgaactgcatttaataatataatttaattattataatctttgaattaattgtacacatgtcaacttttggtgaatagccaaattttaagtataacaattgattgatattgattgcacaacattaggttaggcaataaatttaggcttaatatatgcatgaaaaatcaaatttccccattattataccatataatcgttttggatgtatatactgtctttaatgattaattaattacatctttttttcaacgtatttctagaatttgtgtcaattaccatttctacattaatcataataaaaattaatcgttataataagagtattgctattagacaccagtggtgcctagtattttttataggtggcgccttacaattgattatcgatatttcttaaaagttattttttaaagttatatgtgacccgatacttaataacacaaatagaggtatgacactgaggagggtgctaggcacaaacaatgccttttagaaattctcttatgataaccataataaagtaagggtgcttctacaatacacctcattaaaagggatgcactaatgcatcctttacctatttcaacatctagacaattttttaatctatttttttttttcatgtttgtatactttattgttatttaagatatcctacaaaattttgagaaatttagaataatttacaatatatgtatgtggtaactcatcctctaaaacaacctacaactaactcacctaactttaaataactttgacagttaagttagttagttcggttatgaggtgctgttattttcccctggttttctggtagagagatatacatttaaatagcttctccttttcatttctgagcaggagaatagagtgagagttactgagtatgatatcctaggtttaaagttctgtattcaagttcttagggggtcaagaacttagggtgtactcggggtaaaggggtgagaactgtgattgttctctgggagttctcgagtgctaaagagcttagtgtcctgtcatttgtgtttataaactctcttattctccattaatgaaagcaagatggtttttctaagctggagtacagctagggatcattcttaatctctaggataaaaattggtgttttctctcttgttaatttctattcttgtttattgtgttgttcaaatatttgtgattttctgttgttcactttaacaattttattgcaggtttaacatagaatcttggtgttgatgatgccaaatttacaaaaaaaattagagcttaggttcaagatccatactgaggaagtaaaagttcaagattcagtcaggaactaacctgcagtaagccatgacttgagtgacaaggtttgaacttgagaagttcaatggaacaggggatttttgcctgtggacagaaagcctaaagggaatactcgttcatcaaaaggttaccaaggctttaaaacccaaagaagaactgactgacaatttgaagaagaagaacttgaggatataaaagaattagcctattgcactatcataatgtatctgtccaacacagttaggagaaacgttcagagcatgaagatagcttgagagttgtggagtaaacttgaagaaatttacatgaaaccttcactaactaacaagattaatttgttagaatctttatatgattttaaaatgttttctcatttgtctctagatgataatcttgatgcttttaatcaaattattataggtttggcaaacttgaattacacatttgatgaggagagtcaagctgtcattctccttagatccttgcgagctgcataacaagagctgaaggcagtaatcaagtatggaagagatactcttacccttgatgatgttcttggagcattaaaatctaaagaataggagatggccaaagaaaaagacaag

SEQ ID NO: 233139 - DNA, 1231 bp, Cannabis indica
tccccctcacatgaactacccaattgtgaaggcccatttttcctatttaataatagtaaatctaggtcctggtaaaatattccaacagtttgggtcttgggttggcgggattctatgatagaagctacgccaatttccttcccaggttcatctgcaaccatgatagatcactcacaagatctataccctcaaagatcacttctaaggatcgcccatggcaagctacggggttcccctagttttgattggttagaagctcctccaccttagaatccatcgtttccggttccaattgagacttgaagtcttttggaacaaatggaaaattgttggtgcatctaggtattataagtttggaaggatgaaattctaaactaagaagggacattctagcaggaaaaggatgatccattctaaaaatggacagaggtttgtgaaaaatgagaagcttgagccacccttttatacacaaagtccagtgacaagaaagctaagtattgagaaatccgacggttggcagaagagcagaatatgaagagatgattcataatgaccctcgaaaccgtacaaccgccagaatcaaaggatgtgttttttccaagaagagatcttgacaaaaataccctttgtaattattaaaaagctctttttactaaaaagaactttttaaggggcaatttttatatccgaaattcggctggagaacacgagtcaagataaagggaatgtgaatcgatgccattgctttctatggaataaattattaattacgtaagtatcagagtatatttgtaacccactgactgtaaggtcttaggtgaggaatcaatgtacaaactggcacttagtatattagcgagaaaccatatggcgctatatacgaatagtgaggcaccaaagaaagcaacacgtatcaatcgtgaaattccttatcgtacaatgaacaaactaaatgtaaaattcggatcgactcaagaacaagtaagcgaggtgactatcttgttatgcaaagacttcatataacgtcattctgttagcatcggtgaggcttacaatcctggtgagccagaagatagtattcaaacaaacctcgtagagttctttgaggataagcatcgcaattgacaccagacaaacacatcgtcgacctcggaaggaaaaatgatctcagctcacaaaatcactgttgggctttgtgccctaaataaaactttattttaatgtaatcttt

SEQ ID NO: 233140 - DNA, 2336 bp, Cannabis indica
actaacatgttgctaatttaccattcagtgtgtacaaaaggtctggtcgaacccaagaccccgaacagatgaaaaagtatacttgtcaaaaaactagtgaccaagagtcataagtctgctcggtcacttggggggaacctatacctgtacaaaacatttggtaaagataaaacaaacacaattgtacgatgattataaagagagaatgaaattcattaaagataacaaaagcacgtaacactgggattaaaagctgcccggtcagcctgttgtctgtaaatgaaaaataattccaatttaaagaccgcttggtcggtcatgatgtcttagaaaaaggccttatggccgaataaaacttatataaaaaagaaagataaaaagagaagtatttaaacagttggagttccaggctctcggtttgggtcttctaggtcgataggagctggaggatctgttgtttgagcgaaaggaacaccaacattctggccagaggtagaagcagtcgcctcgggttcaccataagccacttgggaggcgcagtactcgagatacatgtctttggcttcgtccaagtaataaaaattttcctgagggttagccttctaaaaatcataaaagatctcgagaccggctgtctctaaggcatgaactttctcttctagccttgccacctcagctgtaagctcctcctccttagtcttcttctcttcttccagtcgacggaagacagtccgaagaactcccctttcctcttgaaggctattcacttctgccgacagggtgccaatggtagcttcaagctggtcggaggcctcgaggtccttagtcaactcgactattttcctctcagcagtaaaatgcttcttgttgacttcaaccagctccatccggacagctccaagttccaccctggcgtcatcagcattcttcctagccaagtccacctccgccctcatggggttggacatggaaacattttttggaggcagtagatttagctcgagaataggtgtaagccaactttagaccagcctacacagagaaaaaactttatagtctgaaccaagtaaagtaggattaaaggaaactgtcaacaaagacttaccctggtgaattctctcaagactcctcccatcaacagctccagggaagactcgttgtcagcaccggccaactgctctttgtctttcttggcctctagaagcactagcaaaggtggagtaggagcccgcatctgctcaaatctgctcttggccagctcggatccaccctttgattgctcaggcctacccgagcttcctcctcaagaatctttggacttagcaacttttggagtagaaggatccgcaatagctagctcctcaaaaaggtcaataacctccccggccggtgcctttccttagaaggggtcgcctcatcgcccctagatttcttggccggaggagatgagcttaagcttcctccaactctcttcttcagagcatcgagcatcttctgagacatgtctacacgaaacaaaaacaacatggttagaggaaaaaggcatcggaagcataaagcatgttagtcaaaaagtttaaaaacaagacgaaatatcctgcgaaacgattgtccgagcaagactcaagagtccatcatcacctgataagtcccttatctccaccatgatagctttcccttttcctagtacgggagaagatggccaagcaagtgaactgggctccctaatttgaatggcatgttcaatgggcttgggttgggccggaagtttctacctccttttgagcggagtcacctgctcttcctcagcctcatcttcaggatccaggggctcatgagcatactgtttggcccttgcacctcccttcaacttagcttcacgcttaagttgaatgatttcatcctcctgatgagctctctcagcctgtccagcaccagatttcctcttcctctccttcactggcttaggattgaaatccttctaatagagcccgtacttcacaaaattgtccttagaggtcaactgaataatattttggtcatccctcgacagttgagcaagcttttgagctctatctctaagagcaagagtgaagggagggcggtggtatatggggatctgcttgaacagagtatgggtggtgcccatgccttccaccatgaagtactcgtcaacaaaacgcccaattttggtaacgaccttatccctggtgcccgtcaaacacttgaagtctggttgagagaaatagaagtaccccgatctgccttgcttaaagggggaactacaaataaaaaaaccagcttacctcatggggaaagtgttggaattattttac

SEQ ID NO: 233141 - DNA, 515 bp, Cannabis indica
aattacttggctacgactcagatgaagaggtcaagaaattttatcctgatatcttaaattctgagtttcctcaaggattcaaaaacccacatgttttgccgtacgatggaaccacagacccagtcactctcttgaacaactttaacactattatgcgagccaagcaatgtcacaaataatttgtgttgcatttaattcctgacctcattaacatgggctacgagcagctggttcaacaaatttactcatcattccataacgtcctgggagcaattgtccaaggacttcaaaaagtaatttcaagtcacaagggatcgacgacctgaagcatcatccttaaccaatataaaacaacaactaggagagtcacttaaggcttatttaagtctctttagcacagctacagcaaaggtcgggaacctgaatgactatatacaactcacgacacttaggcgggcataataactgacttatccacgactggaggcgaactatgggatgatctccagggtcac

SEQ ID NO: 233142 - DNA, 1028 bp, Cannabis indica
ggatcggtttttaattggattttgagattgacatccaataaccgatccaatccaattagaatctaacttttagcatccaatccaatccaattgtaattggatatccaactttttgtaattggattggattggatcggttcgattcaattggattggattggatgatgcccaccccttgcctatcactggaatttggtgcccagaagccccgtgagtgtgccccacgctccgtcgtcctccgctgggacagctcccacgcacctgcgcatgagagcacgtgctgacatctccattggtcagttttggtccgatcattcaattctggttttccggtcgttcagtgctagtgtttttccaatcactttgatttgtggttcacaaggtttagttcttctaattttggacttttgatccttttgttagcctcttcatctttttgttctctattgaattttggttgtgagaattttgattgttggctcaatatctcattttgttcaaggcttgttgtcttaatttgtttgcttctttatcgaattttttggttggtttgttgtttgagttagtttggggggacgaacatagtatttgtaatagctactgaaagaccagttcttgtttctgcatataaatatgcagaattcttacaatatcaaaagtctatctcctcaccactattaataatttaggcaaaacaaatgtgtcttctttcttcaattaccaaatgggtcattgattcttgtgccacagaccatatgacaggtaattctagcctttttttctcatcttcagtctcacgcttctactcctaccattaccttagccgatgggtcaccatctcgtgttattgagtctggtatatttactcctactccaatgcttcatttgccatctgcggtatatttacttaatttttcatttaatttgatctttgtcagccaacttactcgtaatcttaactattgtatctccttttcttactaatcattgcttatttctgaatcctatgacgaagtaaattattggca

SEQ ID NO: 233143 - DNA, 659 bp, Cannabis indica
attcaggtaggattcttaactacttttttttttatttgaaattggctaattaggatattttcacccgaactttgacatgaaccaaattgtacccctgagttttttaggttgttaaaaatttctctcaagactattgaaattgttgaattcaaggacttttgtccgattctgttcaattttactaacggacgtctaatgtgacgattatccatgtactaaatcgtgttctctaaacttccgttcacgccagacgcccattagtaaaattgaactgaagtccttgaatccaacaatctcaatacttcgggaaaatttttagagacactatttggtacatgtcaaaattttgggagaaaaatcctaattagctgttggaattgatgttaacatagagtttatggtttgtgacggcggtttacttattcaggaacctgcttctgttattttctctcttctgaaccttgcaatgaattttcatggctggctatcctttttcattcttgtaaactataaattacctttgaagggagataagaaggcatactatgaatttgccagtttatggcatatctatgggctcttgacaatgaactcttggctctggagtgctgtttcccattgtcggtaagcttttaaatgcctttctttatctatgttct

SEQ ID NO: 233144 - DNA, 1441 bp, Cannabis indica
ttgatttcttatgtttttatttgtgtttagtttaattatggatttgattatgagctaaactctctatttagggatttgatggatattgactgagattattctatggattaatgttatttgattgttctttcttcctctattattgtgatttattcatatttgtgcttattacatgtgtttgattggccaccttatgcatgatctatgatctcaatacaaaatctgaaaagtgagtattgagaatgctctaaatgaatagacataggttttgatgtgaaacaagagtattcacatagcttatgtgacttttagattattgtttaatgcgaattgtatgttgttctatctcagagatgaagcagttggcatgcaatttaggacctttatgatttgaaaagagtttaggttaatttataatctgtcatcacataggaggaagaagaatggttaattagtgttaataattgggtaatcaaagcaattgaaatcatatccctaatttcacatccattgttaaaccttttatttgtttattttatttaattttgcttagtttatttagtttaaaatttgtttattcgattgccaaatagaaaccagaatttaattgattagtacttaactgcagtcttcgtgggaacaatctcacttacctgagtattacttgttaaaactatacgtatacttgcttgttggatttatcacaacattaatacaagtattaccgtcttgttctctcgtgttcgcacgttctcagccgcggacggctctccgtcaactccgacgacggtgcgacagtgatgacagtgacgacaccatccattctcgacgttccctacctcggccaagccccatttgggtccgccttcgtcgctgggttctatcgcagggatgctggtttaacgtcgttggggtcttcgtccctggtttgacgtcactgtgatcttcatcgctggtttaacgtcgctggggtcagggtcgctggtttgacgttgctggggtcttcatcgctggtttgatgtcgctggggtcttcttgaatataagtatacacatcgaaagacaacaacaagtcaagagagttcattgttgatcgaagacatcaaacgaattggatggctttgcttccgtgatcttgaacgatcaggttctttgtatttactgttattagtttgtttttagtcttttgtttaatttactgtttttagttttcacttcatttattaatttactgttattagtttaattccaattagtgtttttatggggttagaattattagttttatgtgttgagactaattaggttttctcattagtcttgtcttttgacatggttattgaatttttccctttagttttttctggttcgatttttgttggttcttgttttctttgttgctttcgggattctactattggattgtataccctaaataaaac

SEQ ID NO: 233145 - DNA, 1064 bp, Cannabis indica
aatcacgtaatacgcctatgttagttagggtgttacaagtcccatacctacatagtctcagaatcatcacacatgaccttccccatgcaatgtgggattgtgcagctcccagtctttctccttcgaatcacgagactctgactgtcacacagcttaaatccaagacccagatcaacagttggtaatagaatccaattgattctattataactaacttcaactcaacctactctcgttcttacccctttaaataaactctaagcttgatcaacttagagttgagacattgtattgtacagtgagatttatagagagaacttgaatcattgagagagaaatctgtaatgggagcttgagtaagatcgatcatttctaatctgtgtgtaacctcgttcttgatagtgaattcgacattttaacttttcttgtacttatttattttgatcaccaagtatttgcattgtgttctgtttttagttttgtctattttaaattggcttgctattgctttatgtgtactgcaggttgtgaatttgaacaaatttatatcaaagttgggatacttgctgcatctttaggttatgaatttgaacaaatttatatcaaagttgggatacctgttgcatcaaagttgctttcattggcttcgaaatcaaggtctctaagactcgaggaattatgaagttcattcataatcaagaacttgtttactggccaggaataagttcttatcaagatgtcgacatcaaaatttgaggtggagaggtttgatgggaagaataatatttatttatggaaaaaaatgatggcacacatggggaatcttacactcgaagaagtctgaaagaagataggaagatctttgaaaactaaaaagaaggaataagtgctaaagaaagctacgaacactatattcttagcttgagtgatcaagtcttaaaaaagtgatcaatgagaagaatgctcataaaatgtgggttaagctcctgccaaatcgaatttatacttgagtaaagttccatggattcaagatggatgaatcaaagtctatagataaattcact

SEQ ID NO: 233146 - DNA, 864 bp, Cannabis indica
tagggcacaaaacccaatagtaaattaccaatatcttgttcatgttgaagtagtcttgacaaaccttcagcagaaatcagaaaaaggtagggtgagggcaaccttgtcgcaagcctcagttggaactagaaaaccagttacttcaccattaacaagaaaagaaaactggtttgtagtaagacatctcattataagtgttatccaaccaaaagcaaaacccattttcctcataatctcatcaatgaatttccattcaactctatcaaaggctttgctcatgtcgagctttagtgatgcaactccatgacgcccggtggttttactttttattgcatgaaccaattcaaaagccaccaaaatattgtcagtaatcagtctattcaataaaaaagcactttgtgtttatgagattaccaaaggaagcacctccttgaaccttgctacaatcattttagtaaccaatggagatgacattgcataaactgataggctgaaagtcttgcatacgatgtggttttttgattttcggaatgagggtgataagtgttcggttgagactagaggggtcagcaccgatattgagaatgctaagaacggcttgagagacttggtcaccaacaattgaccagtgttgttggtaaaacatggccgacattccgtctattcccgggctcttatctgcggccattgtaacatacttaaatatattttatcatatctaattttataattcttattaaaattttgaagtctcgtaatataaaaatatttaatcgtcccacctcacttttatttttagcttcgcccttaggcaacaccattcacataatgcaaaatactattaggatttatgctctaaaagta

SEQ ID NO: 233147 - DNA, 1263 bp, Cannabis indica
tcaagagtcatgatcaagaaggcacaggggggtttggtatggcaagtaaccaatgaaggcacttctttaatcacttggggggcatatatgttatgttatggtgtacgagagccatatgttatacaagcattcaatttttttggacatctatgtaagtactctcatgtaatgataactttaagaaaacaatgacgttactcccagtaaccgagtttcttaagacatgttatgtgcaagtgttagtcaaggggtaacagataaagttgaaaaaaaagtaaacaagtattggaattgaagttttattaagttggaaataatttctgatttaactaaaacaaaattctaatcatattctactaaggcttatccacatggaaaggtcgcctagaaaacaaccaactaacacactaaagttaaaagctaaaaacaaaaaagaagaatggactcaaagaaggtcttggaggctttgtcacattaacaagagtctcctccctgcctttagtcttcccaggaggtgcctcaccaacacaaggagggatgtcgggacgcttagggttgtagccttcaactcttgaagtttctccgacaactggtccgctaacatttacagtgaagtcaacttcttcaaaggattctacagcaaagcacttccaacaccgctcaatgaatcctggaacttctttcccagggaaactagtccagttgaacgattgacacctactattggcaaccctagttgtgtaaatggcattgaagcataaatcattgtagaacgtgacatcaagcatagcctatttttcaagactgagtggagacaattagagatatgaccttgaattattaaaaaaaaacttttcaaaatcacctttcaaatgattaattttttcttttaaattttattttatttatatgggtcaattaaattgtgatacgtatacatttttttgtccacatacagtctaacatggaattttgccgcaattcacaatttctaattttacatacaaagttgtaattcaattcattttagcctttataaaattatggttcattagaaattttgtctaaatttttacatgtgccaaatcatgtcgcttgaacttttctggtcgttaaaaattctctctgaactatcaagattgttagatttaaagacttttgtcaaatttcattcaattttactaattcagtgattatttatgtactgaatcatgctccccagattttcatatctaccaaatcatgctcctcgaactttgacat

SEQ ID NO: 233148 - DNA, 925 bp, Cannabis indica
agatgataattgctgaaggattaaactctactcaatttggctctgacttgatctggatggatcaatagagagatatactcaataaagtccaaatatatgcaatacgtgtcacctatgcgaaatttgggataacaatcttatttctagtctactcatttcaagctacgttactgacttgactgttagggttcctttggctggtaccacccagtgtcccaaagattttatggtttacttcccctttgttgcgtggagcttgtcggtgcctacatctacaaatatactaaaatattaggaggtgtataatatatatagatatatagaatattttcaatagatattataatgattactaaataatttaactataattaattttaaaaatattaaattattaaattttgatccaataacaaatagtagaagaaaattttgaaattttatacttaatttaagtaattaattaaaaaaaatcaaaaaatatatttttttacactatataaaaatgtataaaatatatatatatttacactgtatcatatttatatatttattaaaaaaaaaacgcttatataatatttaaatttattaacaaattttttatcttcttttttatttatttctttcaactgatgaaataatcttaacacatctaaaatcgagagatttttttattatataaaaaattaagataaagtcttaaatttttttaataatacctatttatgagtaataggaagtatgaaagaatgccataatgacccttagaaaacttaaaatactgtttaaatatttaatgatcttactagtggatgtggttgtgatgagtcaaactcgacgagaacacccaaaaagagttattagaatattggatgttattcatcaaacaccaaatatataagttgatttacaaaaaaaaaaaaaa

SEQ ID NO: 233149 - DNA, 417 bp, Cannabis indica
tagacagagagggttctcccccctctcctgtcttgactatctcagtaggcatgttctcttctgcattttttgtgatttcttcttcttcaagtgcctgaaaagagttcttcattatcgtaccagtagtctcagttgctcccttctctcggttagcagtacttttcctcctatagactttggtaaagccctcttcatctacctgtggctacttcctattgtcttttttaataatccattgctcctgtcctactgctttcttcttacattctgctgctgcagcatgacctacaccagaacagtgtgtgcaagatattggcttccattcatatttgactcctaccgaagtaatcgaacaaaattcattttcaaattctaaaaatgctggtaggttttgatccatctaaacttcaattaaca

SEQ ID NO: 233150 - DNA, 1188 bp, Cannabis indica
ataggggagaaccacatgagaaatatttgtaagaaccttcattttgacaatggtagttacattccctcggttggcataggaggtggtttttgtttgttatggaataattgtgttaacataaagattttaaagaaggtggagtcgggctttgtttgtcgggtgaatgaccacgggtttcagaattcttggcatctttttgcggtttacgggactccctacgctgatcaaaagtctgagttttgggagaatttggcagaccaaataaactcttgtaatggcccctgggcactcatgggagatctgaatgttattttggctaaggaggataaatcgggaggtcgctgctttgcctaccgtgatggctctgttttgaggaatttcttgttctcaactgggggtgttgatatgggttttattggctgcaagtacacttggcagaataaaagaggaactggtcgtttggtgaaggagcgcattgaccgtgtgattgttgatacaagctggttgagcctctgtcctaaaggtggagttcgtaacttacctatcataagttctgatcacggagccatattgttagactcttgtgcttttaggcctagagggcctcgccccttcagattctttgaagcatggttctctgatctttctagtttgagcgtcataaaagaagcgtggtcgagcaaggatcctaatgagaataatcctactttgatgagtaagttagtgaaaactcaaaatgccctcagatggtggagtaagaatgtttttggggattgcgatctccgaatcaaacaaatggaacttgagctccaaactcttcaatccaaagaagcaaatgaggtggatgagactacagagcgaacggattcaagattctataatggaattgtggtctcgtaaagaatctatgtggaagcaacgatcgagggaactctggctcagtcaaggggatagaaattcttctttctttcacgcctctactatggttagaaggaagaggaatcacatttggaatctaaaaaatccgagagggcaactgtgcaccagggaaagtgaaatgggaagtatcctgaatgattattttatggagctattctcttccaagggtgaggttccctgcaccggtttggatgagttaatttctccatctgtctctatggaggataataccatgctttcggccatccc

SEQ ID NO: 233151 - DNA, 634 bp, Cannabis indica
aaaatgtcactaaatcattttgaaaatattaaataaaaaataataaatattatagtgatattttgaagtgtcacaatttatgtttaggtgtcattttaaaatgtcaataaaaattagtttagtgacacttcatctttagtgacattagaatagcttacatttttaacaaatgccactaaaatataaagtgtcactaaatattaataatagtggcatttagaagtgtcactaattaggaattttggtgtagtgtggtggttatataactgatgatgaagtgttgaaaaatgtaaagaaaacaaaggataatgaaaatgataaggcaaagttaaagcaaaggatattataaagggaaagggcaaaggcaaatgatttcagatgaatagatagatgtttataataataaccttttttttggatttatgttcctatgttaacaggaaactagtttcttttggttttattttgtatttggtatttaaagacgatgttatatagttttttagtgttttttttaagacttattgtttagtttaagtggttgtatctttttgtaaagacttgatgtttgaatgaatgccactttgtattataagtttttatttgatgactgatttttttttttttttgaaac

SEQ ID NO: 233152 - DNA, 808 bp, Cannabis indica
tcttattcccaaaataaaggaaccaacatctgtcagtgatttcaggccgataagcttatgcaatgtcctatataaaatcatctcaaaagttttaatcaacagactaaagccttttctctcaaaggtaataagtgccacacagagcgcttttgttccaggtcggttaataacagacaatgccttagttgcttatgaggggcttcatagtttacgaaggcatacaagtgggaaacaatatttcgctgcaatgaaacttgatatgagcaaagcctatgatcgggttgagtgggttttcgtagagagaatgttgctaaagctaggttttgaacaacaatgggtggataaattgatgaaatgtgtctactcagtccggtactcttttcaattaaatgggcaaatttatggggaagtaataccgactagaggcctaagacaaggagatccactttcgccatacctttttcttatatgtgcagaaggattttcagcgcttatccgacatgcagaggaaaagagggatattttgggtctcaaaatagctagacatgccccaccaattagccacttatttttcgcagatgacagtttgctcatgtttaaagcttcagagagaactttagtatcaatacaaaaaaatttcagcctgtatgctgattgttctggacaggtataaattatttacaaaaatttattgagattattttttaagctttagtaatatattataaaatattggtttactgttttgtagatgattaattacaccaaatcactgcttttgttttctcctaatactcctgaaggaatt

SEQ ID NO: 233153 - DNA, 784 bp, Cannabis indica
actctttaaaaatactataattataatcttatagattattatttaattttttagtaacaataactttcagttttaattttttattaaaaattaatgacacgtatttatagaataatataatatctcaacattttatgactttatctattcacctcagtaagtataccttaactttttactagctctaatactaatattcttagaaaatggtaagtgaaagcttatttgaaaagtttgtcagaataatgggcgattaattcgagaatatatattttggaattttataatgagggtgcctcttttaacgttatttgaatattttaacattaataaaaaacaaaaatatttaccaaaattatttttttatttgaacaaaaaaaattataccttaaattattgtacttgtaaatttttatcgcctaaattattttatttggcaaaaatactcctaaattatagtacttacaattttgtcaaaaaaataaaaaataaataattgctgatattaccataaataaatatgacattattatgcatatatgggattatatagagttaagtaaatatggtataaaattagttttaattttgaactaattactattatgaaaataaaattttcttttcgtaacaaaatacgccaccttaattattcctatgtacaaattctaaacactaaattccaatattagatatagattagatatctcttcttggtgacagatgacttgagtcaaaaacaattagtcctcactcgcagtgatagcccacctcttcagcctca

SEQ ID NO: 233154 - DNA, 897 bp, Cannabis indica
tttctatgtaataattccaaaaaaatatattattaatcgaatttgaaaggactatacacttcattccgtgtagctaaggaatggtggatttaagaggattctctactttcatttttctcatcctcttttctcatcgttggggactttgtgagtgttttgtcgatgactggtatttaacatagacgagctatgttgtaggtaattattattgattagattttgagctttcttttaatgtcttaataaaagtactaacatatatatccaattcttttggtaattaggaaaataagagagattgaagatggaaaataataaataaaaagaaatgaagtacatgtactcaaatttcgtctaagatcttgtagaagcaccttatgacagttattggatacaattaggtttacaggaagaaacaagaccttgatggtaaagtttagtgtgacaaaatgattatacttaaatagaaggtgtggattatgaaaaaacttttatcctactagccatgctcaaatcaatctgcatcatcctatccatagtggccgctctcgactatgagatctgaaaaatggacgtcaagattgttttccttaacgaaaaatttgatgaagtcatttatatggattagccaaaaggctttgcaatagtcagacaagaaaaaaaaagtttacaagttaaataggtatatctatggacttaaacatgatttttgttcctagaatattaagtttgaagaaataaataagccatatggtttcaaacaaaatattgatgaaccttgcgtttaccaattaaagaaaactttaacagtgatactcctagccccttatgtagatgatatcttactcatcaaaatcaatattaagaaattataaaaatgtaaaggaatggttgagc

SEQ ID NO: 233155 - DNA, 1615 bp, Cannabis indica
tcactgacgcccgtacttacgccgagcatgtcgccaggaaaatcgcatcacctaattaggtgagctcgtacctacgctcggtactcatcatatatcactaacgcccatacctacgcccagtacattgtcaggaaaatcgcatcacgtaatcaggtgagcccatatatcacatgcacaataacatcacgttatcaatattcaaccaatcagtcttttcattatgtaacaatattaatcaattcataacaatactaattatattacatacaacgtactatggagtacaatatacttttcttacctttaatctaggttcatatatttgggccaacccaaggggagaactatccccgatgatcttggccttatgtcacaacaacgataaaccaataagtgtttatcccaaaacactacgtaatattcacataagataatctaggattttctaccaaaccccacagtataaatacactaaaataaaacttatattttggctataaaatatacaccatattgcagagctcgtcgcaagcttcgaaacagtatatagaatgtccaaaacgatcactgagtcaaaagttatgacaaaaatacgaattctgatctcttagaattttctaaaaactataaaactcgaaaatcccaatttttgcactcaccgaaacactaccaaaacttatccaaatcactccaaacttcatagggcgcatatacaccataaaaattaccatccttacgtaacaaaaataaaaatcgagcccttaaatgaaaaacgccattaacgttcgtactaagctttaaaaagttcaaaactcgatttctaacacaaaatcacctcaaattcaacaagtaaacatcaggactagtcccatgactacccgagataatcctataaggccagaaccttcataactattctaattcacaaaagtcctatacgaaaccaattatttttaaacttaaaataaaattaaaccataccttaagctttctcgcttcaaagatttgctatcctgctactatcggatcttagatcgctaagttttgaattaaaaatcaaagaaaatgaatataagaggagaaagttttatcgaaagtgaaagaacgagagttcgttcattcgttctttcgttctttcattgttatattatatataaaacttaatatatataataatataatattaataatataataatattaataaaaattttattattagtagtaattttattatttcttagccactaagaaatctatattttaagggcatttggtcaatttcgagtatcccaaaatactttgttatttttaaaattaacttatcgtattaattccatcagtatttctaactaaaatcgttgagacatttttggcctctaatcgggtatctagggttaccgaatttgaaaatatttttatttcacaaataagtcatattatatgcacatatttcaaataaatctttgtaattagcaaattacgcttatatatccacttattgagtcttcaaggtcattggacttgaaaatattttattccatatatagctcatattacattcacacatgctatataaatctccgtagttaacaaattacgattatttactcac

SEQ ID NO: 233156 - DNA, 1588 bp, Cannabis indica
tctccaaagagaagatctccattaaaaacatcctcatgtttgtaaccatgctaacatccctccttttcaaggagccaatcctcatgttggtaaccgcgccaatatccttccttttaaggagtcaatcctcatgttggttgttatacccaaaattcggctgtacttcagaaagtgacacatgtcagtctcagagaatataaatcaacaaatataatggtaattatatcattaaatacaaaatagaataactcattaaatgcagaattaatagagtatatataaaacttgctgaccacacagtcttaagcgcgatcagaatgaacaaactattgattcacgtattgacgagaaaccattttgcatcataaggcataatcccaagggagacatagaaaacgcatagtgaggcatctacctcactgtatctaaagaagtattgacgaaatggagtggtaattagaacacttagtgtataatatatattataataactaagtgtaatgacttgagggacataattgttcagtctgcaaggccttatggtcaaagagcagttcttaagtttgcttagtatactagtgctcatgccattactggaagacttatgaataaactaagttgttcatgtactaggcgagatgcctcagcaagatacatttggcagtgtgtcctaatccacgtcagcggtgtcctccttaaaaatggtttaaatcatagcagtgtgattttcaaatattaactgcatttatttacgtggagcataattaaagcccacaattttagggaatattgttatggcatttggatttaaatgtaattaactgtcaactaatattactataaataggggcagattatacaaaaaggggacaaaaaatcttagagagaaaagggatatcttgattgtaaaaccctaattctgtatccagaaatatctgaataagatagactcctgaactatacagagttaattgcaaaaccacgtaaaaatctcagtgtcatcgttattattttctttacatttgtgcttggtttattacaaaataggctcataattgttaacaaaaaactgcgttaatagtttggtactttcattgagagcctatgtgataaaagctcaaaaaaaatccctccttacgaaagaaggaatttcttctccatggctgataatggggaaaacgacaacactcatcctgaagagactactcgtcatcttggaaagaagccaatgggctcacagaggccccccaattcacgagcaactcattcaacacgatcaacacgctcaaaaagaagccaatgtgatgatgatcaaaacccaaaaattggaatgacgaaattaacactaattctggtgattctactcccatgagcgcccttctaagaaaatccatattcttattgggagtagatgggtttagcttctagaacggcaggagaccttggctcacggataccctccgtgtagctagcagtcaggggactctccttcacagggactcttcctgcaaagttggtgcctatatcttctcgtagcatcaattgaggaagttcgttaactaatgacttctcagcttttcttgattaa

SEQ ID NO: 233157 - DNA, 4169 bp, Cannabis indica
tagaagatttatcaaagacttcttcaagatttctaaacccttatctaatcttcttgctaatggagtgccttttgagttttgcaaggactaccttgaagcctttcaaacgcttaaggagaagttaatttcaccaccatttggcactacaccagattggaaactaccttttgaaatcatgtgtgatgccagtgacttcgctattggtgcagtattgggacaaagagttgacaaggtatttcgaactatcactatgcaagcagaaccttgaatgaagcccaactgaattatgctactacacagaaggaaatgttatccatgtgtttacatgtgacaaattccaaccttacttgattggaaataaagtgatagtgtacacggaccattcaacaatcaagtatttgatgactaaaaatgatgcaaaaccaagactgatttgatgggttcttcttctacaagaatttgatttagaaatcaaagatgagaagggcacagagaatttggtagcagatcatctgtcaaggttggagcttaaagagagctaaaatacaaaagaggtccaaattaatgaagactttcctgatgaacagctgtttcttttagactcaaaagtaccttggattgcgaattatgtgaacttcttggctgccaatattatacctccagatttgacgagacaacaataaaagaaattttctcggaagtcaaacattactactgggaagagcctatcttctataagcattgtgctgatcagattttcagaagatgtgtgccagaagagaagatgttctctatcttaactcattgccatagcttacaatgtggaggacattttagtggaaacctaactgctgcaatggtactccaaagtggatttttatggccttctctatttaaagatgctcatcaatttttcaaggcatgtgatcgttgtcagagaactggaaatatttcaagaaggaatgagatgcctttgacaggtatattggaagttgaactgttcgacttgtggggtattgacttcatgggaccttttctgtcgtcatacaacaattcttacatctagctagttgtggattatgtatcaaaacgggtagaagcggcaacaacacacttaaatgacgataaaacagtgctaaattttcttaagaaaaatattttcacttggcttggaactcctagagaaatcattagtgatgaagggagccacttttgcaacagacagtttgaagctttacttgtaaggtatggggttcttcacaggactataatatcctatcatcctcaaagcaatggccaagttgaagtttccaatcaagaaattaaattaattctggaaaatacagttcaacgctcacgaaaaagattgggcaaagaagctggatgatgcactgtgggccaataggacaacatttgaaacacctattggtatgtcaccatataggttggtatatggaaaggcttgtcatctaccagtggaattagagcacaaggcattttgagccatgaagagtttaaatatggacttggcagcagcaggagaaaagtggttatggcaactcaatgaaatggataaatttcaaaacgaggcgtatgaaaatgccaagatctacaaagaaaggaccaagaagtggcatgacagaagcttggtcagaaaaaagtttcaacccggacagcaagttctactttttaattcaaggttgaagctttttcctggaaaattgatatcacgatggtctggaccattcacagtggttcaagtattcccatatggagcggtggaacttaaaagagagaaaccagagaccttcaaggtcaatggtcaatgactaaagatttacttgggaggccaaattgatcaggccaagcccgtcatcatcttggtgcttctttgattagagaaacgaaatccggctaaataacgtaaacgacagcgcctttaggaggcatcctaattttttttttactgcaattttttagaaataattacaattacaattttttatttattttttagtaaactttaattttgtttttaaaatttattttagaaaaatatgtagaaccgtggaaatcatgaaaactagtcaatttgaaaaaatttagtagtgcctaggcatgaaatttcaatgtctaggcatgcaggtgaaaaaaaaaataagcagcaaataagaggatgagaagaccacacacatctactcatcctcagaagggacacgggccgcaacataggaatcctatgccgcagcacctgtgtccaacaggaaaagaaggctagcaaaaattcttcacacgggccgcgacatgaggatgtccatgctgtgacatctgggcttcatcgaatagaaacataagaaacaaatggaggcgggccgcaagatggaaattgagtgttgtggcttgtacctattaaaaataggcagagagcacttcaaccgtgccattcattagattttttcaaaaaaacttctatttcttcttcttcttcatacgagcaaccaccacttcaaacctaattttcaccattctcaaccatttcaattcaaatttcttcatccaatccacactataatcacccataaaaaaaccactcattaatttttttcaataatcacccacattcattcaattcaaccaaaattttttagaaaattcaaaaacctaaaaacctaaaccattgtgttcatcatttaatttttgtcatttcttggtggaagaggactacttcaagtatatcaaagcttctattctacaagtaagtgttctttttcactaaattttagtgattgaagagtaattaattatggattgtgggatattgggataaattttatttgtggaagattggatattgatgttgctattattagagattaattgaggtgaattagtgctaaaatctagtttgggagaagtgaaaaatataggggaggtgctgctcaatttttttttcacattgaaaattttattttgtttagtaagctggtatggcatctaggtctaggagaatcgggtcctgagcccaacgtaatgtgcaaggattgtcatcaagagatcctaatccctaagaagaccaaccacaacctgttaataaattggataattaggatttttgccccctgaactttgaatttgtacaaaatcataccccatgaaccatggatgaaagttctggggcataattcagtacatgtcaaagttcaaggggcgtgatttggtagatatcaaagtctggagagcatggtttagtacataaacaatcactgaaatagtaaaattgaatgaaattagacaaaagtccttaaatccaacaatctcaatagttcagggggtatttttaacgaccttaaaaggtaagagggcatgatttggtacatgtcaaagttcaggaggcaaaaatcctaattagcctaataaatttttcaatgaggaatttgccaaaagatataaaaaaactcaaaaagaggggtgtacttcaggaaaggggctttaaatttcaggatgagcctttttcaagggaccagggctatgagactattagaagtgagattatgagaaggcaatggcagaagatgtgtgttgcagagaatgtgggtgaagcaaactataatgttgtctatgagttctttgccaattatccctacaaaggcgataataacaaagtgtatgttagaggagtacaggtgtccattatgttagacactattaacaacttctttaacattggcacactaggggaatgacgagatgagagaatattagcactgaggagagaaacccttactgatgaggccattacaacaatattggggcaagagggtactcaatttcatattgagaggaatcagaatcaaaagtctttattccggtggcaactcaatccaaaggcaaaagcttggacctattttttaaattcttgaattatgtcgacgtcacatgcttcaactctagactatgttgttgtgtagtagtctatgctatcatgacgaagatgacattcgacataggattggtaattttgaagaatattaactatgtttacgaaatgaggaccacaacgggtacgacccatcgtgccctaattacatctttatgctcgagacatggtgttccaatgatagaaggagacattgttaaagaactaatgtagtccatctctagaagcagtg

SEQ ID NO: 233158 - DNA, 2605 bp, Cannabis indica
tcatcagctcaatccctataactcagggatcaatttacgtggatacggcatacacacgattccactatcagtgtattcagcctcaatcccacgatccttgcatcaagcattgatcccacgatctttctgtttgtatgcattgtaacgagagaagaaactcttcctcctcaagtttcccagccctataaatagtgatgcatattcactgggcaagaggatagatcggtcgaaacgcagctaagctaagactatactattatctatgaattatagattcagagatactgttgtaagagctataagaaaaggaatcttcttccttgatcttaagtcaatacaaataacgaggattaggctattacctaactgctcggggctaaagctctataaatttcatgtgtcttattattgctttatcatatatttgttactacatatcgtttatcacttataaaatagactcattgtcgttggctaaaagtgaagtcaacaccactatagtgttctgctgatattaatattttttaaataaaaaaaagtatttttcagtttctaatatttatataataaaataattgtaattataattatttataaattaatataactattgttaaataaatattatttacctatttttctacttaaatttgagaagtcaaacattaataataattatctataatattaatttatccataacaatacacactaatattgtcttaaataaaaatataaaattatctaaacaaaaattaaaaaaaaaaaattttcttaattaaaaaaaatactaattatcattgttctaatcactaaattctataaagtcatttgcattagagacatgtcttgaaccgtcacgattatcatgagattgaggcaccggtagggtagggtaatacggttttgaaattttttgcgtatgtaggatctcgataaattgtcgactctgcggacgaatcaaagtagtctgctgttgttgctgactctaaggactaaaaaattgaccatacataggctgctgtggagatcctcctatttgaccatacatagatttttgttgtaacaatgatccaaattgaccatacacaggttgttattgttgtgatgactcaaattgaccatacgtaagttgttgttgttatgcgctgagcctccaaaaaggccaaccataggttattgtgtttgagattctcttgtggcgtctggaaaaatataaattgaggagactgtgagggatgcccaaacatgaaatataattgaggcgactgtgaagagccaatgttagcagaaatatgttgtggttgttgaaaaacttgttgttgtggcattgacaatggatgtggggttgagtttgtaaaaagtttccaaactgtgggtcatgtagagaaaggtcactggaggtgccaaattgatcaatcttatcacacacttttaacatcaactcaggaaagactctcatatcttatagactaatggatggagaagagccttgtcattaagcttgattttgagtactagaacttaatgccgattttttttttcaatctataactcactcctcttcgattgtctgaccgatcccccaagaaatttaaattactttaattttctaaaagatccatcgctggaatcattttctgttctcgtcaagttgacaactgcttcattcattttcacttgatcaaataatatgttagaaacataatattaccttcattttaaaaatattataaattaaaaatttaaaagttacatgtagttctcgtcatgtctcgctaagccaagtgtttattcctttttttaaagtggcattttttccaagcataaattgcatggtcttcaaggacatcctgttcaaaaatagggttagtttgtgcaatgtgtaaataattttactaataagaagttaataactttagtaatacaaaattaataattttacttacaaatacagtacggatcgctgccatcgactttgcgccttacgtggacgtatacatcatttcttttctattttttttttgttttgattagatcacgcaataaactttgggctcaaaaataatttaataatttgcttctagctctctgtagagcagtgaccaggtttaacattgataacactttccaaaataatttggatctttataataatgttctagaaagtgagtgtgcttgatattctttctcgtaaaatatcttctcttcatctcatggtagagagtttgcataaccttttcgggctctggatgaccatcaatatcgtacaaatactacaaacgaatagtttttgttaaagaattttgtattcattaaaattgaaaatctataccattaaacttattaatttgctttacctttattttttgtacagcttggcctttaaagtgttgaggtatatttttaaaattcaagcaatgtcctggcaacaagattgtgacttcaacccccatctaacgtataaaagcttggttctccgtaccaaccactttgcatgtcacttcatcaagtgttagtggtgttggttttcatgcatcccaccttcgttgttcaatattaaggttactagcaaggccacgtcccttccttcttggcggttgag

SEQ ID NO: 233159 - DNA, 1374 bp, Cannabis indica
gagactcaaaactcttcattttcgagtgagtttccgatgttggaaatgagaaatgtgaagctgtgaatttgacttctctgacttcatggatcttagttattgtgaaaaactagacggatgatcaaaacataatcaaaatcggataagtagaacccagcgcaccaagccatttgtcaacctgggcgctaagtacttattcccgagctcgtaggatcttgttttgatacttccaagacttttgaacttaaggacgaggtctcctaccccatttttgaccatttcaaattcattggtcgaatcagatttggcatttgatcaattgaaggtagcgtcccaagttaattgtcaacctgggcactagacgttgggcctagcaccaggttaacctaggtgctgggccctgtttccaggggctcgggtttatgattttctccctgagttttcttgaatctttattatttctaatgacagaaaaaaatgcttggaacactttttcgtgaacttgattggaaacagcccatgttgacaacatgtcaacctgggcgttgggtcctaattatggcctttcaaaaaatttatttggtctctagaaatagttgaatctcaatcttttttgaaaacgaagaagatgcttagaagatttctcataaaacttcattgaaaggactgggccttactttggcacccaagaagtgtttttcttccccgaaaggacttatttccctatttttgatgaagatgaaggcgatgcaaaagttggatcgtcaatctgatacttggaaagtgcccagattgacaaattgtcaacttaggcgctggggtgctcggggcccggtgctcaaaaaagaacttgctctgattctgatttagatgcctcaaatatgtctgtggtatgtctagttgatattccaatgcaagttttgactcatttgcactaagacggtcccgaaaaccaaaaccctagttgggaatgtcaacctttggcgctgggtgaaaccctaggtgcacaggttggaacaagttacgaagtccgaacttccatcccggagttcccaaagtcaacctaggtcgacttgctatggcttaggactactcaactctgagttgtcatctttcttactgcatgtcaaatattaatgtccatgtcattatgtctgcttttggtgtaaacaacattgaatatattttttttttttttgtagagagagagagcattgatttaaattttatttttgtgtgttctttaaaaaataatcttagtattcatttctagttatataatcaattaagtttccatttaaaaaaaaaaaaaaaaaagtttaggaatgcctacaatcaaatttcgagaattaaaaataaccctatatttttata

SEQ ID NO: 233160 - DNA, 1251 bp, Cannabis indica
gtctactaattattgtcttgtggacactttaattttttttttaatatttttttcaagccttaaggtattttgacaagttttgctcaaagtttgttgtatttgtgaaaattaaattatttagtgatagtccaaaccgcataaaccacaataaccgcaccgcaccgcactattttttgcagtgcggtttttgcgggtttttaatttcgcggtgcgggtgcggtttgggaaatttgaaaaaccgcatgtgcgggttggtttgaaaaaaatagtcaaaaaccgcaccacccgcaccgcgaacacccctatctctttctatgtattctcttaattttactcatcaaaataaatgaaaagtgttcatagcggttttgaggagttaatataacaagggtacttgggcgcgtagcgcaaagaaaaccaaaagtctgaggacgagcaataggaagaaaactaaagcaaaaccagaaggaatgaggtattgtcgcgaagaagaataagatatactttaggtctcacattttagtttgttgtgaatcaaggtggaaacccattgggtgaccttaatagtcatatttatctttcagtttattgtaaacaagtaaaaggtccccacgaagacatttggacccctttttcttgtaaaagcgggattaaacattcaaatgaatgctttaaggtggatgttcagtctctcccttttctaagaggaagaaaagtattgagactgaaacttaagtgttcagtgtcgtgacaaatgctacatctttggtaggtcaagaagagagccttgaaagatactcacagcctcaaccaaaaaaaaaaaaaaggaaaagaaagagaaaatggtatgactatgagagggacacctctttaaaagggttacatattttctcgcattcgaaacgtactttaagtaccacgaatgcaatataagaggtcgagcgccacccaagggttacaagctccctcaatagaatcacaaaacttgaaaaaggttgagtgaggcccaagaggctaaatggctcccttaatttccaataacttgtagaaaggctgagcatgacccaagaggctaaacaattcccttaacatccaataactaaccgataaagggtcgactactcaaagagtttatacccctttcataatcaggttacgcccgaaaaaggttgagaaagcctaagtggcaaaaagctccctcaaacaaaatgatagttcatacaagaggttgagaaggctcaagaggctaac

SEQ ID NO: 233161 - DNA, 766 bp, Cannabis indica
tccatcatagctaagaaaccccattcaactctgtcataagctttgctaagatccaatttcaaagccatatatccctccttacccttgcgttttctcttcagataattcattacttcaaaagctatcataatgttattggagattaaccgcccaggaataaatgcagattgagttggagaaataacatttggcaaaaatactctaagacaattcgtaatcaccttagaaataattttggagaggacattacacaaagatataggccgtagatcactcatggaaataggctattttttcttcggtataagcacaatatttgtatcattaagcgcatcaggtaaaatagcggtatcaaagaaatctctaacgtgcttaaccacatcatccttcacaacattccaatatttccgaaagaaaccaggcgtcataccatcaggtcacagagatttgtccgggtgcatatgaaccagagcacgcctcacttcttcctcagtgaccgggtcaaggagttgttgattgtgatccaaagtaacggcactaggagtaacagcaatgaccgaggaaaactctgatgctgaagtcgtaaataggttcttgaaataatccaacataacattaggaagcctatcttcccacgacaccaaaataccttaatcatcttgaaggcgacaaatcgtattatgctttttcctagctgtagctttagcatggaagaacttactgttgctatcactttcacgaaaccacaattgtttggatctttggc

SEQ ID NO: 233162 - DNA, 609 bp, Cannabis indica
aggcttccacccgaaagagagaacgatttctaagttaaaacagttcatcaggtcttcttcatgctttgtagtttccatttccatttggggtatctatatatctatctgtggcactgaaaaaatacttatatatgatatcaatataggaaattgaatgctgagattggtttcttgtttgtgaatttcttatcatttatttaagtcaagaattaattttagattttgagtgtttgggatagattttgttttgtctaaaatcttttggtcttcttgttcttcatattggaagtaaaaactgttcacttttggtgtagaactaatatcattaacaatgagcaaatgagtagaaaatatcatcatttttgttcattttctctttttaacgaaatcaaaatggtgttcaataaagattgaacatgtttggaggtgcaaaagaaagagactttgtaccaaaggaacttgttcaacttttgcgtttgggaaaccctgaaattgtattttttttaatgttgcaattgcttgtttcagaaaatattgtggttgattaatgtaggaatttataaggggtatttatttttggtaggaattgttttattttagatttttttt

SEQ ID NO: 233163 - DNA, 481 bp, Cannabis indica
ggttgtgtgatgttaggctatttccaacctaattttagtattacaccaatactgaatttgatgataaaaatctttcattctaacaacaccaaaacatacaaaaaaaataaaataatattctttattattatatatattttaataaaatagattattttttattaacaaaaataatatatataaatacctacttaaatttttttagcttacttctttgagtttagtcttagaagattttagacagttttttttttatttttgtctagtctctctttctgttttagatttattaatattgctgttaattcttcaattaaatatgtcttgttagaagttatcattcttttatctacaatttcattttactattgtagatgaattaatttaattagtttatccttaatattttctttaaagttcttttgcttgtaaaagtaagtttttgggagttttcttttaaaaaaaattaatgtagttaaat

SEQ ID NO: 233164 - DNA, 1439 bp, Cannabis indica
ctaaccttgtgggtagtttttttaaagtaaaaaaaaaaatgagcttagggagctcttcttttataggtgaatggggcccaaaaaatagtaaaaaatacaaattagatgttattgactatagatgatgatctaatgttgaaaattagctcttgatggtgatggccattttttagagcttgacaggacccgctgcgggtaacccgaagcttattttcataactctcttggggtgaattttagtgtcgatagcttcataattgcgattaaagtgtgaggtatgacttgatagagcgttgaattagcttcgaaacttaaattgaatcgtgtcaatcagatcaatattgagtgagttatggctattttattgaaggtagttaatgacccagcgcctaggttgacatctagcgcccaggttgacattctagcgcccaagttgacatatgacgtcaaactggatcatgggtaagtgtaaaaatatttaagggatgtactttaagatacctaagtaatattttgacatcaattagtctgtttttgtgttttggcaaagctggtcaccagttcttagagatgttgctgttctgcggaaatggagactcgaaactctttatttttgagtgagttttctatgttgcaaatgagaaatgcaaagttgtgaatttgacttctctgacttcatggaccttagttattgtgaaaaactagacaaacgatcaaaatggaatctgaatcggataagtagaacccagcacaccaggccatttgtcaacttcggcgctaggtgccctattctcgagctcttgggatctcattttgatacattcaagattcttaagcttgaggacgagatctcctaccccgtttttgaccattgtcgaccaaatttggcatttgagtaattgaaggtagtatcctggttgattgtcaacctgggcactaggccccatttccaggggctcgagtttgtggttttattcctgagtttgtgtaacaccctaactagcataggcatgttaacgtgatttttaacatactgtgcagctcgttgctaatcaacgaggttattggaaaacgtgaataattaaaattttgcttaattaattaaaatataacaaataacttttataaacttccgggatcccgtttacaaaatactgttacaaaagtttactacataattacaaaatacttgtcgcctagcgagaaaatacaaaagccctgatgtcccgaggatcgtacgctccaggcctaaccgccccgacatgtacaatcttcacctgcttgctctcacggctcctcggctttagccttgcccttacctacacatagcaatagcactgtgagttgacgaatcagtaaaaaagcataacataataaacatagtaatatctcgggttataatcaggcacccatacacctaaccataaccctaacttaat

SEQ ID NO: 233165 - DNA, 1492 bp, Cannabis indica
atgcaaagcaaatgggtgtccattgcttgttgatgctcatgtccaagaagataagaggacatttaaggtgacatcttacaaggaaactcacaattgtggaatagcattggataatagacacattaatgccagatggttgtcaaagtatttcctagaccagttttggatgcatccaaacatggacttcaaatccttcaaggagatgacaaaagacagaaagttctcaaaggtaactgagtctcaattttatagggctaagaattatgcaagggctccattagagggatcgttagctcaacaatatgctatgttggaggattattgcaatcaggttttagctacaaatcgtggtagcacagctaagattcagactgacctagttgatggaaaaagaatattcaagagagtatacatatggatggatttttaagagggtgcagaccactaataggtttagacgggtgtttccttaaaggttattgcaaaggagtgatgttggcagcagttgggatagatggggctaactgcatatttccaatagcatatgcagttacagaaaaagaaacaactagcagctagacatggttcttagagttgttgaaggatgatttgacaccgactaaccctaacacattcaccatgatgagtgataggcaaaagggtcttcaaaatgctgtggaatctatattcaacaccccggacagtcgcttttgtgtgagacgcatgtatggaaactttaaaaaggactatccgggactcgagttgaaacagatgctttgggcagcagctagagccacaacaccagcagagtttgactccagaatggaagagttaaagaatcaaaatgagagtgcttacaactggttggctgctaaaccaccaacagaatggacaaaagcacattttaaagagggagttaaatgtgacatgttactgaacaacatatgtgaaagttttaaccacgctataatggatgcaagggacaagccaataattactcttctagagagtataaggttctggttgatgtgtcgattttgcaagagaagagaatctgtgttgaggtcgacagaaactgtccacaacaatattgtgaagattgtcagacaacggcagaacgtttcacgacactgttcagttacacatgccaatgcaacaatgtttgaagttaggatgaacattggaggtgcatttacggttgatttggataaacgaacttgcacttgcagagtcttccagctctcaggaataccttgtggacatgctttggctgctatttgcttttgcaaccatcatcaatggggttatattcatgattactaccagaagccagcatttcaagctgcttatgaaggcacaatatttcctatgtctagcccagaccaatggcccaacaaaggtcataatctgatcttgcctcttggagaccacaaccttccgggcagacctagaaagaagagaaagagagcaggtgatgagccaccaccaccaa

SEQ ID NO: 233166 - DNA, 1245 bp, Cannabis indica
gggaaattctataatgcaccgatacaccgatacatctctatctattttagtattcgaaataattttttattcaatttttttctcatggtcatgtaaattatagtaatttaaaacatccagcaaaattttaagaaattcaaaaaagtttaactcgtcgaaaattgcgttcaagcagtgtgttgcacgtgactattttattttatactagtgtaaaatagactgtttgaacattattttttatattgtaaattattccaaatttctcaaaattttataggatatcttaaataccttcaacgtacatgaatatgaaaaaaaaaaaatagactaaatttattttttgaatgccgaaacaagtagagggtgtatcagtacatcccttttaaagagtgcattgtaaaatcaccctattacatcatattcttttttcatattttctctacataatttaaatattatatatatatatatatattttattaattaaaacaaaaataaaacactctcattagcttctcaattctatctttaaaatatgttattaattttttttttattttacatcaaacttttatattacactatacattagcttctttaaaatatattaccaaaaaataattttttttccaaattttatatattttatttatttcaaatatataatattaatacatatatattctttatgaaaacaattattcaaatctaaaaacaattattaaaatatatttagatcaatgaatagtattctataaatatataaaacatgaataattaattttttaaaaaaaagctttaaaataaataagtttaaaacatctaatataatgtgcttttagtttggtttttcaaatattttaaaacttctctattttagagtctcttatatcaatgctctaagtaagaagagaataaaataataattaaaggaatgaataagacaatttacatgtttagctctctactattcattgagatataggtagaaaaatatttttttgagtttgaaatgatgtataatagctaagattttaaaacactaaataagattaattttacgcgcttaaagcacttacatcaacttctctactctattctttaaaatacctcaccaaacttttacttattctattttaccttacacatttatattacatcatatatcaacttctctatttttttttttctttatatcatttaagtattatattttaaaggtgaatgctattttggaccatgtat

SEQ ID NO: 233167 - DNA, 782 bp, Cannabis indica
caacatcctactcttactctcgcaatagataccgaagagggtagagcgacgacagttgtaccgttaattagaacattatccaaccagtaaatcacggccatacagagatagcgagaactccacccaaccacatagaccaagggattacattgccaagacaacactacctcgacagatgagggaatcaagcaagggaccaattcctgaatacaacctgaacattagccctgtcgaagtagttgcaataatgaagggaatgggaaagcaagtcaagtggcctgaaaagattaaaaaactagcagcaatgcacgacacgacaatgtggtgtgaatttcataatgaccacaaacataccactccaaagtgcatagcattaaggtatgaagtagctggactcttgcgcaaagatcaattgcgagattttttatcagacaaggcaaagaaaaccgtgacgaaagcagacaagaggccgtcaacacaacaagagccacctcaacacacctggatatgtaatgtcatctccagagggtcaaaggtcagcgacgtaacatacttagccgctaagaggcatgcacgcgaaatagtcaggacagagggtagaccaaagaaacaaccaacagcttacagcgcctagaccattagtttcgtggacgacaatgcttcagatttgcttaatcctgaccatgatactttagtcatttcttttttttatttcgaattattttactaaacatatactgatcgataaaagtagctctgctaacatcttatttttgaatgct

SEQ ID NO: 233168 - DNA, 981 bp, Cannabis indica
atgatttaggtattgaaaattgagatataagggagttttaggaagtggttggcgagggtttcgtgggtttttagcttctcctatggggtggctggtcatcgtggtgaagaagaagaggaagtggggaagatgaagtatgagggttatatttatataccctatggcatcggttattaggaaataacccatgacataggtgcacacgtgtcaataaaggtgtgcatttatatcatcggttatttcctaataactgacggcataaggtatgtaaatattactgaaaattttctaacccagaacccactgtaaagggtatagttagtttcaatacctacgtttttttaccaaaaaaccgtctctaaatgtctagtttgaactaggtcagtattttcactctttagctccccttttttataaggagaattactccatatactattttttttatcttttttttttcaaatttacggtttgggtttctaaagcggttgcagcgctagttgcagtaggggtttctatacgattttttgttgcaatttaagttgcagcgctagttgcaataggagattatatgtagaattctgtaaaaatgcaaaaaaaaattgttttaaagtgtaaaaatgaaaaagtccctttttataaaataggttgaaaaaacaatctctaaaaggccatacttcctatgaaacaagtaaactcccactccgcctccctctccccctcactctcagtctccctatagattttcttttcattaaagtatattttgatattgggttagttaatttatgaaattgagtaacgaaattaattctgaatatatatgtatctagaatatatatatataccaccaattgttcttaatatatatgtagtttttttttcctgaaaaaatcaatattttcattaaaaggcacaaagtcatgagatcaaaagattaatgcgaagatgctgcaattattagtggacaaaagcagagag

SEQ ID NO: 233169 - DNA, 2771 bp, Cannabis indica
attttttaaaaaattaatttaagatattaagaaatcctatctaaagttgtgtactaacttgagcatcaatttgtttacatgaaatgtcagaaactacacctttctcatttcttttaaaagggaaattattttcattgaaaataacatttctactagttacaattttattagtttcaacagagagtaatctataacctcttacacaagtaggatatcctaagaatatgcattttattgctcttttctcaagtttgtcttccacattgtgtgcataagcagcacaaccaaagattcttaaatgagatagagattgaggtgtacctatccatagctgctcaggtattttcagcttaacttttctgtttggattcctgtttattaagtaacaggcggtgtgtaaggcttctccccagaactgtttctttaaacatacttctaataataagcatctaactttgttaagtaaatttctattcattcgtttagcaacacaattttgttgtggagtttttatcacagttttatgcctttgtattccaaacattaaacataaatcagtgaattcatcattcacaaattttaatccattatctgttctcaacactttgattttagaatttgtttggttttcaacaagagttttccagttcctaaactcttctaaacaatcatttttatgtcttaataaaagaacccaaatttttctactaaaatcatctataatggacaagaaaaattatttacctccttgagtttttaccctgcttgctccccataaatctgcatggatgtattccaaaactgctttggctcaatagttgttatttgggaacttgatcctatgctgttttccctgaacacaaatctcatcaaaagacaagttagcatgattataatcctttagcaaatcttgtatgtataactcaactaaaccttgttcaccagtgtgtcctaatctggcatgcctatagttttgattctacattgcacttgtcaacagcagcagcttgtgcttgagtaatagttttaccatcaaggtaataaaatccatgtgtcttggttcctttcagtaccagcagtgatcccttagtgattttgatcactcctttacttgtcttgtaaacacatccttcatcatcaaagttcccaaagaaattaattttttttttcaaatctggaatgtgtctaactttgtgcagagttttgaaagtcccatcaaaacttttgatgagaattgaaccaatgccaacaacactacacttgtgatcatttcccattacaacaccaccatttatctctgagtagtccatgaaccagtctctgttaggaatcatgtgataagtgcacccactgtccaagatccaatcatcttgatcctttagataataactggtacaagcatctctatcagtcttgatttcatctttatttttattgttaatgactggaaatacatctccattagaatcatcaattactgcatacaaatcattgttgttgtcatcttcttctttatccttcttcttcttccttttgtcccttatgtcctaacagtttctgatcaagtgtccaactttgccacagtgatgacacttcctagtttccataggtcttgacattaatcttgaattccctttgaattttgaaattcctcttcttggtaatcttcctcgagccatcaaagcttcatctgtctttgattcttgtctagcagctttctacaaattcaactcagcatctcttgatctgagtgtgctcataacattctccaaagtcaaggtgtccttactatacataataacaatcctcatttctttaaattggtcaggcaaagtattaagtaaaataacaacttgttcctcttcttttatggtttcacccatattagtaagagctaacacaattttattaagctcataaagattttgatcaaatgtgttcctagcattcattttaaacccataatagttccctttcaagaagatctttgttgtagtagattgagccatgtacaactggttgagtttgctccaaattccaagagctgtcttctccccaatgacctgtctctgtacattgtttggaaggttcgtgacaatggttgatcttgcttgcttcgtgatggtttttgaatcattcttcatggattcatcaacctccttcttcttggtttcatctaaaacatgctatgtcttctcaaaagattcttccaacgctcaatccaatttttgatagatcagtatggctaacattgtaacgccctaaataattaggcacgctacccaatatacttatgaaaccctaatcccctacttgggattactaataaaattagcgcgaaaattaaactttaattacaaatggaatgaaaataaacttgtaatactttttctctttacaaaataaacagatacatgtatcgggatcccaaaagtaactttataaaatattattacaagttcgtttcctctagccgacctaagtggcaaaacagagtacaaaatacatcactggtagaccccaacccgcttagtctagtgtggcccgaatatgtacattcttcgtcaagctcctacactcatggttgatcagaaacagctttaccctttcctgcacaatagagcacacgtgagccaagcccaggaagacagtataaaatatcaataacatatctatcatactatataaacagtaatgccattctcctatgcctgtatgacacaaacctgcatgttacgctcacatgcctatttatttctacatggcgtaga

SEQ ID NO: 233170 - DNA, 1125 bp, Cannabis indica
ggaaaatattagattgttgaggtttattaacattaaaattcttaaaataaaatctcacaaaaataaaatatttttttattataaaaataaaataacgaaaattaaagctttaaatattatttatattattatattactaagcaaaatattacatttagaatattagaaataaatgcaaaatataattttacctatgccaaatttatagcataagaatttaatttatttaagttcgaccgattctagattataagaataatttcttaattataatctttttttaaggaaacaccctttcattccaattacaatgatcttaaaaaataaaagagtgtctgcccattatgagtgctctgtagcagttatagtttttcttcttcagtttttttctgtattcttctttctagtttgtaacttctcttgtgcacccatggatgctttaactgatgggatgaaatcaaccatctccttcaaagacaatgaaagaacggtggctgccattacgatgatgacaacttctctccaattgaatttctagaacttgtccttgttattcgaattttgacccctatgaaagtttggctatcaactcttcaaaggcagatggctcaacactagaacagtcgttttaaggctaaaattattgagcatcactctggtttatttcttgtaactttttgtcgtattggtgacaaagagagggcccttagtatgaattcctagcatttttaaaatcatcacagtactccacacgccatctgttctacagattatctcaccagagtccacagttttttcaccattttgagtccaagcctatagactccctttcttgagtaagtcacgtgctctagcgaaagatctcggctctttaatgggtgaattcatggaagtatttgatgactcttgcaatgagggttagggttcaattcttcgatttcgtgttaaactcgacataagaaagcctttacttcggggaaaatgatcacaccaccgaagtacgagatgtgttttgggacgaatttcgttatgagcaacgtctagagtattgtatggagtgtggcatcattggccatcctttcaacaaatgtccaattttttagaaaaaatggacgatggcattga

SEQ ID NO: 233171 - DNA, 981 bp, Cannabis indica
tttgagcagcattcatgtgtgtgactctaggagtgacaaggaattggctcaacttgttgactgtgtaagctaagtcgggtctggtgatagtaaggtactatagctttcctataattggtctataaagcttcggatcagctagagcatcctcactatcatggcttagttttagatttacttccataggtgtattggcagccttgcatcctagttgtccaagatcttctaagagttgtaaggaataatgtctttgagacaaaaatatacctttgtcatttctagcaatttcaagacccaaaaaatacttgagttcaccaaggtctttcaacttgaattggtcattcaatctgatttttaagctttgcaccgcagccatgttgttgcttgcaatgatcacatcatcaacataaacaagaaggatgatgatgcttgatccttgttgttgtatgaataatgaatgatcagttgctgaatgttgaaagccttcagcaagtaatgttgtagaaaacttttcaaaccattgcctagaagcttgttttaggccatagattgatttttgaagtttacatacaacattaggtggtagctcccccttaggactatacccttgagggatagtcatataaacttcctcatgcaaatctccgtgaagaaatgcattatttacgtccaattgctgtaaaaaccagccattaatggcagcaagaacaaggattagtttgacagaaactagcttcgcaactggggcaaaagtctcattgtaatcaaccccttcttgttgactaaaaccatttgcaactagccttgctttgaacctttcaatggacccatcaacattgtatttaattcgataaacccacttacacccaatggcatgatggtcagcaggaagagtaacaattatccaagtcccattggattcaagggctgtgatctcatgattcatagcattatcccacactgggattcctttggcttgat

SEQ ID NO: 233172 - DNA, 1116 bp, Cannabis indica
tcggttacacatttcaaacacccgaaatccgaaaacccgaacccgaccacccgagaacccgaaaactcgacccgtgtgcagccctagtggcggatactcaaagtgcttttatcccaggaaggctcatctcagataacataatggtctcttttgaggtgttacactatttgaagcggaaaaggaaaggcaaagatggctatatggcactgaagttggatataagtaaagcgtatgacaggattgagtggggctttcttagatcaattcttacaaagcttggttttagtcagcggtgggtgaacttgattgtaaactgtgtcacttcagctcggtataaagttactcatgggggtcgcgaattaggtctaatcttaccgagtagggggattagacagggggacccgctttcaccgtacatctttctcctttgtgcggaaggactttatgctttaatttgaaaatatgaggcaaagggttggttacatgcctgcaatgttgctaatggtgctccaaggatctctcatatgctttttgcagatgatagctacctttactgcaaagcgactgctgctgaaccgttaaagattcaagagttgctctacaaatttgaattggcctcgtgacaaaaggtgaatttgaataagtcctctattttctacagtgttaatactcatgctaggcatagacaaaatattaaccagattttgcacatgcgacaagctgacgagaacagtttatatttggggcttccaagcacattgggaagaaacaagtctgctgtgttgggttatttaaaagatcgggtaagaaaaagacttcaaggacgggaagcaaaaattctttctcgagctggtaaggaaattctgataaagacagtggctcaatctttaacaaactatgctatgagtgtcttcttgttacctattgagattggtaaagatattgagggtcaaatggcgaggttctggtggaactcctcttctaatggcaacaaaggaattcattggatgtcgtgggactgaatgtgtcatcataaaactgtcggtggtatgggctttaggaacttgcgtgactgcaatctcgcccttcttggaaagcaaggatggcggttgattt

SEQ ID NO: 233173 - DNA, 1085 bp, Cannabis indica
ggtctctttggttggcctacttcatttgtttgcaactaaagatgttgaaccattttgtttccacgtgtttgttaataataagaaaaaaaaataagatgacataatcgtattaatttatggaacacgttcaataacttttctcacgactcaggaaacattattattcccgtcttaattttttagtctattaattaagataatgttattgcactaatgggagaataacattttttcatattgaaaaaactaaaaactcagttttcactaaagattcatctgagatattatatgtgagagtgtatttgacggttcactatagttcagtgcggttctgatatagtatacgattaggctattttatcctgaggacgaccagctttcttcaattgcttgcacatcttaggcagtgttacaaacgtattaaagagagcgagctaatttgcgattcaaccaaaaaattttgtttgctaatatcctatcacttctgttaatagcaatgtctataacagggtaggtatcactacaaaaaattttacttaaatttatgactaaaagtaaaaaaaaatgtgattaattacaaatcatcattcttatattgtgacttaaagtatatattagtcataaaaattataattatttgttgtgactaaatgtgtatctagttacaatacatgtgaccaaaaccaatttagtgacaacttgtatctaaatactatgtttagttactagtaacttttgttgtgactaaaagtcacatttagtcacataaaatttatgttgtgactaaaaatttgtcactaaatatagttgttatttgtagtgtatgtaaagagataataattttgatccagttttagctgaaatgaacaagaattgggttcacgtatagccctatatataactcatattatcatggagtttgaacttcttttatggggcgttgtcgagtatgatattatcagagtatatatatgcaatggtttctcttattattagctatagtgtcctagagaagaggctaatgaagctcccaaagtaattagctcactcttatggattgcatatgacttctcacctacaaaaaa

SEQ ID NO: 233174 - DNA, 585 bp, Cannabis indica
tgttttttgctggtggaaaattgtcaccagatttgatttctgatgtgggaatggcatcagttgtctgaatttctggtgtgggatgggcaccagagttaattgctgatgtgggaatggcatcaattatttgaatttctggtgtgggatgggcaccagaggtggtttctgatgtcggagtggcatctgaatttgacatatttgtgtcaattgaaggtgctggtgtgggataaacaccaggtggtggcaggggggttgtggcccgagttatggggcaaaaaattggtttgattataggttgaaagagctggtttatggcagtgatagactgctgtcctgttaagggaaaaatatcctcataaaaaataacatcgcgagattggtagatttgcttggtttcaatgtcaagtagagtgtatgctttcatgccttgggggtatccaataaaaattgaggcacgactccgaggagaaaatttgtgtctactagatggaagagtggaggcataagctacgcatccaaaagatcgaagatggtcatagatggggggttttttgtgaagtacctcataagatgtgctaccttgaa

SEQ ID NO: 233175 - DNA, 1115 bp, Cannabis indica
gtatgtacctgatctgaaaagaaacttactttcaattggtgcttttgataaaaatggctacactattaagatagatgatggcacattgaaagttactagaagatcacttgtaattgctaaaggaaaactcaaaaatggcatatactatcttgatggtcattctgttactggttctgccgcaccagtaatagacaaatctcttgaaaatagtatcaaaatgtggcatcttaggctgggacatgtgagtgaaagaggattgatggaacttgacaaacaaggtgtattcaaaggtggtctaaaagaaaagttagaattctgtgaatcttgtgtattagggaaaagttgcaaagtaaaattccctaaaggaatgcatacaacaacagaaaagttaagctacatacattcagacctatggggtccttctaagattcaaacattaggaggtgcaaactatttccttagtatcattgatgattactctaggaaagtctgggtgttcttgctgaaaaataagaatctagcatttgaaacctttgtaaattggagaacaatgatagagaaacaaacagggtgttacattaaggttttaaggactgataatggactcgaattttgctcagaagagttcaagagctactgtacaagagaaggcattagaagacacaacacagttgtcaaaaatccacaacaaaatggattggctgaaaggatgaatagaactcttcttgaaagagtaagatgtatgttgaatagtgctggtttggaaaggaagttttggggagaagcactaaaaacagcctgttatttaatcaacaggtgtccctcaacagcaatcaacttcaaaactccacaagaaatgtggactggtcaaattcctaagtatgagcatctaaaagtatttggatgcacagcctatgcacacattaggcaagacaaacttcaacctagagccattaagtgtctattcctaggctatcctgatgggatcaagggatacaagttatggtgtcttgaaaatggttttaagaagtgtatcataagtagggatgttgtgtttagagaggatgagatggccatgaaaacaactacaagacagactgaaactgctcctgctg

SEQ ID NO: 233176 - DNA, 1059 bp, Cannabis indica
ctagggcaccaagctacgaagagagtgtttcaaagttaaggctgacttttgttttagatcataacaacaaaatcacaacaataataacatagacaaattaataaattatagtaaaaactagatgggtcaaaaaatgttcatcgtccgtgaaacaaccctcaaacaaagatgcttcattagaggattcacaaagtgggacgacttatgattttgcacactctttgagttcacgggcttttttaaaaacacccacaaaccttcgatatgtgcaaatataaattcatgcataagcgtaaaacaatacagaaaaatcaatacaaaatggggggaaataatatgggaaatagggtgtagtacctaaagatgaaattgcgtcgctacaaggtggctacaaagaagagagaatgagaaagagatgatcttcaagggttttaggaaaaagacttagagcttccttggtatcaaatcccggattcattcaattttatgaatttgaaaatcaattaatcaattaatcaaataatcaatcaatacatcaatttatcaatatcaataactagcggtattgtttaacttttatctttattttattttattttttatcaaagaattagattgcacaaaccaatctttacatcctactagcaccctataaacagggcctaaggaaatctatacaaattcaactgcatcttgctatacttttgtattgtatacactttataaagcatgaaaccaatctttatctacaatcttgattttctttggcaaaaacatagaaattcgaagctttaaactccacctaatgtcttcgatcagcctggtggaatttaattgactctcctgccaaataatggcattccttgacccccaaatgttataaaccagggcagcagttgctgcagcataaacttgcttcctgaatttggtgatttttgccttgccaatccatctcaccaattgaggaagactgttggttcttgcattccaatccaaccatctcttaatctccatcagaaaataatcagcaacactgcactcaaagaatagctgctggcc

SEQ ID NO: 233177 - DNA, 1182 bp, Cannabis indica
taagttaaataaattgtatgtttcgtggatttactgcttaggtaaaagacttaatattgagtacttcgccttgattatatataataaggagattgggataattgactgcttcagctttatctgcgggataataatttgattggaaactaaaattacatttattaataggaattaagaatgattgtcgagggtggagaataacctttgactagtttctcatatcgtagtctcaattataatttatttttttattttctttttatgatatttaattacatctcaaaacccccctttaatttctgtttgatagtgaataataaattaatcatagtcttcgtgggatcgatccatacttacttttatactaaaataattgaaagtattggaataaaaaaattagcaaattcgatatggcaaacgacccgcgtcaacttcacaacggaggaggcctccatcaactctttagctttacaccgaaagaggccttcgtcaactccttatctttattgtttatcaagatttttggaaattaattataaacgataagaactaaagtaataaataattaaaagagagaaaatcaaaagagacaaatagtttttacgtggttggggagttaattagccttagtccatgagtcagtgttattcagtagttctttagcttgaaaagcctttaggaatacaaagaatatgtgttctcaagttttcctgagtaagtgttgtcagagaattcaacccttaatccataggattcgatggatatttatagtagtttgagaattacatttagttttccttttctctctattggggagtttaaagtgaataacacactttagttatcttgtgaagtctagcccatgaaggagaggaattgctgactaggtagattggaattggcttgatttggtcaacacagtgtgctttgattgtgggtaattaattgtgaattaattgcttgacattcattttaggaagtttccctatttaacttgatatgatgctcagtcgagatctggcagttgttgtttccttatttgtctgcatgaattaaaaaggggaaccagatcagtcttttgggaacacgttgtctcacccttttggtctcatggtactggacttgcttctgagaataagttaccaatagtggaagactctatggtcacagagctgggttatg

SEQ ID NO: 233178 - DNA, 896 bp, Cannabis indica
atctccatagattattccaaaaattcgaagcctccacatggttccaagagccattcaatttctgcaacaaattgaaagcactcttcatagtgtagtcacctgaacattcaggaaaccagtagaaggagtccggccctgcattagcttgaatcaaaatgccacaaattaaagctttgtctctatcattgaaaaggtcattcactatctccaattcctagccaacaccctcaactttaagcaaattttcaaccataatgtcgttaagagtaggatgagatgaagttacacaaggattaacctcattaggaagccaacggtcccctagcacagataccgacttgccatcaccaattttccaatgcactccattgttcaccacactttgagtctcccagatgctacgccatataaaactcgggttgttacccagttggaccgtgagataagtgccccatggaaaatatctagcctttatagggattccctcaaaaaaacactataaataccccatagacagaataaaaaaggggtggatcgattaattaaggaatttaagggagtaaagaagagagagattcaccaagaacattctctgtaaaaaaatactcttataaataataaagacttgtggactaaggttcattaatgccccaaccacgtaaaaatcacgtacattaaacattctacatctcttctcattatactatttaattggttgccaaaaacctctgtcaacaccaatattaatatctattcattctcttcagggaatctacaataaatttatgatatactaaaatatatgtataattcacattctattcaataatcaaatataattttattttgattataagtgtgtccgtactacaggtacgtgactactattattcaat

SEQ ID NO: 233179 - DNA, 909 bp, Cannabis indica
tgactagttattaagtaaaaatagatattgtttaaaagatgacatgtgtcgctaaattagtaagagagtacaaaagagagtgtgatagagagtgtccttagcactcatcgaaagagaaatatagtaatttgtccagatatatataattgagttatgtcgatatacgaatcagatattttaattggatcagatatagtcgttattaaactcatttagatatacagttctaccggtactaatataccctacacgatgaataaatgtagtgtacaagttttttattatattatttttgaaatatggctgtagatgtaataatatatataatacaacaaaaatatatatagctcaatgaatatatttattaatcctgatcacttccatatattagaagaaagaatctattaatttataattcacattaactcaaatcctactccctagttttcataaataatcagaacgaaacttaattcatataataaataattgagctaacaatattgcttataattacctagtatcactagggttcggaatgaaactcttttaaatttggctaattagtaatttttttccccgaactttgacatgtactaaagtgtgccccctgttaggctatttttagcctatgttttggatctaatttatgtgcgtttttagctgtgttgggacggaattacgcttgttttctatgttttcaggttctttggaataaaagaggtctcgggtgcagaaattcgttaaaagatgtgttgagccgaagaaaacacaatttttgagtaattgtgcacatctggccgcggctaaacacaacctggccgcggctagatttcgaaaatctatgaagcttcagtcgccgcggcgatgaagaggctcgccgcggccatttaaaagatacagagagac

SEQ ID NO: 233180 - DNA, 1188 bp, Cannabis indica
gatttgaatactgaagaaagctcgatgtttaaggctaaaccattgtatgccaatgcaaaacctcgcttgaatcattctctttatttgttataataatcatcaatgttattgggttatgtacgttattttagcttcttcttataatataagtattaatgatctcttgttgttttcttattagttcttctcctttatttttattgcatttgcttttgttgtttttccttgatatatgctgctatatttgtagctaatttaagtcatatgaatcattcatttaattttaattacaaaatcaaattttaaggaaaaatttcataactatagaataagattaaattaataacgacattcttcctcaatagtactattctcatccacttgcatcaaattgagttcttgaaataggagaaaatcaagagtgagcttataaaagcctaagaggaaaacaattaatatcaaatgacgcttagtttaataaaaatttctgtatggttagtttttaaaacaaaacattccatcaccaccaccatcatcatcatgtataaacaaaatagagaccacaattaattacaaaatcaagtttcaaatgtgttatcccaaattttgtctacctgatcgtgccatgttcacataagtcaagatagagtacatgtggaacacaaccttgccaatagcaagacaagatctccttacaaggcatgacaaaactatcaagcaggaatcgaaatgagtgaagcgcgagccatcaaagagttgtaacaacatgtctggctggccaagagaagcttataggctggccaaggtgagcttgtatgccagccaggatctgggcacaagctgaccgcccaaaaggtgactttcagactaagggagctttcgttcgaccaaaggaacctgacctttacaaagtaaatgtgtaaagctggcctctacttgccaaaggctggcctccacatccaaaggctggcctcctcttggtaaagctgacaagaaaatgacctgctggatccgggcagacacatgacctaccaagtccaagcaggagcatggctggccagactccaacctgcagaccttgcatggtcgaccacaccttatcctataggtgtatggccggccaacttctctctggcaggacaatgatgcgcaaccttcacccgtagacaacaagccaagctgagagtt

SEQ ID NO: 233181 - DNA, 2201 bp, Cannabis indica
ttctcgcactacaactgcactaatcccatcttccaagatggataaatagagaaacaacgtttctccagttattggttttgccaaaattagaggcgtcgctagatgcctttttatgttctggaaggactcttcgcattcttttgtccactcaaattttttgttgcctcgcaatatattgaagaacgacacacacttatcagttgacttcaaaatgaacctattaagtgtagccactcttcctgtcaaagcttgtacttccataggctttgtcggtgatggcatgtccattaatgccttgattttttcaagattttcttcaatacccctcgcattaactatgaatcccaaaaactttcttgaggaaactccaaaggaacattttttcagatttagcttcatgttatacttttttaatatcttaaagcattctgcgaggtctgttgtatgatccctactttttatcaattttaccaacatatcaacgacgtaaaccaccatgttccgccttatttggtttgcaaacagttcgtttaccaatcgttgatatgtttccccaacattcttcagtctggatggcatgactttataacactagcgtcccatgttggttacgaaggttgtatgttcttgatatgggacatacatttttatctggttatatcgaaaatatgcatcaataaatgacataagctcgtgtcgagcagttgcatcaactaactggtcaatcctgggaagtggaaaacagtcttttgggcacgccttattcagaacaaagaaatcaatacaagttctccaagtttcgttaggcttcgggacgagaacaggattggttatccataagggataaaacacctcgcatataaagtcattgactacaacttctcaacttcctattttagtgccacttgcctcttgaaatctaagggcctccttttctgtctcttcgctgggtagtttggatcaacatttaaatgatggcagataatattagggtcgatccctatcatatctccatgactccaggcgaactgatcttggtatgcgttcagaaaacttattagttgctatttgagatgctcatccaggttcttcccaatgtatgcacactttgtgcgacttcctgggtcgagaataacctcttcccattcctcaattggtttcaatagctttctctcatcttgaactcgggggtcgagatcttcatttttcttttcattttcttctaccaagatcgccatcaactgatgaccaactttcctatgctctagctctatgtgagagcaatcgtgagccaacatctggtcaccccgcaccacctccactccttctggtggttggaatttcaaggataggttcttgatcgaattgactgcccctagtccgatcaatgtaggacgacccaacaatatgttgtaagccgatggcaggttgacatccaagaaatcttgcataacagttgtagataggggtgcctcgcccaatgttaatgcaagctcgattatgccaagactgggaatgctatctccggcgaatccacaatgatgcaccatacaaggccttaatttggcttcctcgagccccatcttccttagtgtttccttataaaggatatttaccgagctcccatcgtctattaacactctcttgaccctttattggcgagttgaatggtaattaccaatgggtcgaagtgaggatatctcatgtttttctcatcttcccctgtgaatatcatgggaggttcttcgttttcaccttcttgaaaggttcaggggtgaatgccgactacttgttctttatctctttcacattcttttcttggtgttattactttaactcgcgatatgtgaccctcccgaaataactaggatgtcctctccttcaacagggagaggttgtaacccctgactgtttgggttattgggcagactgggctggttgtatccatggccttgccctttcacgtactgtttaaaatggcctcgagcgatgagactttctatcttgtctttcaattgacgacattagtcgatcgtatgcccaatatccttatggaacttacaatacttgttaggatctcttttgcttcttgaattcctcatggcctcgggcttgccaaaagcaaccttctgctcatgtgcgaggtaaatattctcccgagtttcattaagctcggtctaaatagtatacactggcatgta

SEQ ID NO: 233182 - DNA, 896 bp, Cannabis indica
aattaaaaaaatattactaaacgacaccttagaaaatgcatgagataaaaaatggaggcatttctttctttctttcttttggaggtggtcatatatattgaagtacttttttactaacttggtactcttgcaaattatgactcttttattttccaactcattgcaaagctttaaatggatactacgtacatgttgtagtatttttaatcacattttaatcaagtaataattgtctcatagatatgcactctctgtaataattagtaacctccccttgatagaacatacccaattttactgtggtaaacacaaatagagtcatgattaattactttttgtacaagaaaagatgttgtccatgggagtatagcaacgctaagctatatcattagattttattgtgctctattgagatttttgattttttttttattattatttatttactattatataaaattattttaaaattttataatgcagttgaaaaaaattgcataaaaaattgtaattttcccttacttatttttctgcttcattttataaccgacacaataggtgaaaaaaaaaagtgtttcagcaatttatgtgtcattttataaacgacggtataattttttagtgacggttttgaaatgctacaaataattttgcgttattttcaaaccgacacataagatataaaagaagaatgtatattttgtgacggatttcaaatgaagataattgttttttgcgtcatttgaaaaacgacactaataaaaaactttttgcgattatggaatatatgtcaattttttaaaccgattgatgcaaattctataaatgacaattagaaaccgactaaaattgtactttttgtacgtagtagtataaggttacatttggcaaatgca

SEQ ID NO: 233183 - DNA, 594 bp, Cannabis indica
gggggagtttcatgcccaaaatttcttccaaaaaacttcgagtgctgctgcatcttgattattctctccattcgtctcttgcatcattctatatgcactttttaccgtaaagagacctgaaacctcaccaatccaagtgattttatcttgactgtgaccatattgcatagggatttgtaagatgagtctttgatcccattgttcgaacaagtcaaccacaacttcttcatcccaacccgatccatttaatgacagtaggttgcatactcttgcactagaaagagcagggtgttgagatgaaacaaacggattctgaacatgaggaagccaaggttcacccaagactgggatagaggtgccatctcccacagtccaacgaacacctttaagcactaaaggacgagcttcaagaacactacgccagacataactggtgttgttaccaatatcaattgtgaaaaatgaacctcgaggataataccttgccttaaaatttcttgaaacaagcgtatcaagttttgtaagaagcctccaaccttgctttcccaacaaagccaagttaaaacttcttaagttacgaaaacccatacctcc

SEQ ID NO: 233184 - DNA, 848 bp, Cannabis indica
gagcgcattttccacccttccaaacattgcataagctttgtccttaagaacttgaaatccttcttcttctttctcgaaaaaacaaaagggttgcccaagtatttttcgacttcattgatagtactaatacccatcttcttttcgatattctcccgaagagatttaacacagtttctagagaatagtatgcccgatttctgtttgctgcataattgacccgaccagtcctcaaacttcttcaaacacacgccgatgtttccagctttaaccgtattggctctggtgaataggagagtgtcatccgcaaacattaaatgagacacggcaagggcatttcttgagatctttatgccgtgaatttctccattatcttgagctctatccagaattcttgacagaatttcgttacatagcaagaaaaggtagggagacatgggatctccttggcgaagaccccctccccggcctaatcctcttgagcggtttcccgtttaagagaactgaataagagattgttgttatgcactgcataattaagttgacaaaatccacactgaagccgaaagctccaagaacttttttaagaaagatccattccaatcggtcataggccttgtgcatgtcaattttgatagccatgaggccaccttttccacttttcttattgatcgtatgcactatttcttgagttaaaatagaggcttcagcaatccacctccccgggataaaggccgattgattagaggacacaagccgatccattacaatcttcagcctttgagagataatccgactaatgatcttgttgctcctaaaatcgcccaatatacgtggaccagtcaggaagg

SEQ ID NO: 233185 - DNA, 1455 bp, Cannabis indica
tgatttatgcttgaatattaaaaacaaaatcaaagattccaccagaaatttacaagcttcacatgccctagaaacacattctaggcggctaatgcttggcttctccgaaccaaggtaataataattcactaatccaaaaagtgtatcttacaattacaaatctaagatatataagctttttcaaaatacagtgtagccttaccctaattaaccaaatccctcggttatatacataagatccctttgtgtcaatcctgaactcccttaaacacttttctcaatctgaaatcccttcagatcttcaagcctaagactcaaattaaaatcccttcagtgctttcatctcacttttgatcttgcatagaaccttgaaccatctcccatggagttcctgcaagaattcgatacaaagaagaaacaaagataaaggaagaaagggatattcgatccaagattcaatatcctctacaatattagggttagtcaaaatagttcaaaccaatgaaacccaaaatggatagctgtaactaactggacaactaaaaactcaaaaaatcgtttgctgacatagagaatcagtaacagtacaaaatatagacttaacatcaagcactccagacatgagtctgagacataattcgccacacataaaaataatgattgtgatagagtgtttctttagtttttgttaagcattctattaataggacatgtcatttctcaactagagtctcttataaatcatcatttttttctagagtttcctatttcctttaattttaagactattttgttgaattatttatattaatgaagtttaaatttttattcaaatatatatgatcaaaatatttttaatttatgaatttaaatttaattattaaaatatatataactaaaaatagaatggtgaataaattgatataatttatttattgatcaaatttgagtttaaagtattaaatgtgtgtattttcaaaatacaaagtactatatgagtattattgaaaacaaatgataaatagttctgtattttcataaaatacaaggcatcaaaccaatatatttataataggcattatttaaaaaaaaaaacataattaaaaaaattacaaaaatacgattatatggaattttaaatatttttaccgttttaagattttatttatatataaaatacgttcttttgtatgtttttatgtcgtacacttattattttatttttggttttatggttatttgtttattattttttttattattgtttgtatgttgtttgtaatgttattttcttcattattttttattgtatttttttttgtttgtttttggttgttattttttattaaaactaccgtaaaaaaaactttgttaaaaaattaagttaaggttttaattataaatttacttccaaaactaaatatatatatatatatatatggatgtattcttaat

SEQ ID NO: 233186 - DNA, 2461 bp, Cannabis indica
aaagtttctgtttttggtaaaactaattagaaatctttgacagtgtgtgcattgtactcttgaatccctacttgtctaactgatatgtttattttgaatatttgcttttgtacaaatgaaaaatctaggttgagcattgtactgttcatgtacatttgtgttgagtggtggaattggttttatgtggtcttttagggtctttaatgggttattatgaaccttttatttcttctgggtttgtaaatttatttggacactttttcattgtgtggagctattaatgcatttgtgtgtatgtcttggtaaagctagtgagttcagtatagtgtttttaaaattgtaccctaaaatcggtacgatcatactttagtttttgcttcttccaataaggatgatagggggttatgaaaataacaccagagtcaatggaccggtctgaagagggtaaagctgaataaatacagccagatttctcaatcttagtttttcaatcgtcacacatttcactcaaaactactactataattgtcattgaaaaaaaaaaagaaaagttagaaagtgttttaaaacaagacatgataatatatatatatctagtcaatattgatggacttaaaaagggatttttctagtagtgtatatacatagattctagatgtaaacttgggttaggacctttcatgtgcaaataaattaatatatatataatgttagtgtgggtttggttatatatagtatttttttctcaaacttttgcttttgcaactctctctcgagctagtgccatggccaaaacaagggaaaatgttcaagctaagctagagatttctgcgaagaagaagaagaaaggtaaaaaatctactactggtatgaagaaaacgaaattaatgaaggaagtattgggagttgaaccgctggaattcactgatgaggatgaagatcttgaagcaaaatcgaatgaaggaaaattccttaaagatgtttctcagcctcccttatctccaagatcatcgctcagggcaattcaaaagcaagaagaggttcgaactaatttttctgtgttcttagaagtgaatcagagattctcgaatgaagttttacaaggactccaacccacaccccatgttctcagatcagaaggagtggttagaaacttggaattcttgctttctaactcgaagaaagcttctaagatcaagatcactaaagatgacattgatgaggaggtagcttactagacctcatcgattgtatgctatgttttaggagctaatcctcctttattagtgcttgaaggttttggaaggaggatatggaaggataaagtggacaaggtaggtatgctttcctatggaattttcttaatctgtttctcttctatagaagacaaagatagtgttcttacagggggtatactttctttaacaaaaggtcggtcatcatgaaggactaggatctgaatgtgaatttcaaaaaggaagatataagaataattctaatcttggtacaattagaagacttagaactcaaatattggggccagaaatcattatacaagattatagggcaacttgggaaaccgttaatgatggatgaagttacaaagggtaggaacaaactaagctatcctagggtacttattctataaatcaggagtttccagagatgatagattttgaagatgaatatggctcgaatgttagtgtgatattcaattatgaatggacgccaattgtttgtgttcactataaagggatgggtcatgcagcaccagattgcaggaaaaaagaactaaggaaactggagtgggtgattaaaaacgataacaagaagaaagaaatcacagaggataagggtggagaaagtgcagacacatttaaaccaattattaatggctggaaaattaaacctaaagggcctgtagcaggcatttctacatgaaactcctttacttttctaagggacacagagaatgtagttgagcaacacaaggggcaggaaaatacagaagatcatttgagcactacaaaaggaaggggagatcctcctctctcaaatcgataaagtcctcagttagaacgtctgagggatcaatagccagtacaaacaaaatctagttaagcaatttattgctcaccaaaaaattggtcttgttggtctcctcgagatgagacttaaggctccaaagtttggagccttatatgtcaatatgttcttgggttggtgtttcactacaaataatgtgtggcataaaggaggttgaatcattgtggcttggaatcccttgaggtttacaataaatatcctaagttgttctagccaatttattcatctctttgttactactgtagacaagaaaaacaatttctatgtttcttttgtgtacggttttaatgatgtggatggcaggaatttgcttgggaaagaattacaaaggtgtaatatgttgggttttatgccc

SEQ ID NO: 233187 - DNA, 1813 bp, Cannabis indica
tgtagtgggactcttgaggaattagcttaatttatttacagcaaaggagatgtcggggcgagtcattgttagatactatagagcgccaatgatgctacgatattgttgaacatcttggagaggctgacccgaattgatagacaatttagttgtggcacacatgggagttgactgaggttttgattccagcagatttgtcttgtgtaatagatcccgtatgtacttctgctgagtgagatagtagttgctgccacttcgatatgcttcgaaacccagaaagtagttcacagtacccaactttttgagatcaaacttggcatgtaagttgttgattaggcattgaacttgatgcaaactcgagcctgtgatgagtatatcatcaacgtaaactagcaggagtagaagttgatcatttttgttgctataaaataggctagtatcggccttggagttgagaaaacccagctgtagcaaataacttttcaactgatcaaaccaagcccggggggcttgttttaggccatagatagccttatttaatttgcacacatagtcaggatgttctttgtcaatgaagccttgaggttgtgtcatatatacatcttcactaagctcaccattcaagaacgcattgtttatgtccacttgttgaatgtcccagcagtttgtggcagcaagagtgaaaagaattcgtatggtacaaggctttaccacggggctgtatgtttcaaaaaaaatctattccatgagtttgttgaaatcctcttgctactaatcttgccttgagtttgttgatcgagccatcggggttgtatttaattcgaaacagccatttgttggtaactatggtcatgtccgggttggggggaaccaatttccatgtctttttgttcttgagggctgtgaattcatgattcatagctttgttccatttagggtctgcgagagcttgtttagcattagatggctcaataatagttcttatatctgcaagatacacttttggtttaaatatgcctttcttggatcttgtaaccatagggtgagtgtttgtgtttgggacactaggagggggttgatttgtgtggacagaactcgatcttgttgagtctgtggggcaaggaactcggtttaggcttggtgagacagcatctggttgtaagggatcggggaaagggatgggagatgactggtttgactggacaggtgtgtgtgagatatactcgggctgtgaggggagagttgaagtattttgtagtggtacttggaaatcatttgggtttatgactactgttggggatgtgggagtggatgtgtgagtaggaaatagttgtttgtatgggaattcagattcattaaattgcacacttcttgccacataaattctaccactagggtgtagacatctataccctttttgattcatactatatcctatgaacaagcatttggaggatctaaaggacactttatgagcttgatagggtctcaagagaggaaaataagagcatccaaagatcttgacaaggttataatcaggggcatgtttgtacaatttttcatagggtgtaaggtagttgttaactggagtgggtagtctatttatgagataagctgctgaaacataagcttcccaccagaagcttaaaggcatttcagcttgggccaagagagtcaatcttacatccacaacatgcctatgtttgcgttcaacccgtccttgttgttgatgggtgtggggacatgaatttctaagaaccataccttgggcatgaatttccactgtatttatattatgaatcaataacagagt

SEQ ID NO: 233188 - DNA, 2166 bp, Cannabis indica
cacttgtgcggattggatgttgaattgaacatagtaaaagtaaccgataccaatccaatccacacatatttataacaaaattaaaaattatatatacaataacattttaatgtaaagaaatagtaatttaaaagtttaatacatataatacaattatattacaaaacttaatagataaaatgtatattctattcttatatattttttttctacatacaatttaaataatttaaatattttttatatatacaatttttttcctttgaatttgttatttgttattttattcatttaatgtgttgttggagacataaaataactataatttgtttattttgttgctagttatgtgaaaaaaaaaaatattttttttcatgaatattaaataatttaatattaaaaagtaaccgatccaatccgcacttttgcggattggattggattggatttgagctattgtgcggattggattggatccaaaaaatgaaatccgcacttagtgcggattggatgttgtttgaccaaaaaagtgcggattggattggatgaacaaccctacgaggcatgtctactctcaacttggattagctgaatattagctcaattcaactaaaaactactttttccaagcaaactaagacaaattgtaccttgcaagaagaaaaaagttcacctcaaacggctcacatgaaaatcatatttttggttagggtttgccaatggagtttaaggatttctaacaagatccaaaatccttaaactaagctagaggagaaaaagaaaaaaaaattgaaaaaaaaaaaaaaaaaattttggagaacaaattacctagaaaaatgaagaaaacttgagggatagttgaagcaagattctcaagctctcagtttcttctttgggtgtgtgaactagtgagaaaagtgaatagaggagttctctatttataagctattgatctcctctattcttaagtaaaaaattactgaattttaatttaaatttaaaaagataagagagagaaattaccttattttttatcttttctctccttactttttatctttcattttcaaattcccttgttcccaaaggaatgggatttcaaaattcgtagtcccataagaagacattgaagaactgaaataattgttaagattgctaaaattgatgtccacctgttagttttaagagaaataggcttagttcacgtaataaagttaacctcacacaagtgtaaagttgacttagggaaaaatatttacctgaaaactgaccttggtgacgtggacatcaatatatgacatgtggcaagaaagaaaacatcctggagttgagtaattcctattggttttatagtactaaattaggtacgcaacggaataaatgttttcgattcttatcataccatatctctaagatcaccacaaagtaaaatatagatgaaaagattatttatctctcgaagtatgtcagggtatatatcctcgaatctttttcgtatgttgtatccttagaacggtgacatcaaactcacattgatgttccagatctaccaccacacacaataactagtgtgggctagtacaggataaaaaaatgtatataaagttctttttctcaatacatgagcaaatacaattctatagtgttcatggaaaaaagagattaattggattaatccatttagatttacaaaataatatgttaaaatgatgtacctctgaatttaggtatattaaataaacccaataagtcttcatgcattttaagatgtttgtttggggaactttggccatgtcaacacgtcccgtttattgataattgagggcgtcaatttctcgtatccacgaatagcaataagtcgtgcaatgtactttgggttgcatatcaaaacaccctatccctatgtgttaatttctcgtatcaatatgtagacgctctacatcacgatatcctattcactttggctctaatttaatagcttggtcatcaaagaagcaaaatatacttttaaggtctaacattgaagcagagtactgatcccttgaagatgcatgcatcaatttaagtttgaggaggagtgttaaaagcaccgatatagtttcgtagttagttaattagttacaattctaaccacgtacctttctatcagtcttttagtgagctgaa

SEQ ID NO: 233189 - DNA, 5750 bp, Cannabis indica
ccctagaacatttccaaggcattaaaacaacccagaaaccacaaatacgaaaaatgccattggagctcaagctttgagttctaaactcaaacttgagcaaaaccacctaacatgcattcaaactagcttgaatctacttaaacaagcataactaagcctctgtaaacaacagaaaacaaccaccacaaacacagcaaccaaattcttcattttcttcaaaaatcacatttttgcatagaaaaatcataactttaaataatctaacaatcaagcattacaagaagcttaattaaactctaatcaacatgcttacatctcagaaaacaacaacaaaatcacagcagcaacaacattacaaactcatgcatgcatcaccattttcatcatttttttcaacaaattaaagagagaaagttagaaatcacataccacaaacaagagttcacaattataggttgaatctagctttgaaaattgaagaaaaacccagcctttgaaccccaagtaaccagccgaaaatagagagaaaaagagagagagtgtttccttgaaaattttctaactttgtgattttttgtaaaatgaagggaatgaaaaaaaagccacttatatcattttatttcagccaataattaaacaaataaacatttattttcaaataatcaagtcactaaaagacaaaacactaatggggcaaaaagaccattttgcccctccaccctaaaaccacataaatcatactaaaggggtattttaattttcataattaatcataaacactgctaatttccaaattaactaagcgggctttacaatagtagaggaattggtagatccttgtttgggtgtgacccagtttcggtcgaatcggtagtgacacactggggcggtatgtccataccgaaggcatagttgacacagcggacgaccttgtgagtttgggccacgaatgttgcctctgcctccaactctagaagattgaggaggacgataggggttgttcctcgcacctgtgaaggcaacattagcttggagttgcatagagagatcagtcatggaggagtgatgttcgagccgagtctcatgagaaagtaataaggcttgaacttcttcgaatgagagaacatcgcttctggcagtgatccccgacacaactggatcgtactccggtccaagaccatttagtaactggagtatgagatcttgatcgacgattggagaaccggcaacagcaagagaatcagcaattaattgaatcttgtcaacgtaatcagagatggtttggctgccttttcgtattgtagaaaattggttcttgagttgaagcaatcttgctttggattgactcgagaacttttttcaagggcgcgccaaaccgagtgagaagaagagaagcttgcaacggaggcaagaactccttcggtcatggatgatctcagccatgatagtaatagctgatccttgcgtttccaccgactgtactcaagatttggttctccattgattaaacgttgcggaggtgggttgccagcaagcaagatctcattcagttcgtgtccgataacagtagggatcacctgagaagaaaattagttctatcaagtttaacagttagaacagaggttaaagaatgtgaaaaagggttccagttggagttcagctggggaggattcgtggtggcagcagtcgacgaggttctgggagctggagcaggatcggaggatgcggactccatgaacgatgttagtgtagggcaactgataccatgtgagaacttcagagtatgaagaacaatgaaaagaaaaaacagagagagaagcagagtatgcaaaaagaaataaacccataactatgtttattcattgaaacaaggtctatatatacacaagaaaagatgactaaagtaagaaagctgttacaaacaaataacagaaaacagttagagaaaactaactgaaaacctgacttaaccaactatattaacagtattgggccttgaacttgggctttggtaacattactcccctcctcgaaaaccaccttgtcctcaaggtgggaaagatcatataatgctttgaaggcagagaaatcttcccatgtcgcatcttcgggagagctcaaagtccactgcactaatacttgttgtattggttgggcattgaccatcttggtacgggtggccaaaatagcaaggggaaccataaggggtttattggtgatgctgaactcgggcaaaggataacacgagggtgaagcgcgaccatagaatggtttgagaagagaaacatgaaatgtaggatgaatacgactctcggctggtaaatccaaggtgtaggcggctgtaccccgacgagcaatgactgaaaaaggaccaaaataccgtcgacaaagcttggtattaaggcgtttggctaccgtagattgacgatacggctgtaacttgactaagaccaagtcacccacctgaaactcatgatctcttcgcttcttattggcttgttgtcgcatacggttttggctttgatgtaagttttctttgagctgttgaagaatggcatcacgggataagaggtcttcttcaactgcttgtatgggtgtagtgccacggctgtaagcagggattgagggtggtactcggccataaactgcttgaaatggtgtcattccaatagctgaatgatggctggtgttgtagtgatactccgcccaagaaagaaatttgctccattgtttcgggttgtcggttgtaaaagcacgcagatactgctccacatatctgttagtaacctccgtttgaccgtcggattgaggatggtaagctgaactcatgtgtaaagtagtgcccattagttcaaacaacttcttccaaaaagcacttgtgaaaatggggtcacggtctgacacaatagtgcgtggcatcccatgaagtcggatcaccatgtgagtaaatagatcagcgaccttggtagctgtatactgattcggtagtgctccaaaatgggcatatttggtgaacctgtcaatgaccacaagaatattagtgagtccataagaacttggtagaccaactataaagtccatagccaaatcctcccaaacccgttccggaatttgcaacggttgtaacaatccatatggagcttgcgtagatgctttaaccgtttggcacactagacaagattggacatatttgcgtacatcctggcgcatcccttcccaaaaaaaatttgcactcaggcgaagaaaagtacggtcaattcccgcatgacctccaatgggtgaatcatggaactcacggatgagagtatttttgaggtgagagtgcttactgaggacaattctgttcttaaaatacagcaacccttctcgcgagtcgtagtgtggcaaggtattgctttgaagctgaagttggtcgtgaatcaagcgtagatcagggctggtgacattttcttgtctaatttcttccaaaacatcaaaacaacctgaggacaatgccgtttgcaaccacgaaagtgtaccatcagacactctagaaagggcatcagcagccttattttccttacccgacttgtattcgatcgtgaattggaatcccaataacttctgaaggaattgttgctggtctggggtttgaatgacctgagtaaggagctccttcaggctcttgtgatcagtgcgaatcacaaagggccgccccaataaatattggcgccatttggttacggcttccacaatcgcacgcaattccctcatgtaagccgaagtaccaacaaatcgaggccctaactttcggctgaaaaaagcaatagggtgacccgcttgcataagaactccaccaattccagcattggaagcatccgtttcgatcacaaattctttggagaaatccggtaaggcaagaactggcgtggtggtcatagcatgcttgagtgtctcaaatgctatggtagcttgggaagaccaacaaaaattatccttctttaacaagtctgttaggggagctgcaatggttgcataatgagcaacaaaacgtctatagtaacctgtgagaccaagaaaacctctaagctgtttgaggtttttgggttgtggccaatccaccattgctgccactttttgagggtcagctttgacaccttcagctgaaaccaaatgacccaagtattctatagagttctgaaaaaattgacatttactacccttagcaaagaacttattctgctgtaacaattgcaatacctgtcgcaagtgtatcaagtgatcttcccatgacttgctgtataccagaatatcataaaaaaaaaacgatgacatggtgccttaggccttgttgaaagaggcgattcatcgctgcctggaatgtggagggcgcattagtcaaaccgaatggcatcaccgtaaattcataatggccctcgtgagtacggaaagccgtcttgtgagtgtcccgaggatccattcgtatttggtggtagcccgctcgtaaatccatctttgaaaatacttgtgcaccccccaattcatctagtaactcatcaatggtgggtatagggaaacgatctttgatggtgatgttgttcaaggctcgataatcaacacaaaaacgccatgttccgtctttctttttgaccaatagaaccggggaggagtatgggcttgtactgaccttggaaaaaccccatgatagaagatcacgtaccatcttttcaatgacgtccttttgaaagtggggatatcgataaggtttcacattcacaggggctgaacctggttgaagaaagattcgatgatccacacttctacgcggtggtaaatgtttgggctcttgaaaaacctctgaaaattctgaaatcaattgtttccccattggtggtaaattctcttgccaactgctatcttcacgctgatttggacatgcctcttttgtcactgtagttaactaatatacttctctaatttccccttcatgaagcaatgagtgaaattggtgaaatgttagctgatgtaatcccgagtcaagtgaaccagccaacttaaccgcctttccttgccactgaaactccatcgtcaaagccttgtggtcatgtaaacacggaccaagagtttgtagccattgcatgcctaacacaacatcaagaccccaaatcagtagcacatacaaatcaacagtaaattgatgtccctgcagccacaaatcaactccacagcacatttttgaacacaacaaggaattaccattgcccatgtaaaccttgaaacatttggtatcttcacatttcaaacccaaacggttagctaaagtttcttgaataaaattattattgcttcccgtatcaataagaacctccaatgtttctttaccatgctttgcactcaatcgaaagattctcgaattcaccgagttagataaagtattaagacttacctcatcaactggtgagtcttctgattcactgttgtccggctcagtggtgggtaatgtatccgagtcatcctcctcttccgtgccacataaaaccagcatccgattcttacatcgatgaccgtaactatacttctcatcacaagtgaaacaaagtcccttctcacgcttttcgcgtatttcagccggagttaacttcttcataggcagcggagtggcaccagttttgaacgattttggccctgtagttgctgttggtgtagacccgtaagaagaagatcctcccatactttgagctatcggacgtgagtacgtagcaggacgagtg

SEQ ID NO: 233190 - DNA, 1886 bp, Cannabis indica
ttttggtagtgttttgatgagtgtaaaatttgggattttcgagtttaaccgtttgtagaaattcctaggagatcagaaattgtatttttattatagcttttcactcgggtgtctgttttggacgttctatatactgtttcgaagcttgcaacgagctctacaatatggtgtatgttttagagataaaatataagttttattttagtgtatttatagcgcaaaatttagtagaaaaccctagattatcttatgtgaatattaagcaatgttttgggataaacacttattggtttactattgttgtgacctagggccaagatcattggggatagttctccacttgggttggtcgacatgtatgaacctggattaaaggtaagaaaagtatattatattgcatagtacgctgtattgtaatataattgatattgttataaattgattaatattgagatcaaaatatgattacgattgttatataataaaaagattgattggtaaagcagtgataatgtgatgatactgtggacatattatatgggctcacctaattaggtgatgcgatatacttggcgacgtaccaggcataggtataggcgtcagtgacatatgatgagtaccgagcgtaggtatgagctcacctaattaggtgatgcgatattcctagcgacgtatcggacgttggtacgagcattagtgatagaaaattacctatttatagcatagattgaaatcattgttgggtttcttcctggccaggtattgagcgtaggtacgggcgtccgtgatatatgataagtaccaggcgtaggtacgggcttgtctgattagacaatgcagtatattggagccaagttgtggcacgggctcacctgattaggtggtgcaataatattgtatatgatattacattatgacacgggcttgcctgattaggcaatgcaaatatatgagcatatttatttctatgcatatggctggttatatgatctactatcaaatgttatggttatgatattgtattatgatacggacttgtctgattaggcaatgcaaatatatgagcatacctatttctatgcatatggttgattatattacctactgttgaatgttatggttttgtattaccagatatctatatactaatgcttattcatcgcaaataccatagtgatttagattttatcttatgaacaatgcgtaatgattatgtataaatgataatattcaaataataaactatatgatgactcacgagtgctatggggtgcaggtaagggcaaggaaaagttagagttgtcatgaggtgactaccttctccagcaatgtacatattgacctcacaggcatgtgtgctgagttgccagaagttgttttgggcaggctatatttgctgtatattttgattttgtgtttaaatagtatatatttttttagtaaatctttttataatagggatccccggaatacgctttttatgttgttataatgtctatttttagtgttttattttagtcaagtttttaatattatcacagttttttaataattaattattctattagtattaaactattttataaaattacacacgtggtgtccctatagattagggcgttatagttgttgagggtcatttctctatcagttgaggctttggatagcccttgtccaagaaaactttgtcatgggcttgtctaaagctcagtcatgaccgagtgacaccctctccgcgcgcaagtccacctacaccctaggctagatattttttcaaacttcaaaacagtataagtaattcaatttacatccaaattgagtttgtaaaagcaaaagttcattaattttccatctactttctagaaaaaatacttccagtatgaaaa

SEQ ID NO: 233191 - DNA, 796 bp, Cannabis indica
ttcttgcaagacaaaaatatgcaagaatgtgcaatcgagacatagtctagtcacacactatgcatgacatatgagtaaagacggcacatccaatcaacatccaatctgtacaaatacagattttagattttccaatccaattcaatctgcacaaatacggatattcgcactttacgaattgaattgagttaggctttggcataattgttgcgaaaaagaaaatgcccaaaaataagtttagaaaaatttaagaataaaagaatgatctcgcaaatagtaggaataacgggacttacgagatttctaaaaatttgtataagcacaagggtaaagtcatgtcatccaaaagaactagtctttgagctctttcttgttgggaagatagattatgatcttgcacacgtcaaaatgtgttctgagatagaaaaggcccccataacaattctgcctcgctggagtcactttgagtgtgtatagacagctgatctcgtaaggcgagtgaccttcccatcccatcatgtgatactataattgtaggaatttattttatcacggtctagatttactaacatgtatgtttgattaacagcctaaatatgaattctctaatacaatgaaattaaacacataagagtttagaaaatcttacattgatgcagcgaaataataatgaatccttccactcagatctctaacccttgttcttttcctatcgcagagtaataacaagatctgagtctgaatattcttctctccttcgagttggttaccactgtcttccgcactatgattgagt

SEQ ID NO: 233192 - DNA, 1205 bp, Cannabis indica
tcacatggagagtatcttgaagtgacaggggcaaaattggtacaatgttttaaaaaagaggtaaaaatgatagactttaaaaaaaataaaataaaagaggacaatataaaaaaggtataaagtgtaatttcttcaaaatataaagtggattgcccacacaaattaatggctcacgtaatattaattttaaaaataattattaatatttaaaaattaaaaataaaaaaatttaaaacatatttctttttagatattgacggctaacttacaccaaattttaaattttttaacatttaaccacaaaaatctaaaataattttaaaaatatttttttttatttttttttaactttttcttctttttcttctttctttcttaaactttttgaaaccctaatctctcaaccctccttcccacatcgaaagagagagaagagggcagatcggggttagattttttggatgtggggttcagttctgtggcccgtctgacatggggtggtcgaagaaggccgacattgtgcaccgtgagagagagagagtgtgtgagaggggagtcggagaaggttgggtcgtgggttaagcgactatgtgctagggttttttcagttaagaagaagaagaaaagtaaaaggaaaagtattaaaaatggaatgagagtttaggtagttttgccccaaaaaatcgatttttgtggttaagtgttaaaaaatttaaaattcgggtagtttagccgctaatatcccaaaaagtaaatatttttaatttttttctgattttttaaatattaataattattttatgaatttaatattatgtggatcactacaaattttccacgtgtacaaatgtgtatacgtgggcagtccactgtgacacttaactttaatttttggacgaagaggtacagagcaaaacgaaatgggagtttaggtagttttacccttaaaaaatcaattttttgtagttaagtgttaaaaaatttaaagtttaattagtttagctgagaatatctctatgttaatatactaggcaactaatccccattgcaaatagtatatatcacatccattgattaagtagacactttgataatggtgaattgcatttgattttgtttaaaagaaaaagaataagagcgcccccaacactttttttactttactttttaaaataccatacacttctttatatttttcttagtat

SEQ ID NO: 233193 - DNA, 500 bp, Cannabis indica
agtattttactcaagttgttcttgcaaaaatttgtaactctttgcatgaagggataaagctttatttatagactaaaactgggttctcgggtgaacctggacccgttagggttttataaatgaaataagctcactaatagggtaaaatacattataatgcttactttgagttgggtagaggcccaacaaggagataattgtcgtccatatagtaatttaccacgtgatggtgacagctgggcgtacgctgctgggtgaatagtagatgtcaagttgtaatattcccagattagtaaatagataaataatcctaattaaaatagattaatgataattgagtaattgtattatcattagttatgtaaaaattatttgagaagtattgcatttaagatcccatttatgagttagggatatttttttaattttaactcgagaggggtaagattataattttgatgtttattttgataatgtactatattgttatgtagtatgtt

SEQ ID NO: 233194 - DNA, 1123 bp, Cannabis indica
aacattaaatgttatttctgatctatattaataagtaaatctaattatattgaaatgggttttatttaaggcataaaacccaacaaaaagaggatcaccctgtcttaaacctcgtgtaggaatgataggcccaatttcatgacccccagatgtgatagtgtaggagacagaactaacacattgcattatcaacttaaccactagctcatcaaaccccaacctcctcaacataacccgtaaaaagccccactcaaaccgatcataagctttgctcatgtccaacttaagtgccataaacccctccttccctgtttgcttccttttcaaataatgcataacctcaaaggagattagaatattatcagttatcaatcttcttggcaaaaagactttgggtttcagaaataacacttgggagaacaacttttaagcgattagtcagcaccttggatacaatcttataggccacattgcataaagcaattagtctaagatcatccatactctcaggtttagacttcttcgagataagcacaatatttgtttttttaaaataaacaggcaactcaccaaaagtaaagaagtgttgaactaaccgaatgatgtccttgctgataatatcccagaatttttgatagaaaccaggattaaacccatcaagaccaggtgatttatctggatgcatctggaaaagagctttccaaacctcctcaacttcaaccggaataacaagagtctcattcatagcagtcgacacccgactatgcacacaagtcgtgactctttcccaatcaatttctgaagcggtgaacaactctctaaaataatcttcaacgacactaggtaaaccattttcccaatccacccaaactccacttctatttttcagtgacaaaatatgattgttttttcgttgggtacttgtacaagcatggaaatacttagtgttttggtcacccgattgcaaccacaattgcttggatcgttgtttccaaaaaacctccttctaagccaggacttcaaataaacgattttgagcctccttgtatctattaactgaatcaacatcccttctacttttaagcagcttcattattttattacagttgcttattcgctgctt

SEQ ID NO: 233195 - DNA, 1678 bp, Cannabis indica
ttaaaataaatagattcaaataagtatcaaatgaaaatacaattctttaaaataacgagctttagttataaggatattcgatctccattgttggttctacacagttcttgttttagtgagtaatcatccataatggatgaacgttcattagtaatttaacgccgtagaatctcaaaagataaatattattgtaagtgttttattctcagtaacgtccaccctaaagtggctgctaggagtaagacttacaatgtatgaaacaatagtggaaaatcttaagatagaatgactttgactctcacctaaacgagacaacgccggattctagttttgatcgaataaaaggttgctagaatggtatccattttagatgagttgagtactctattcactgaatgatatctttgactctcgcctaaataagatcctgtatcagtttgttggaaacattagaaattatttaagatgtgtttgaattgtattttcacatgtctttcttacttgctaattgtataataatttctgaatgtgtatgaatttatattgaaccatgttgttttgtgttattaatgttgtataatttcgaatcttcgttgttggtctaacttagcttgttgtttttagacaacataatagtgttagatctcgacagataattattagtaaatgcaacatctagttgtacatccaaagatgacaactaagactagtatttgcaatatgaaacaatgaagaatttataaaataagaataacgttgactctcgcctaaacgagacatcaatttgcttaaataatatatcattggatgaatggtttataaatcttctgcttatgatgtcattctttttttatgaaatagatggcgcagatgactatattcaaggccggccctatgttaatttgggccttaggaaaaaataagaattggggcccactaaaaaagtgaggctattggaatttgaactctcaacctcttagttgttaaactaatgaaattgccactaggctacaacacatatttagcattaaaagtattattatttattttattactaactatattttatatttatttttttgaaatggagccctgagcggtggggggcctaaggcggccgcctctttcatctcacctcaggccgccctggctatgttcctgaaattatatctcgaaatgatataaatcctcgatcttagaaatcttctacttgtatatgtttacttttggaaaattagacttggagttagattagtagtggtagtccaagctagaattattactcattgtatatttggtataaatttaagtctttgactttaaattttacatttcaaatagaaatttaaaatttcaacttcctagaatacattgaacattacagtattactttcacaagttattaatatccattttctgtcaatggattcaaactgtatgtttatgaatggattttgagtttgtattttatgaccaggatccacttggactattctaagaactctttatagtaactagacctaagtcatcaaaagaccataaccacagtattataatatctatggcatttacatcttgttcatagtggtttggacaagatcattatctgcaaagagttaatatgccaatatccactttaaagtaggatcgtctatattcacatatggatgtacattca

SEQ ID NO: 233196 - DNA, 1551 bp, Cannabis indica
cttgtttaacgtcattccctgaagtgaatacaatagttttaaataatcaatgaaattatttactactcaaatatttccagaaaaaattggaaacaaccataagatgaaataccacagagcagatattctgaagaccttttacgagaggcaaaaccataattgttttaagacctttcacgaatggcaaaactataatcgttcaaagaccttccacggaaggcaagaacggatgttctaaagaccttttacgaaaggcaaaatctgtgatacttaagacctttcacgacatgcatacataactaagaccttttacgaaaggcaatctatatgaaaatacgcgaaccacgtaaagcgtaaggtgacaagcagcaaataaagcatacatacaaaacaaatcacacgatgccaaaagtaaaaatcagtataaagtttgagtccataaataacagtactcgccaaaaagccaggaaaataagtaaaacggacattaataaaagaagaagttgagctacaaaaacagacgaccattgcttccttacaaaaaattaaaagtttgtgaaaagagtgttcactctatttccaaaattgggggagtagtggcctgccaaaatacccatatcgaaggacaaacgcgaacttacaaattgctaaaaaatatataaatgtaaaacaaataggccccctatacagaaaaacttgaaaaaggatccagtgaaaggaaagcaaggtccccaagcctaatgcagcctgctcaaagcatggacagctgcagacctccgagaagtgcagtgggggaaacgtaatgggttcaaagttgcgaaaacttgaaaaaggacccacggaaaggaaagcagggtccagaggttgtaagcctgaaaaatgttagaaaaagaagaatgatctcctgagtgaggaacttggtcttttagtgaggaagccataatgcaaaagggatgaacaagaaggaaatgcttactcagaaaaatgtcgaaaggattcttagaagaaaatggctaaactaaagacttatttatatacagaagcttgcatgcagttaataaggatgccacgaaaacggaaacaaagagccactttagcattaaaatcagaacacgtgtcaagcaaacacgtgcacccgaattgcaagaagcggcttgaagagcatatatgtctttccactttccaaagcaccccattcaaaaagaaataatgataataataaacatataaaaatcataaataataattgcacttaacggagccgcaattttcccaaccttatatggaacaatacgaaacatagaaagggacaccaaaagtaataaatacatactcttgaaaggttaaaacccaagcaagggttacaagacaaggatataataacataatatatattacgtacaaaaagagccatgaaaaaaaaaaacaaaacaaacacaaataaaaacttaaacttaaggatcagaagtgctcgcggttagggtggtgccaacagagtatgcataaagaaccaggaaacacaatggatccccgtaccaccctcctcgagca

SEQ ID NO: 233197 - DNA, 1295 bp, Cannabis indica
ggagatgtagtcgaggtcaaaaaatatttatgaaagagaatatattaaatggataaatactattttggactctgttatttacaaaataagttgttgactagacctcctcttttttttattaaatgacaatttagatcctgtatttttctaagtggtacaaaatactaaaatagtaacttgaactccatttttatcagaatgaaacttaataataacctggcctgaaggtgttacgatcaaacttgttgcagtttttgcatttgtttgtgctagaaataattttaagttggtaatgttaataaaaataattaatgaaaattgagctcagactgttttgtatcattttgaaaatataaggcctaatttattatttaacatagtagagagtttgatcgatagcttttgcaaaatacaagatttaaaaatggtatttaccttatcttaaaaaaatttaactgctttattttttttaataagttataataacaactgtgcaagacatggttacattatctaattaagaaaaaaaaaaaactcatacacattaatttttaattttgtgtaaatttcgaaagttataacccattttacaatcacacccctaaataaagtgggttaagttgaaaattgtaatttttattttttaggagattgtttgaaattatggttgagaattgagatgattgaattgaaccacaatcattaataaaggaaggtcgttggaagttacataattatttgtgattttatttatttattattatttgcaaacaaagatatataatgatgtgattgataacaattaattaattctttatatttaatataaaaataacaaaaatgtaataaaagaaattcacattaaatgaataaactttataaaggcattaattttaattatttttattttatataaatatatatctttaatttatacttttttattattattctttgttcttatattcttaaaaaaaataatctatattaaattaaaataaaatatttttaaaatacgagataaaataatattcagaataacttttaaaattaatttaaatttatttatttttaatattagagtgtactcataagaattatttgttctgcaaatctctaaattatatttttagtaagttagtttttaaactttattttttagaaaattaatccccaaactataaacattttagcaagtttattcccaaattttatttttcagttaaattgattgctaaacttttattttattagcaacactagtcaccattctaagatattgatatttttattat

SEQ ID NO: 233198 - DNA, 514 bp, Cannabis indica
caccaccaccaccaacaccaccaccggcgccgtcaattccagtcggaacagcgtttcatttttctacctaaagaacaacgccgccaacaacaacaccaacagcagagccaattctagacttgttgttagagccgccgaggaaggagctgcgccgccagcagccaccaagacagcacctgaaggtggtgaagcccctaagcctaagcctccaccgattggacccaagagaggaacaaaggttaggtttttactcataatttccccaaatttgatttttcactatataatccttaaataaagattattaatttatgaagcatatgccttaaaattttactttttagcaaagatttaagatataattcaacatttaaataaattacgattatgggtgttagttaatatagttaataagtgagtttaagtttgtgattagtttttaattctaccgttatttctgttacacttatgtaatttattgacttaagtactgagagaaatcccagttcattga

SEQ ID NO: 233199 - DNA, 1072 bp, Cannabis indica
taatatataaataaaatatgtgtaataaactaataatatgtaatatatagaaagtttcgtggaaacagaggcagtcgtcaagctcacgggttgtttaaaaaattacccggagtgtcccaaatgtaaaaagcaccatcagggtgagtgccaagccaaaaacgtgtttccagtgcagtatggtgggccattttatcagagactgtccataatccaagaaagaagaaccaaagaagaaagaacagcaatcaatccaagggatttattcactatgactcaggctgacgctgatgctagtccatcagtggtgacatgtcagttgtctatcaacggttgttcttattcagtactatttgatttgggagctactcattcttatgtatcaagtagagtaatagagagttttcataaactgtttgatgtgtatgcttcggggtttgggaccctgttaccctctggagagctaatcgtatctacacagtgaattagatctttgactttttggattgacggttatgaatttaccgccaacctaattgaattacaactatctaattttgatataattatgggaatggatttcttgtccaagaacgattgattgcaagcaaaagatgatagtgttcgaacctgatagtgccaacccagtggtgtttgtgggtaaggtacaaggatcacgcgtacttagaattacaatcctaaaagctagagacctaatgcacagaggttgcataggattcctagttacaacagtggatactagccaacctatttcaactggacttgaaaatactagattggtgtgtgaatttctatatgtaattctagaagatttacttggattatcaccttcttgagagattgaattttttatagaattagttttgggagaagaaccagtatcaaaagcactgtatcgaatggctccaacggagttaagtgaattaaaggctcaacttcaagaattactcaacttggaatttactaggctgagtttttctccttgggatgctccagtgttatttgtgaaaaagaaagatgggtcgcttcgcatgtgtatcgattatcaggaact

SEQ ID NO: 233200 - DNA, 994 bp, Cannabis indica
tgtaaagtttatttttattttcttgattatttaagtcagatctaggtccgagtttgggtcccgagtctggggtctaggtttggactcaggccaaagtctaagtccggggccggggtccggatccaagtctgggtctgggaacgggtttagggccgaatttcgagtcgggattagggctaggatctaagccctaggcagagatcaaggttcggggctggggttcgcggccgagaacaagtttgacgctggagtccgagtttggttctggatataggtccgaggtcggagtttggatttgagatcggggccgagatctaggtctgaggtcgggtctgagtcttgggtagggactaggggccaaggttcgggtttggggactgggtctagaactggagctgagtccgggtctgggtccgagtttgggtctgggtctgggtccgagtctacatttcaagaagtttaagtctcgaatcatcgaagaacaatttcaagaatcttgatttcgtagagcaattcaaaataatggtacatgtatttaaagaaattgcatgaaaagaacaaagagaatttactcatggcttggaagttcgtaaatgtgcttgaaagggtgctagtgatcgagtttcggttagagagttctttgaaggttttaggagaaaataggggttgcactaattttctttcagagtaaaaatggctaaaagagtttaaaataatttttgacctatcataatgacagttagaggagtaatattgtaatccaaaatttatattttggatttctccttaagaaaatataatgatcacgtatgttgagaattacatacaacatatacagtaattatgtcttagggaatctctaatggggaaatctaaatttagtgttaaatcaataccaaaaaactactatttcaacactaattttttttttcaattccaaccacaacactaaaattacaccaaattttatattctttattattttattaatata

SEQ ID NO: 233201 - DNA, 1346 bp, Cannabis indica
atcaaccttgatcacttcctcatgtggtttatgatgtaacatattttaccaagatcttatttacactacacaatttagcctttagttacactatttagtaacccacataaatagtttttttttcttgtaaaagaactattattattaatgaatagaatcaattataataatagagtggattggagaaggaatttccccaaccaagaacaattattatccaatcgaagagcatgtctagctaagtcatgagctgctatattagcaccacgcttaacatgagaaacggcaactctaggaaagtaggataataaaagagaaatatcatcaatcacatcatgaacaaaagaaatacaatttaaaggagacttcttgttaatggcatttgcaactatgagtgaatcggtctccacaaaatcaatgttcagtccattttcaagagcccagtggagactgtgtatcaatccatttgcttccatttcctatactgagtagcagccatacaacggcttcgaaaaagcacccataacatctccaaaaaaatcccttataacagcgccgttaccgataattgaaccatcactatcaaaagatgcatcaacatttagtttataaaaacctgatggaggtggtttccatcgaatcgggccagtgaggctagcgttggaaggacctgttggaacatcttgttgaactgaagccaaggacccagaagcatgtattggatgggcttgagctttatagaattgttggagatatgtttcagcaaaagtgcagatcaccttagcttgttttggctttgtttggtgtaattccttgtttctctctgtccatatacacaacataaggcaaataatcttctctagttcaacattattgcaaccaaccgttaaagaagaaaagatatctagaccatgtaaattgctgatattgagaggcaggtgattgaattttgcttgcgaccacacctatctttgtctcaaacaagagaacagagcatgaccaaccgactcccaatgataattacaaagtgaacaagctgctgtaggactgattttgcgatattggaggttggccgcaatggggagagcattgtttatcaccccccaaacaaaaattttaaccttctttggcaaggaaagggaccataatatgttccaccattgtctattagaatcagatggagaagaatcattcagttttcccaatctttcagctaaatgataccccaacttgacagtgtagattccactttccgaatggtgccaaaacagtttatgctctcttggattagaactaagaggaatatcaaggatacgatccacgtcaatattaccaaagtgactcgc

SEQ ID NO: 233202 - DNA, 705 bp, Cannabis indica
tcgcgaacacctcgagtggctcctttcctcccaaagaataatctgtttatcttggcgttgaaaaaggtttactgtcttttcttatggtttatgcgttatattcttttgtgttctgttcatttagtttatgttgttgcaatggacaatgtagaatcatttctgtataatattttcaattattaacaaggttttaatacttagctgatccaaacaaacaaaaatgaaaagattttacaccttgatttctaagcactaaatctaatatacacatatatgcacacacgatagagggtgaacttaaatgtggaaccaagtaattttttccatacatttctaaagttttgaattgatgtttttaaatactgttatttatttttgtatattatcagacagtagcagttatttgcaattctatgtaatttcgttctatctatctttgttcggcttctgtgtttcagtgggtgttttcacacactattttcttgtattttattcacgttaatacaagactggagtttcattttagaaaatgaaaacttttctgcacattacaaatgatttttttttttatataattatgttagactatatatagtgtatgtaatatagcatatacaaatgatatgaaatgcggaaaataaactgtaatcatatcaataatatatgcaatgaaaggatcgatgtacctccagccattgatctttg

SEQ ID NO: 233203 - DNA, 767 bp, Cannabis indica
tgaaagaaatcatatttataccttaatggatattgagattcaacgtttctccaccaaatcggtggttggagtttataccaccaccgttttttttaatgggttcgattacagtgatagaacgggaaaaaaaaagccaaacttttttactatataattttaggtattaaaaatagaaaattttaaaagaaaaatggagtaaaatagtgtagaataaggaagatataggattttttagtggtggttggcgaaggtttcgtggatttctcttggttctgctatggggtggctgcttatcgtgctaaaggaagaagacgaattggggaagatgagtttgagtgttgtatatatatatcctatgccatcggttattaggaaataacaccgatggcataggctcacacgtatcaacaaagtatgcacatatgttgtctattatttcctaataataaataaccgacgacataggtgtaataaatagtgctgaatatttttcaacccccaaccgactctaaagggtatagttaatttctacacctatgatttttgccaaaaaattgcatcaaaatgttaattttaaactaggcgggtattatcacaccttttagcttccctttttataaaatgggttgaaaaacagcctctaaatgcctatattatagtagtaaggtatgttaattttgttttaatgttagtattatttaattagcttgaatatatattgttttggaatttgaagcattacgcagtaggggtgtacaaaaattttc

SEQ ID NO: 233204 - DNA, 1394 bp, Cannabis indica
tatctactgcaacttaatatggcaataccctaaactaggagggaattaaaccaactagaaacctgaaactaacgcaaatcgcaaagttgaaattttcgggaatcttgctgcagaaaccagttaccgagttttacaggtacctataaaaccgattacccagttttctacagaaaacccaaaaaacttcaaagcttcaccaacacgattccaaactcaatcaaacttttcagacatgcatattatacccccaataaaccattttaaagcaagaaaacaactacctaagctcagaatctaaaatcactattaaagctccaagtttgagttctaaaactcaaaacttggttaaatctactaacagccaccaattcaagcttaaatcaacataatctaacatattttaacatcagattcatacctcaaacaacaacagcaacaacagcaaccaatttcacaaatcatgcataaattcactttcttaaaactcaagaactaaagagagagttgctcaaagactttaccttagcttagatactcctagaactgctagaaatcatagcatcttgaagaataaacatggaaccctagctagttctaagggtttcaaagagagagagagaaaggaaagagagacaaagctttacttttccatgattttccaattttaagtaaatgaaatagaagttgttttattgaaataaaatcagctggaaataaataaaaatctaattattaaccatcatataaactcacatgaagacaaaatcaataaagggcaaaaagaccaaaatgcccttgccctcactaaaccttcataaatcactaaggggtattttgggtaattctaaaatcccgactattctcgacattcccaatgtctaaattattgtcccgctatactaaaaatactaggatgtgattctaatagccaaacactgcgttccaatgttgccgggcacaaatcatgcaaaatttataaaatttctatatgtgacataaaaatgcattctgaattcaaataaattatcataaataattacttcaatattaataaataattttcataatcaagccctaattatctactaatttccaaattaaaactaagcggtctttacaattatccccccttaaaaggattttgtcctcgaaatatgaccttcataactcttgatattgagttctcatgtctgattctaactcccaagtggcttcctccaccttgctatttctccagagtactttgaccaaagctatggtcttgttccgaaggaccttatcctttctgccaaggatctgaactgattgttcttcatatgacatatctggttgcaactcaagattttcatagctaagtacatgagcagggtctgaaacgtactttcacaacatag

SEQ ID NO: 233205 - DNA, 1603 bp, Cannabis indica
atttttttaaagaaaaaaaatgagttaatcatttaccagcaataatttattaaaagagaaaacaatgtttttgaaagatgtaattttttttccaaatgggataagttcaaccagaggcttacataatagcaagatttataggtaaaatatcctcaaaatgtgagttaatttaaggagagaaagactaatgccatgggaatatactaatccttaaacactaatattccttttcattgttttataaattcataactaacatatcctttcaactccaattcatgtttcgtttttgtatttgatttttgataacattttgttgtaacaaatagaaaaagaatggctaatgaagtgtttaacgcattagacattgctaaaacacaatgtatcattccacagccatattatgggatttttcacagatgcatacgacctcttttgcatctcactcgtcaccaaaatgctcggccgaatttactaccatgttgaaggttcaaccaatccaggcacactcccaccagaagtctctgctgctgtgaatggcgtcgcctttgttggtacctgagccggccaactcttctttggttggcttggtgacaagttggggcgaaagagagtctatggtatcacactcttgatcatggtcatttgctcagtttgttctggcctttcctttagtcatgaccccaaaactgtcatgacaacactatgtttctttagattttggcttgggtttggcattggtggcattggtgcccgaggagccttcatagccgcggtgtttgctattgtgttgtcaactttgtttgaaattaagttcaaagctccaacttatgaagttgatccaattggttcaactgttccacaagctgattatctatggagaattgttttaatggctggtgctttacctgctgctataacattttattggaggttgaaaatgcccaaaactgctcgttacactgctcttgtgggctgcttctgatatgtcaaaggttctcaaggttgatattgaagctggacctgagagtgttgatgagacaacaagtcagtatgatttttttctctaaagagttcctttttctacatgggcttcacttgcttggcaccacaagtacttggtttttgcttgacatagcgttttacagccaaaacttgttctatctttagcgtcattggatggattccgccagcaaagactatgaatgccttggagaaatgcacaaaatagcgcgagctcagacactcatcgcgatgtgtagtacagtccctagttactggtttaccgtcctattcatcgacagaataggacggtttgtaaatcagctgatgggtttctcattcatgacaattttcatgtttgcactcgctattccttacgattactaggctcaaaagaatcaccttttcgggtttgtagttctgtattcactgactttcttctttgcaaatttcgaacctaactcaacaacatttgttgtcccggcttagatcttcccggccaaatttcggtccacctgccacggcatctctgctacattaggaaagctcggggcaatcgtggtgccattcgggttcgtctacttggctcagaaccaagagt

SEQ ID NO: 233206 - DNA, 1575 bp, Cannabis indica
gaatctagtaatggtatacactaagtacacaaccattctatcattctgaaatatttccccagaaggacttaggcaactgctagtaactaatcatagaccatatactatcatcaatatgcatatcgaatttttggagaggtaagtttgaatacaattcaaaaattcaacttaattatctttgaactgcatatccaccaaatatttctccacccctatcagttcgcaagatctttaaccacttaccttaatggttttcatcagtgctagaaattcatgaaatttcttaagcatttcaaatttctttgcataaggtaaaatctagagtgatcatataagaatttaacgataaatcatatccaaccctgaatgtacatccatatgaaagataaagatgatcctactttcaagtggatataggaatattttctcttttcaaagaatcatcttgtcaaaaccactatgaacaagatgcaaatgccatagatatataatgtggttgtggtctttaaatgacaattttttagttataacaaagagttcttagaatagtccaagtggatcttggtcacaaaatacgaaactcatattccatacattaacatgcagttcagatccattgagaaaaaaatggatattaataacttgtgaaagtcatactgtattttctaatgtattctggaaactgaaatttcaaaatttctatttggaatcaaaatttaaactcaaagacttaaatttataccaaatatatcttgagtaattattctagcttggaccaccactactaatctaactctaagtttaagttgcctatagtaagcatatacaagtaggagatttctaagatcgcggatttatatcattttgggatagaatgtcgggaatatagtcatctgcgccattcaatttcataaaagaaaatagaatgacatcataagcagatgatttataaaccattcatccaatgatatactatttaagcaaattctaaatgaaaaagctaagagaaaaataaaggataattttgattatagaagaatccaacaatgtcccttttaagcgagagtcaaagttattcttatttcataaattcctcaatggttcaaaatggaaaacactagtctaagttgtcatctttagacgtacaactagatgttgcatatacatatacttatctgtcaagatctaacactattaggtttgtctaacggatgacaatcctttggaatttgtcccattaaaaacaacaagctaagttcgaccaacaatgaagattcgaaattttactacaacattaataacaaaaaaaatatggttcaatataaattcatacacattcagaaattatcatacaattagcaagtaagaaagacatgtgaaaatacaaaacaaacacatcttaaataatttccaaggtttccaacaaactgatacagtgcttcgttttgagtagagggtcaaagatattatacattgaatagagtagtcaactcatctaaaatataaactattttagcaaccttttattagatcaaaaaaagaattgaacgttgctttgttttagtcgagagtcaa

SEQ ID NO: 233207 - DNA, 3409 bp, Cannabis indica
tttttaaaaagcagtatttttgttagtacattaatgttactgggtccgtccctgggtaaaggggaatgtttgacttgatgaataaattgagaaagaattaatttctatgataaataattcttaagggaaaatagtaattttgtataaattattattttgaatatttatatcaattatgaattgaataattaaagtaatatttaactatttagttttatttgatgaaactatattaattagttaaatataatattattcttaaataatattagagagatagaaaaaatattattttagtgtaaaataatatttattttattcataatgaaataagagaccaatgagatttaattaattattatttattggtaaaataaataataaattttatttatcgcaaaattgaaaaaataattttggattttaaaatatggcctacacgtgtaggtgacatgtaaggatccatttagtttttgttttatcattttatttataaaataaatcaaattaaaaattgataattatcttttattatttgaattaaatatattataagattatttatttaaattaaaagattaaataaatatatggtattattttgaatttaaattttaaattttaaattaaaataatattatcttttattttaaaagaattaaaaagggttttaaatattataatatttatgattttaaaacaagttttataaatacgtgttaatctaaaaaaatttcttggtgatgtggacatcaatgtttaacacgtggtaagaaagacgatgtcatggagttgagtagacccgagtcatagcagtcatcctgggaggggtccctagccctgcgtctaagttgacttcggaaactttgggatggaagttcggactttgataactcattcccaactcactatcttgtagtattctagacttggtgagtgtcagggaaaaacacaaacacttggcatcatcacttactatggccacctacatcatttttttgtacatagctaggtgggtcgttggatctgttcgtcgatcataaagtttgatttgaggcaccttggaattctttggaagcagggcttccgtgatccttatgacacacgactctatgtccacaaccatagatttggtgacggccccagtctacttctagacgagcttgatcaaagaagaaattttctcttctagcctttttgtgtcattgtctaggaggtggcgtctgcgagccttatcattcaaatggtttctgaggtcattctttcgtggcctcgccttctctcctttagcctttttgtacttagcatcaagacgcctttgaagatctgtagtggaccaactgtcatcagaatactgtcccctggtccaattgtcctagttaatggaatcactggggtaggttttccttcccctgggcctagatactttcgcactagtccccttttgcatagcaggacctttcagagcggaagggcgtccaagcctgtgagcatcggtggccttctgcacctatacaagtctattggctagattcatgcctttcctaggagatacgagagttgtagggttctgagggtcacccaccttttccttctccttatcatgtgcaggagctgaggttcaaccatcagcaaggttttctctgttgtttatgccgacacactctattgaaggatcattgttagaaacttcttcttctagatctccaaatatgtattggaggcaagccatcattctctccatttcttaagaaagcttctcttgacgggctagtttctattggattttgtgcaactccttcgacactcgagccacttcagggtcttgctcataataatacccatctttgtagtgcccgcctttgacatactctccatcatcatcttcttcctcctcttcagcattttgatttttgttaacatgtttacgattcttgcttgggtcaccctctcggttctcagcttctgatgtatccctttctctcacattgctcggctaagcttgttctagagagagagagggcttatatcttccatgaagacatcgaggccgccttgaggattcttattagtaactattttggagtatacaccatggttgcagtagcaccgtggatttaaatctttcttcaactctcaatgaaagctccaaaatttttatcgagacttttaagaaactaataaagtaagagcttaagaaataataaaataaagtaataaagaagaaaatggtttttacgtggttcaggcactaataatccttattccacgagtaactctattgaccttaaaagtcttgaataatgtcttcacgatagtgtttgcaagaaaccctaactctgccctcttggtttctcttaaagaagaagaaagcttagagtaaatttgacagagctttgactatctaattttttatcccccttcctgtgtaaatataaggatatttataggctaaatgacgtgtaaggacatgctcatgacatgcttaggatttttgaaataaacccattaatagggtaaaatatatgtaaattagctaactattgggccccaaagaatgtaattttgtgcttgtgcaatcaagcagctggacaataggggacaataatttgtaaaggacatgtttcgccaaaaagtttcaccttgcaaagtaaatgcctcgaataaccgtcaggcaaaaaggcgtatggggtgtgtacattaccatgatctgacataggagacaagatctgatcctgtgttagaaaaagcataaccatcgctaggcgatctgggtccttcttcacagtagacatctgacttcttttgggtggtcaagcgtctgtcacggacccttcgagtaaccttctaggtatcgcttagtaatattttgaacttagtcattttcggatcccaaaatgtggtaagccttccatgtctctaaagtcatagtaagacaggataaatgtccaagtatcctttgatctttatctattcccggatccgcgaagcttcttcgtgtcctagccttagaaaggggacatggttagtgactactgaaaggctatacttctcctttcatgccacatgtctcttgttcggaaatacagataacatcgatatataatgagtttcgtctattaaaatattttgacattttgaaatttttttgaaacaagttgcttggtcaatgaattgaaatgaaaacaaaaaacaaatagtttgcaagtgttctttttctcatatctgaaatgttgttcttatgttcaaaatgtaagacaaaataaatatagttgtttcagtttaaactttgaggaagcgattcttatttttaggtttacggagatcttttattggagaaaaagttagttgtttgaagaagaaaaaaaaaatatatttctcagatttcaaagtttgttctttgacaggt

SEQ ID NO: 233208 - DNA, 1053 bp, Cannabis indica
ttatcttttgttcactgcatattttcttggtccatttctctttttctttctctaatataaattatattatatatatatatatataaagttgtactttgtacatacagcaactgtgagcacacaaacaaacatgcctatcattttattttcttatacagtttcgaaacaggtaaagttgtggtgtactagaccatttaagttttaagttaatgaccaacatgacaatctctaattggttaagttattaaattttttatttaaaaattcatttaaatatacatactcaaattttaaaaatataatttagttattaatatacttaaaaagtaaaatttaagtatgaagtgattttgtactcaaaggactttcaaatttcaatggtaataaaatatagtgaagttggtttggttttcttccctattggaactctttagtgtcacaattttttttagtgtttttgaaaccgaataggtaggggaattaggttaaaagataactaaattgataattttaagttatttccttttgaagtcaaaaataaatcattctacatgattagtttttataatgttgctttagaaattgctaagcatgattacattgattagcaaactttggcacaattgcacaactcatcaaaacaaatgacacaaaacgtgaccaagttctcaatgtatttcacgtgtgtttgaatttacaaatgttttcacattgtcacaacatataatacttttttaaatgtccagataaagaatttatgaaataactttttataaggtgtactacaaatatttttaatattattttggatattgtattttgcaaaagttattaatcaaacttttaattttgttaaataacaatcttgattgattatgtattttttaaataataattctctaaactagatttttatcaaacgatcttgaagtaatcattgtggtttgatttctaatctaatcttaaatcctaaaaaattttaacacaaaataaagtctattatgttcaaatttataaaatataaaatttgaattatcatttaataaaataaaa

SEQ ID NO: 233209 - DNA, 1645 bp, Cannabis indica
cttaaggcttacctaagtcgttttagtattgctgctgctaaagttaaaaacttgaacgacaatattcaacttactgctcttcaagcagagattacggctgacctctcaacagttggaggtttgggataatttacaaggtcgcctggtgaggaacatcagtgagttcaatgaaagaactcaagtgttcgtacgaaaagaggaagcgaggaatgtgatgaaattattaaagattggctcgggaggtaaactcagcactgtctcagcaagcaccgtctcgacaaaggctgacaatccaggttgctttaacaccaagagaaaagatgactctagagaatcagccaaagataagaagaaacagaaaaagcacgataagtatgtgctgatttacactatttatacttagcttaatgaaactcgggaaaacatctttctcgcaaatgagcacagggtggcatttcgcaaacctgggcccatgagacatgcgagaaacaaaagggatccaacaaaattctaccaatttcataaggacatagggcacacaatggaagaatttcgtcagttgaaagacgagatagagagccttatctcccgtggttatttttaatagtatgtaagacgacaaggtaatggacaaaaccaaccaaatctacccaataacccaggcaaccaaagattacaacctcatcctgtagaaggagaggacatattgggcatctcgggagggccgcatctcgctggagaaagcagtaatgcccaaattaaaaaaggaaaagaaaaaaaaaaacaagcgatcaatttttgctccaaaatcttctaagaaagtcaagactgaagaacctctaattgtattttcagaggaagacacaaagcacgtgaggtatccgcacgtcgatcctctcgtcattacaattcagctcgccaacaaaagagtaaaaagagtgttggtggacaacagaagctcagtaaatatcctttataatgatacactgaggaaaatgggattgccaaatgaaaaattaaaactttgtatggtgaatttatgcggatttattggagatattgttgccagtcaaggcattatcaaactcccattaaccgtaggcgagccaccattatccacaacattgatgcaagattttctagttgttgacctaccatcagtttataacatactgatgggtcgccctgcactgattggactaggggtagttcgctcaatcaaacgcctatctttaaagttttaaacataggtaggtgtaggtgtagtgcaaggtgaccaaatattggctcgcgaatgctatcatgtagaattcataatagaagggccaaccatcaatcaatgatagtcataacggaggaaggcgagaagtaagaagaagatctagatcctcaaattcaagaaaaaaaactaattgaaaccaatcgaggaactagaagttgtttttcatcccggaaatcccactaaatgtgtgtttattggaaaaaatctggatgaaaaactaaaatagcaactaataaattttctgaaggcaaactaggatcaatttgcctggagccatttagatatgatagggatcgaccctaaagtgatttgtcaccatttgaatatcgaccctaattaccagctaagagacaaaaaaggcga

SEQ ID NO: 233210 - DNA, 782 bp, Cannabis indica
tctctctctctctctcttagtggtggtcaccggaggtctttctctttgtggtggtcgaccggggttggtcgagagattggagataggagaggtcaaggttttgggtttcagggcatggggatttcgattttgtggtctcctggttcgttggtggctctgacgccggacaagaaaagaaaggggggtcagggtgatcgccggcattagggtttattagggttttagagtgaagaagaagaaggagtaaataaaaagaaaagggaaaaaagaaaataattttttttataatttatttattttttataattttttatattattttttaaaaaattaatattacgtactggaccactaaaaaatttgtcacgtgtacaagtgtgtacaattggacagtccatcgcggcacttaactgtactttttggacgaaggggtgaagagcaaaacggaatgggagtttaggtagtttggcgccgaaaaatcaatttttgtggttaaccgttaaaaaatttaaagttcaagtggtttagccgacaatatcccttataaattattattttcatgttgtgattaaaaggttcgtaattaagagttacaaaaattataatttattataattgtacatgtttttagtcataatacttattgagacgaaaattaaattagagacaacttatatgtaaatattttactcacaagaaacttatatttagaagtcacatttagtaaaaaagaattatgttacgactaaaaagtcgtcactaaaagtaaattctttttagta

SEQ ID NO: 233211 - DNA, 542 bp, Cannabis indica
tcagagatatattgtaagagcttagtgaggaaaagtaatttattccttctctcaagtcaatacaaatacaaggagagtaggctattactaatctaacgaggtcgaacctctttaaaatttaattggttatttttttttttactttactttgtttgctttctattatttatcttatttaatcgttttattttaacttactgtcgttggctagaagcgaggtcaacaaataatatgattttcgtcactttttatgtaaaatagaaatgtgcatttttagagaaatataaattttattatatgtttatatatatacatatatatttttctgaaattataattaaaaaaaaaaaaaagcagtggcttgatgtgtagaaatagaaaacaaatgttattttttttataagtattgattaatgcaattttttgaaataattgtgctaaatttctttacataaattatttcttattaattgtgatttattgaaatattgacatgaatttttatttctttcccgccattttcaagattcaatatttttttt

SEQ ID NO: 233212 - DNA, 816 bp, Cannabis indica
aggatgttaaaaatatacttgtaagtaaatctaggtctttgtaaaatatattccaacattattctaatagccccactactacaaatttaccttttagtgacactcttaagtgactcacaaaaaggtgtgtgtcactaaaaggtttaggataagatttagtgacccacacaaaaagactctaaaatttcagtgttagtgtctgaccatccgcgtcactaaaagtatgatggatctcttaaatgtttgggatgtttcatacagccaaaaaattctctaaatcaccaaattaaatttatgaacgcctcatattggtaacaaccaaaggatttatgatgatcattcatgctcaaatgagagtaaaaactcgataaatagtgaccatttgtttatttttacacttgttgaaattattaattgtgtggttcgaatcttgagcggatatccttttttgacacaaaaatgaaactttcattaaaacatatcagctatcaaaataacttccaaaccaacaaggaaaaaccccctacagaaatacggtcagaaatagaacgagaagaacgagctagataattcgccgcttggttcctagaccgctttacaaacttaattgaaattggaaacaaagaaaaggactgaataagagaaatacagtctgaaataataaggccaagtggagacaaaatctgcttattactttgaatagcttgatttaatatgagacagtccgactccaaaataatagcagtacgtagcagtatcaccatcagaagtaatcgccccttcccacttactttccacccaacttagagcctcctt

SEQ ID NO: 233213 - DNA, 2329 bp, Cannabis indica
atcgtcagcttgtttagttcccaataatcgatacacattctgagggaaccatccttctttttcacaaacagaaccggagctccccagggcgatacactgggtcgaataaaacctagatcaagaatccttcgaagttgtatttttagctccttgagttctgatggagccatttgtatatggtacttttgaaagaggttctactccaggtgccagatcaatcacaaaatctatttcttgatgtggcggtaatcccgacaactccttgggaaatatgtcaagaaattctttaacaaccctgactactttaggcctaaatgtttcaggtctgttggagtcaatcacaaccactaacaatcctacacatccactgtgtagtaaatctctatcccttaagaatgaagtaatcgggatcgagacccctgaacagatcaaacatagataaatggatcttcgccctctagctaaaaagttacaatttttcgcttacaatcaatgctggccgaatacttggacaggaaatccatcccaagtatgatatcaaattctactaattcacaaactctactaggtcagcactcaactccctatcttcgaccctaactggcatagacctaattcaccttttggagataaccaactccccgctaggtagttgggttccaaaccctctttcaataaaatcacaaggcctacccaattgattaattactcatgtttccacatatgagtgtgtatccccagagtcaaataacacagtaaaataggagttgttgataagaagctaccctgtcaccatagaaggaaaggctacagcattagcttgagtgatagaaaacacctaagcaggtacgggttttgcctattccttttgctcttctttcttcgcctgtggcaaatccttcttgaaatgcccaatcatgccacactgaaagcatgtcttctagttgcactctcctagatgatgtttcttacaatgtgggcaatcaaggtaagaataaccgtagcgtctacctcggccttggttcccacagaaccgttggctctgtcccaaaccaccagatgccggggtagcctttcttttttgatcaatgatggaatcaccaatattcctaccatatacaggagtaggaagagtgggggtcccaccaacacttggagtcactcggggatcctgaagaaattttactgcaccctcggctcgcacagctttatcaaccatctctgcatatgatatcgcttcattcgtagtaatcaccaagttgtgtctaattttttcatttagacctaccagatatttctccttcttggtgaagtccgtaggcacaatacctgaagccaacttggccagacgattaaattttgttgtgtactctgttactgacataccctcacttggcaccacctcggtaaattctttccgcttagcactatggactgcctcattgtaatacttggtgttgaagaaatctcagaactctccccaggtcattacagtgacgtctcaagtgagggacactaatccccaccacaagagcgcatcttcctggaattgaaaggaagcacaagtcacccgatcatttccaatgaccctcataaaattcaaaattctctatcatcgtgaggcactgctcaaccttcattacatatggacctcctagaataactggaggagcttgcttgcaaaaccactcatacagtggctccatatggttgtcagtaacaagttgttctgccagcactgcatgaattaagcagcctgaacttgtggtgtagaagctgcaagaggaccctgctgccttaatctcagaatttcttcgtcttgttggtaaatatgatctggtattttcgcaaatctctgctccaaatctggaggagcttgaggtgggttttcatgtcgacctccctaaaaccttccacaacatttaacacgtgcacggggattctaaggaatttgatttccctgatcgcctccagtctcgaccctattactatgactccttgtactttgctggacgtccatttaataggacttagcctgcgaacccataagtcaggcaggtcagacaacgatctcaaaaaacttaataccgctctttatggattttatggcaacgcattaaaataaacaattacaaactactatgcttcctaacatgctttaataatcacatacaatactaaacaagtaaaggcttactgaaccgtgagccaagcttttctctgataatgattgtacatgtcttaatgatctttggtaaacaaacctggcgaatctgataccaaaattgtaacaccctgataattaggcgtgctatattgatttttcgac

SEQ ID NO: 233214 - DNA, 683 bp, Cannabis indica
tggggatattgagttctcttgaagtagctgctgttcctggctttccttgttgtctttggtctctgttcttggcagacttccactgctttccttttccaaaatgtgtagagaaggaaaaggtgaagcagtaggaattcttccagcacttattgttgattgttgcagagaatcatctgcaattttttgtttctccatgtcgtgttcctctccattagtccttcctcgggcctcattacccaccctgagccattttccataagcagccgtgccttccttaccatccacctgaatcatagttgggttttgatgacaatctttgtaacaatgcccaattttcccacacttgaagcacatgaacggtagttcttcatattggaagcttatccatttcttggtgcctttatacggcagggggaagcctgggcaaataggtttatttatggacatccatattctgaatttgaagaacccgtctgccaccattttggaaacatcagaattttacactgtgatcacctcccctgccttggccgccattcgaactgtgttattgatagtcagtagatcaatcggaacatcccatgctcggccccatattggaaagctggttaagtcatgtttccaagattcattggaattctccattttccccaagatgagcaccccattagataaataccatg

SEQ ID NO: 233215 - DNA, 689 bp, Cannabis indica
cactttttgtgcgtgtcactaaatgtgtaaattgtagtagtgttagttgtattaatatcaagggttaatactattcatatcactataggtgggatctgatataacactcttaaggatacaaagtatgaatcaggattggaaaatatctcaagtgataagattgcttgtatgagcgtgtgagagagaaagtgatgaagaggaaagttatcagagttaggcttagagcttggaggctagtgtcaggcttacattgagctaggttttctaggatatagataaagacattatataagaagcctaaaatcctaatttacacttaaaaccttagatgttattatatttaattaattaattagaaaagaacaaaatgcaattgaacttagatattattcaactattctattgggcttttagggcctaattcacaactcaaatggtgttgtccacgtgtagaagtgcataggaaaccctgtagagctcctcttggccggccagacccctgtgggaagcaggttggccgaccatggtgcactctaaaggctagctggccacagggttaggcagctccagtgagggagttggtttgtcacttgatgcccgtttgagtgttagagtctctgtttgcttaggtgttgacttggccttcttattggtgagttgtactgccacgtagtaatggttttttccac

SEQ ID NO: 233216 - DNA, 722 bp, Cannabis indica
aattattatactaaattaggaaacatgccgtgcttcgcgtgcggtatatcatttcatttaatgactagagctggccaatattacgttgtagtctgatttgttagaaagaatcaagacaacccaacagagtgatctagaattacaagagtaaaaaaaaaaaaatgcttgaagttgggtcagcatagagcttctcaatttcattagatgaattagtatgatttagaaacaagatttttgtactagctgatgatggtatatattagacagaaaattctggatgagcttcataccacgccatatttactacatccgaggacagttaagatgtatcataatgtgaaagcctgtactagtggtcaggtataagaggtgacattgtggagtatgtgtcaattatttaatttaccagcaggtcaaggtagagcattagagaccagtgggaatacttcaacctctaaaaattccttagtggaaatggaaagaaataaccatggactttgtggttgaattatcaagagcagtagagttctacaatcctatctaggtaattatggacggatatacaaagataaagcactttttgttgggctttgtgccctaaataaaactctattttaatgtaatcttttctatttatttaccaataaagaaacagatttattttcattacttgtttagagtgttatttggttcatgtgattatttatatgtttatttgattt

SEQ ID NO: 233217 - DNA, 834 bp, Cannabis indica
ctagatcaagctcttatctctcaactcatttaggatttgaacaagtccttctcattaaaagatcttgaagaagtacattatttctcgggagtagagattcatagagaatttacgggtatgtattaatcgcaaacaaggtatattactgatcttttggtaaaacctcacatgaaaggtgccaattctttgttccaatcctattaaagcttctacctagctttctcttcacgagggtgaccatttgaagatcctacactctataggagtacaattggtgccctacaatgcttacaactcactcgaccagatgttgcttttgtcataaacaaattaagtcaatttctcaagacacctacagtacttcattgggaggcctggaaacgactcctttgatatcttaaaggcaccattagagaagggttagtgttttgacctgctgctgactttacattaactaactactctgatgtcgattgggcatcgtgtgtttgatgagacgctccacagctggctatgtgatctttcttggtagcattaatctaatatcctagttttccaaaaagcaacatgtagttgctcatttgagtactgagagtgagttttgctcactcgcaaatactaatgcagaacttcgatggattacttctcttctcattgaactccaagtttctttgagccactgtccaataatctggattgataaccaaagtactactgtacttgctgcaaattctgtgtttcatactcgttcgaaacacattaaaattgatttgcactttgtagagatcaacttatagataaacaactttcagtatcaatatgcctaccattggt

SEQ ID NO: 233218 - DNA, 1790 bp, Cannabis indica
caagttaataatattacattataatccctgtttctcgaattggaatgggaccccaaggagaagttctccacatatgagatgccatgttataatggagaaaaaagatgttccataattttctcatgtctcccacaaatcgggcaagatgggtcttcgatgttcatatgatctttaaggatggctccaatcgaaagagcattggaaatgatgctttaccagagtactttatgtcgctcatacattttactattttaaagtttgttccacaaagaaagaacaacatgacagtgtgggtttctctcaagagcctgcaaaaggtaggtagatttggtagaaaaatttaccattcggttccatggtccaaataaagtgatccctcccttgtcctgaatgctttcccccttttaaaagggcttaaatagtgtcccgatcatacaaccaatttagtttcagaagatttcacttcccattctccaataataagtcagccacaatcatatatcttgaagaaggaaccccattaggaattggaaaaaagacattaccatgtgtcgatatttacagatattgatatctctcccttcagttaccacatatcaagcaccactcccaagaatatcttttgccttaattacaatcttacataatcacgaatcagagttcttataattgcattaaaggaaatgggtactcttgaggtatttggtagctagcactttacaacataaggattgttatttattaatgagttgccacccctattttgcaagaaaggctcaattcatctccataatttttcgaaagcctaaccctccctaacatttgggaagacaaattttatcccacgctttgagatataaatcacgatttcccttctcacttatgtagtagaagtctctgccatcaatttttgatggcaaccattgagaaagttttatcatttgcatagaataaactaggagggatagaccaattgatttaataagtgtggcacgacttttaaaaagagttttcactttctaaccctaaagcttggaagaaaggttctccaagataaagttaaaatcaatatccttttgacgggttctaaacacaagaagccccatatattcgatgttacatgttgggcaatctacgctaagaatacttttaattcccattttcattcctttagtggtattcatgctgaaaaaattgacatttttaagtttgttgactttctggcctgaccacgaacaagacttttccagacaaccccaaaaatttcggacttccttaacattagctcttcccaaaaggataaggtcatccgcaaagaagagatgagataatattggcccatcactacctagcttaaccctttgatcctaccacttcccaaagcctctttcaacaacttggaaaggatttcagtcgcccaaatgaaaatgtacggcgacagaggatcccgtggcgaataccgcactttagattgatcttcccaattagtcctccattaagacaaatattaagcaaaaatgtagtaatacattgggataccagtgacgaaatcgctctaggactccaaattttttaagcacctgctctataaacaaccaactcaacttgtgataaactttgaaaagataaattttgacagcggattgagtgggacaaatgggtctaggaagtagaggcttcattcgattggcaataattttagagagcactttatagatgacactgcacaaggatataggcctgaactggacaccatttggggatttagaccttcagaataagcatcacat

SEQ ID NO: 233219 - DNA, 814 bp, Cannabis indica
cacctccaccgttgtcgacattctcaccgctttcatcggactcatcttcatcattgttcaggtatatatgtatagtaaggattagttaatttttttttcttttcttttatctcacctttttccttaattatttacagctcataaaattaaaaattacctcaatattagatcagtacaaggtataaatatttctatatttatatatatatatgtgttattctaatatgtgtgtgttataattaagacacgttatggattttgggactgccacatcaccaacttctctaattgagtttgttagcttcttaacaacctaaacttgcacctataaatagcaagacctgctctggtttatggttgagacattcagattgattttagtgtaagatcacctagaattaagcctagcttttgtgtgaatggagggatgtaaaaggggattgcctattcttgaaatagcttcccacatgtgagatcaatttgtaattacattgtactatttgcaaggcttgattgtaatcgattctggttgtaatcttatcattggattcatcaataaagtttgccaattattcagctaagttcttgtgttactaattttatcttgcttggttcaattctcctaaactttcttcctgtctttctttaatgtcatgttcattaagatttctcattgaatttgtgtctcagcattctttctctggttttattgctggtttaatattggttcttgcacaataaatggtatcagagccaaggttggcttagaaagatcaagaactgctcgatcaaattacagagaaatcaagaatgt

SEQ ID NO: 233220 - DNA, 1249 bp, Cannabis indica
tttttttttttttgtgaataaaagtgattttataaataaaagaaaaagtcaaacctcgtggtcattacaaaggatatcattcgggatagtagatacttctaccataccgttaaaattgtttgcaaacgcccatttagtcacattatgagctacaaaattacagtttctggaaataaaagaaaaattacaacaaatcataaaggtagagagaagttcacattgccttatatagttctcaatcccccacaaggcgtcaacacctttaaggttcttgataacactttcagaatcactcttcaccataacaaaaggatgatgcatagagatcgccgtctccaaagctaactgacacgccactgcttccccgatgatagagtcagcgaagttaagcattttagtcgccactcacaaaatcgaccccgtagagtccctggcaattgccacaccacacatggaatcaccactgactctgacgtcgcagttaattttaatccaatcctccggcggtggcgaccaagccgtggtaccatcatcttgaaaagtcttaaacaaacaggaaccataatctgcgtagcaataagagatagattcaatataatatttctaagtgttcaatataaggttctatctacttaataatttacctctgatttgtaatattctccatcgtatatattagctagtaaattaaactatgagatttgatatggaaattatactaaagttattagataccactagctattatattaaactgtaagatttgattatgaatttttctttaaaggttaaggaatacagttcaaaatatgacataccattaatatattcaccatataatgtaaaactcaatttaacatagcatattattaataattccaacaaaaattatattctttctttctaccatgtaatcactacaatatttacggtgcgtttggaaagctacaatgtaattggatttgtgtgtaattggaggtaattacacaatttggcatgtttgtctgaccatataattacactgtaattgtgtaattggaagtaattgaggggttccaattacactctccaattctcatggccccccatgagaattgaatgtaattacactgtgtaattactaaaaactttccatattaaacattagctactaaaaaaatattattttcccatgtaattactaactattttgccaaacaagatattaagaattcatatgtaattaccaactcatatccaaacacacctt

SEQ ID NO: 233221 - DNA, 800 bp, Cannabis indica
tcttctgatgctaattcctaaagcagagaatccttccaaagatatagactaccgtctgattgcctgttgtaatacaatatataaatgtatctcgaagttgatttgtaacaaaatttcagaggttcttccttggctagttagtgacaaccagggagcatttatcaaagatcgctccctagcgcacaatgtcttgatcctccaagatttaatcaaagggtaccactgaaaacaactctctctcgatgtctgatgaaaatacacttgagcaaggcctatgatacaattgactggaaatttttggaaagcctttttaaaagcctacatgttcccaagattatttgtggagtggataatggtttgtgttcggagctcatgctatttactggtaatgaatggaagaatacaaggacagtttgagggtgctaaaggcttacgacaaggggatcctatgtcaccccttctctttgtgctagtcatggactaccttactcgaacacttaaatggaaagccaaggacaaagccttctcttatcacccaatgtgcaagaagctaaagctctccagtctatgttttgttgatgatctaatcctattttgtaaggggaatagggactccgtcaaatgtattttggaggctcttactcattttagctcatgtttgggtctcaaggctaatatagagaagtctaacatctactttgcatgtatacctgaggatacggtaactttcattcagcaggaggtttctttcaagactggtactttttctttgaaatgtctaggggtatctctgaggccaa

SEQ ID NO: 233222 - DNA, 639 bp, Cannabis indica
ataacaatgtagtatccataatagactaaaaaataataatgaaaaaaatatagagttggataataagctttggctttcgtaataaatgaaaaggaagctttaaaaaatatttagcacatgatttttaattatataagtgcaaatatattatcacataataattttgaacctcaaaagttagaaattgattatgaattaccctctattcgtgtaaagcatgtcattgagagactacgaaccttaggtggaacagcgaggctggtctttgatgggtgcacccctttggacgaccatgaatacctcaggcctatcttaaaaacttaagtcatctccaattctaaatcgtttagcccattatttcgaaatcgctttctgcctgcgaggataattaggagaacaaatcaagatcagtgagaaccaatatatatgattgtgtagaggagatgatcacttctaatttaagttcagagattagaatcatatgaagaaaaaataatttcctattaccgtactcatacaaggccattaaaaatagttttacttattatctggctattgacttcacagcggtccaaagcttccatggtaataaaggcataaaccaagaagatttaaaaaagactgtatcattaaggaatt

SEQ ID NO: 233223 - DNA, 1040 bp, Cannabis indica
tcccatagcctggtgtgataatttgagtacggttctcatgtcagcaaatccggttcttcatgcccggactaaacacatcgagcttgatctcctttttgtaagagaaaaagttctcagcaagcaactttcagtgtatcacttacctggttgtgatcaagttactgacatatttaccaaagctttgggatgttctcggtttactcttctcaggaacaaacttagtgttcttaattctacaacactaagtttgaggggggctgttagtgataatacttagttagttagtttgttagttagtttctttttctgttagtttgttagttgtacagttcttgattgtaactaacttattctttcagttgtaactagctaagtctataaatacttgtacataatcatttctgaagtgtaatgagaatatagaattcattcctcaaatcttttattcaacagatatatatagggattcaattaatgtatttaatgtctattgaaactctctaaaattcttgagtatttttattgaacaccaatataatgtttattgtctaatattttataataagtgagattttataattgattagcgatatttttaaaatttattttattaagttatatagaactcgatatctaaataacagtatgtttattgatctcttttaacaattctcaaaattcttaggccttgttaattgtcaaggctttcaaaaatacttttaagcttttaaaaattaacaaagtcattttagtctttttagattttttttttgaaatgtttattgagaataagtcaccaaaactactcaaagtgagcaaagttaaaattttggccaaccatgcccttaaaactcgaaaattaaattttactatctttatgttttgttgtatttatcttaaacaatatttaattactttacactttctcgctattagggcatttccaataaaaaaaattgaaaaggtatattgttatactttgtgtacatttctaattttttttttttttaaaaaagtttagttaatttagtacacacgat

SEQ ID NO: 233224 - DNA, 1181 bp, Cannabis indica
gggttatgtgtcaccctgtggatgggtctgcatggaaggagtttgacgctagatatcccaattttgcaagagaccctagaaatgtacgttcgggattagctgccgatggatttaattcttttggaaatttgagtcaattctataacatgtggcttgttgtgctggcgaactacaatctcccccatggctttctatgaaagatgataatttcatggtgagtattgttattcctaggtcaagaacaccaggtacagacatcgatgtatttcttaggccattatagacgagttgaaagagttatggagtatggggttcaaacaagagatggcaatacaaatactatgttcaacatgagagctgccctcctgtggacagttaacaatttccctgctcgcagtagtctgtctggatagagtggttaggggtataaagcttatcctacatgcaatgaagatacatcttccatccgtgttattgggaagacatcttatcttggtcatagacatcttatgttgggagtagagcatgcaattttcccacgtgttttgagcgattatattgctgctatgtgtcctacacatttcaaagattagaatgtagtgccccaatagtacaaggatcaagttcttagaagagttcgggtaaataattaaaaaaaaaattatccttgctaaaattatatttgttaatataattaatatttttgttttttatgtagtattactatcaaattgaggagaatctgcatacttaaatttttttaaaatgtgtcaacaccgagtgtgctaatagatacagaataaagaaaactagtcgacacaagaatttcaaatgtttctatatgaaacctgaggattatgaggatgcattaaaaatcctccaattgatagtactctagaacaatggcaaagacagtgtgaaatttttactagcatagcttttcttgctcgatttgaacaaaatagaaaattcaagaaaagatgaaatatgtttcaaacctaaggaacaaaattcttggctcagcgtcgccaataattagtaaagctcaaatataactgtagttaaggtatattaaaatgtatgatctctaatcactactacaaaaaccccctttagacgggggttttaaggtaccgtttctagcgtcggtttcgtcgaaattcgtctaccgacgctgatca

SEQ ID NO: 233225 - DNA, 1125 bp, Cannabis indica
tagtttatgaattttcactaaactagggcttaattgtgaagaaaagagattctagggtctatttattaattaagagactttataaagtctaattaataaatatattaaatgacaattttatttaataattaattttaattattaaatgattagatttggcatttaagtggttagattggaaaaatgacattttttagaaaataagatgaataattggaaaaatggcaaaattgcaaagtggggcccaatatccatggccgaccacttaatgggcaatttaccatttaatttttttattattttaatgccaaataaatctaacctaaccctaggtggattcctataaataggtagtgatggcctcaaaggaaaagatgatgaaaacactttccttcagtaaaatttgagccaccttcactatacctatttcgaaaccctctctctctctctctctcttcaaaaccaaaccctagagtgattatagtaattgcccacacacatcaagtggtactcaatcatagtgtgtaaggctgtgaagaatccaaattcaagagaaggggaatcgagctcagatcttggtgatactctactacagaaaggatacaagggttagagatctgagctgaaggaaccttttaaatcctctacaaccactgtaaggtttctcataccatttatgtgtttatttttacatcgttttagaagttcatgtttaggatgttaaaaaatatacttgttagtaaatctagatcctggtaaaatatattccaacaactggcctcaaaggcatggtaattaatttactttcaagaaatttggacttaaaacgacatatgtttgatttggatgtgattcatgttgatctacgtgttttttgatgattgtttgaagtttgcaaattttttacaaaaaataattggaattttttttctggtaattatatttgttggatagtttggtaaaaaattaaagcaatttcgattttattttgaattagttatgattttttgtaaagtttgaaaaaaattagataagggtggtgtcgacccacgtgtgcgcgcggacaagggtgatcacccgtgcacgcgcattcggacaagcatcttgtccgagttttctcggtca

SEQ ID NO: 233226 - DNA, 1206 bp, Cannabis indica
atacagatgcagcaacaactttccatacagcacacaccacagatgcaacagccttccacgcaataaacgccacaaatacagcaacagacgccacagatgcaccagatgcattcgatgcagcagattgcgcatattcagcatgtgtcacatttacattagatgccttctatgcagcaaacactgcatatgcagcagatgccttcgatgccaccgatgcaacatatgccaccgatgtctcatatggagcagtcaccgatgacatcagtacagtaaattccacacatacagcagccatactatccgcaaatgccagaaatgtcgcaacaacctcactatccataaaatgtcgcatatttcacaacaacagtctggaaagaatggcgatgatgatgatgaggaggagaaggaggaggaggaggagtccatacgattgggttatagtgttgtcatttgtggcaatataagtattatttgaacaatgaatttgataatataagtattttatatttgaacacttattttagttgttttaatgtgacgacataagtatttttatttgagcacttaatttagtagttgtatttaattatttgaatgcttttattattttgattattgtaattttaatagtttttatgtatattttaaatataaatataaattaattataaattacaaaattatttttttaaaaaaaaaataaagaacaatggccgcgacccttgtggtgcctactgctatggctgacaactttcagtatttcaagtgggcactaaccctgtcgtgccatttgttctggcagttggcacgatatcatttgtggtgccggttgtcacattttggtacgaacctattggcccgatcaaaagggcacaacacgtcgtgccaatataacggtgggcactaaaaataaatttgttcacactaatattttagtcgtaccaatacctttttttttcttgtattgttaattttcaatgatattgattattatttgaaaagaaaacataatagtaccgtgataatcatctattctattgtctaaattttgaaacaaaattaataagagtgaatggaaattcaacacaaatgatagaaggttgttcattgtggaaatatgagccaatcatcgaaatatttttcttcttaaaaattaagaaattagtaaaagtgttgaaatattctttatttcattatactgtataa

SEQ ID NO: 233227 - DNA, 1373 bp, Cannabis indica
catgaaagtgatgaaactaattgtggagaaggtcacttctgaaagatgtgaaattcaagagccatatgatcttcaagaagaagcaaagaaggctctgagtacgaagaagtttctctttgttgttgatgatgtttgggatgaggatccttccaagtgggatgtcttaaacaattgtttcaaatcagggttgcatggaagtaaggtcattgtgacaacacgtagcaataaggttgcatcaattatggaaactaagtcatcaacttactccctaagcactttatcttttgacaaaggttggcagttgtttgttagatgtgctactatagatgtcaacatgcacaagtacgctgatctacaagtaattggtcgaaaaattgttgaaaagtgtaatgggcttcctttagctattaaatcacttgggattcttttacgtggtaaacaaaataaggaggattgggaggacatattaaacaatgatatatggggattgtacgagagtgagagtgttggtattcttccagctttatggctgagctatttttatttaccttcacatttgaagtcttgtttctcttattgtgctatatttcctaaagattatggatacaaagaagaagagatgatcttattgtggatggctgaaggtcttttacttcctaagaagggaataagaattgaagaaatcggaaagaagtacttcaaagatctaatctcaatgtcattttttcgaccatcatggaatgagtgggaggagccatgttttctcatgcatgatcttattcatgatttagcaatgtttgtttctggtgagttttgtttaatgatgagtaatataagtaattgttctcacaaggttcgtcatttttcgtacatacaacaatgggcaaaagccgatgaccctaaggaatttgaggagttatttaaagctaagtgcttgcgcaccatattgtgggaacatgaatctacggaagattttctgaagttgtttaagattgagcacttgaacaagtcattcccaagcttgagagtactatccatatatgatgattgttatatcacaaagattccagattcaattggcaatttgaagtatttaagatatttgaagttacattgttgcagaattgaagagataactaatacaatatgtaagttgtataatttggagacactattgttggaggaatgtaaatatgttattagactaccaattgatataggaaatttaatcaagttgcgacatcttagtgttcctaagaattcattacaagagatgccattgcagttgggaaagctgcaaaacctgcaaacacttaatgcatttgttgtgggaagaagtagagattgtggtggcattaagttgttgaaagagt

SEQ ID NO: 233228 - DNA, 1420 bp, Cannabis indica
tatacatggtctggaaattgaggatcttcaaatccctttggttgcttaacataaacttcctcattcaaaaaggccgacttcacatccatttgacatagtttgatatcaagaacacaagcaatacacaatagcaaacgaatagattctaatcttgctacaggagcaaaggtttcatcaaagtcaataccttctacctgtgtatagccttgtgccaccaatcgagccttgttcctcacaattgtaccaaattcatcaattttatttttaaagatccactttgttctaatcatattgataccttttggtcttcgaaccaaaatccaaaccttgttatgaataaactgaagaagttcttcttgcattgcattaagccattcttcataagccatggcttccttcacattttttggttcaaattgtgagacaaaacaaagaaacttgatcaaattaacatacctttttcttgttaccatggtttcttcaatatttccaagaatgagatcttttggatgattcagttttcgtttggtgcttggttccttctggatagaatcagtattgatgtttggatgaatcgagataggcttttctggttcacctacttcagctgtagcgacagattcaacatttgctccattaggatttaagtctgctacatcataacctatatttgctacttctggtggagtatctagaaaactatctttctcgattttcgtgaaaaattctaaaaaatctttaaaatcatcaacaaccatattagcagatttcaaaacagtttgagttctcatgttgtaaacacgataggctcttctatttgtggaatacccaatgaacacaccaacatcacttttagcatcaaattttcgaatatgctcacgatctctagaaacatagcaatcatatccaaagacatgaaaatgacttacagttggacgcttacctttccagatttcataggatgttttggaagtacctggatgaataaacactctgtttattgtatagcaagctgtttaatgacctaagtttgacatagtcatattcttcatcatcttcataggtttcttcctcctttgaataatcaggatcatttcctccttcaccatctactagagaggctactccctcttttgggcgtcttgggtcatcaggtggttgtggaggtcgttgattgtttcttgtcaacaccatttaagtcaatttttttctttgtgaaagctttttacaactctcaataaagtaccaaaatattgactgagcttttcagcaaccattaatcagatattagtaataatgatttaaaagtgaataatgattttttacgtggtttatgcattaatgaaacttagtccacaagtcacttttgttgatagttggaatgttgttttagtttaagagaatattcaatttataacat

SEQ ID NO: 233229 - DNA, 1623 bp, Cannabis indica
ctataatatatcatttatttaatatgatttttagtttctattttattatatataaattttttggtatgtattcatattttaatagtggtatatataattttgttagcatgatatatatattttttgagtattaatttagtattgttataatttctttgtggtctataattttattactacggtatattaattatcaatactatgatatatttaatactgatgtatatatttaaatgatctaatatatttatttatttttgttacaatataataatatgcaatactaaaaaaatgatgtaacttaattttattattatatatattttttaaaaaaatatgtgataaatatatttttataatttttattagctaatttattagatttggccatttttttaattttttaaaaagtagacatttactaacttagtttttaaatttaaggacattttgcatctcgacccaaaaaaaaaaaaaaaattaaaaaaaaaaaaaatcaagaaatttgtattataaatagagactattgggctgggctaaacaaacacagctgaagattcaaaacccgaatagttgaaattaagataatggcagaaatagtgaagctttatggtgtcaggggaagcccttttagtaacagagtgaatgtagctctgaaactcaaaggtgttgaatacaaatactatgaagaagatctgaagaacaagagtgcttcgctcctcaaatacaacccaattcacaaaaaagtccctacctttgtccacaatgaaaagcccgtagcagagtcacttgtaattcttgaatacatcgatgagacatggaagactcaccccatcttgcctcaacacccttatgaaagagctcaagcccgtttctggagtcgtttcattgaagacaaggtaacaattcttccaataatcaactttttatgaaacgtcttttatttttttgagcttgaactttcgtcgaacaccttatgtgtttactgtaaagtaacaatttgacgttgaatatggtcttttcccaggtcgtgccaactgcatggaaagctttctgggttaaggaggagcggaaaaaggcattagaagaagtaagtgagtatcttgaaattctagagaaagagttgaaaggtaggtactttggtggagaaagcattggattggtggatataacgggaaacttcatagcccaatggatcccagctgtacaagagcttgtgggagtagagatattgacagaggcaaagtttcccaagctctgtaaatggagccatgattttgccactcatcctatgatcaaggaagtatcaccttctaaagaagaactcattgctctcttcaagtctcgtttgaataccaccaactaaaaaaatcatctagtttattagttaaactttaatttatcgtatcatattatcataacaaataatatgctggatgttgttgtcgttcgtttgataattaagctgcattgttttctaagtctttagttttgtttgtaagagaattcccaactttattgagaatgttagtctttttacttaaataattttgtgaaaaatatatgactgaaagatctaacatttctttcaaaagaagaagaagatctaacattgttaaaaaa

SEQ ID NO: 233230 - DNA, 1646 bp, Cannabis indica
cttgattgaatcacattcttccaaaaccaggagtccgtggccttcggtttgcactccaaaaagtgcttgcctttaagatatttagcttccaaaatccgacagcataaggattggtttcctttcagaaggttccacccccatttagccaggaaagcctggttcatttcttttgatttacgaaaccccatcccccctgctgacttggggaggcacaatttatcccaagctttcaagtacagcccatgattacccttctcagagccccaccagaagtcacgaaccaagccgtcaatcttcgaagctaatcggttggagagcttagtagtttgcatagcatacaacgggagggacaggcctaccgacttaataagagtcgctcttcccgcttttgaaagagtcttagctttccaaccatgcagttttgaagtcaagttatccagaatgaagttaaaatctgcatctttttgtctcgatctgaaaagagggagacctaaataccttacatttccttccggcgatccaatacccagcatagacttgataccttgtttcatgctgttgggggtatttttactaaagaaaatggaagtctttgttttattcaccttctgaccagaccaagagcaaaatttctcaagacaatcccagtatcccttggcctcctctagattggctttaccaaccagaatgaggtcatcagcgaagaaaatatgggataaaatcgggccccctctactcagcctgataccactaatggatttctttgcttgggcatcttccagaagcctagacaagatgtccgccgcccaaataaaaaggtagggggaaagagggtccccttggcgaaggccacaggaggggataatctttccaaaggggccgccattaatgcaaatgttgagggtggtggtagaaatgcactgggagacccaattccgaaattccactggcaccccaaagctatccaaaacatgctcaataaaccgccaactcatcttatcataagccttcatgaggtcaatcttaatagcaaacagaccttctcttcctttcttcctattaaaagagtggataatttcctgggcaatcacattgttatcttgaatattcctcccaggcacaaaagcggcctgagtagggcatataagactaggtaacactggcttgattctgttagcaataatcttggatatgaccttataaaccacattgcagagagaaataggtcgatactggctcggtctcttagggttctggaccttagggatgaggactatgttagtagcattgacccctttatgcatacgaccagattggaagaaatccaaaaccgcttcgcagaagtcattctctatagaagcccaatagtgtttgaaaaacaaaactgacattccatcaggtcctggcgctttgttattactcattgaaaacagagtagccttaatttcctcgcaggagggccttctgatgagctcagcctggtcttctagagagagtctatcttggattagatcactacagtttgtctcaatactagactcctctccggtgaagattcctcggaagaagtccatgaattcattacctatagcctgcctgttgttgatccacaaattatttttgttgagaatgcactcaatggcatt

SEQ ID NO: 233231 - DNA, 1488 bp, Cannabis indica
aactcacaggaataagcttcaaggcaacctttgatagtacgctctccaaaatttaaacaatgcaaaaatccatttaatctgaaaacgaatacatcgttaaaacctaaaagaattatttgatgaagaaaaactactcgaagattacctttctaatggagtgtactctagaaacttcatagtgtcccagatattcgttaacgtgtcccagatattcgttaacgcgaaccttaacaactaaaagtgaaaaagtgaattaaaattgtgcaattatacagtgaaaagaaattgtacaatatacatttaaatttgacaaattcttcgaaaagtttgaaactgcgaaagcaaatggaacggagacgataaggaatgagataaaattaagaaactcaaattacctcggagcaagcccttgatagattgggggtggtttggagcgaaattcgaccgaatttcagtaattattgaaatttttgggatcgggttggtttcagcaagccctaaaattcgaatattcggaatatgatttgattttctgttgtcattggtctctatttttttttgccacaaataataaataaattaatataattcaatcttagaacctccgttcaaaaataagcttaggaccaagtaaattatattctaaaaaaatgataacaataataacaataaatgattattaatactaaaaattattttagagtaaatataatggtaatagatatgttacaatttaaaataaaattattaattttatgtaaataaatttacaaaacatatgttaatacgggacttaaaaaatatataattaattacaatttataagttattttatttataactggcccaaattaagacttgatggttctactgtatataatagggctcttatgtaatccctcacattgagggactacacctcagcctatttccttcgttggatccttttgttaaataatctaacggcacataaataagcgcaataacaaaggacattttttttaagaaaacttgaaatcggttgttctcgtaatgttctattcacatttttactaatttattttttgtttttttagctatgatttgaataactcatgaattaactatgtaaatattcataattggcagtgaaacttccttgtatcaggataatttattatctaaccaaaaagcatgttttgttaagcagaattcttattgtaagccacatgagacaaaatttgttgggttttatgccctaaataaaattctttacaatctgattagttatcaatataagaaatttgaagtgattgatgtttgcatgaatttaacatgctaatggtttaatatgtttattgtgtttacacagcagaatcaattaaatcctagatcatatgttatttcacaattacagtatcgtcaacacagtggattgtgattgtgatcatacgaaatcaaaagacataagtccctgtttcatcagtgttattgggtttacactaatgt

SEQ ID NO: 233232 - DNA, 830 bp, Cannabis indica
gaaggagacattatattctgctacgaccactgtaaggtttctcatactttatatgtgtttatttaatattgttttagaagttcatatttaggatgttaaacaacacacttgttagtaaatctaagatcttggtaaaatattatcaacaagtacaacaccactactactccgagcagatcgttggagagggatacggccgcttcatttgggagttgaagaaaggttggtggcgctatctaccgtccacctagacatacgttgtttggccacgtgttactgacactttgcttgttggccgaccaagttcgaggaactttggtattcccgttgttgttcctgctgtcacggtagctcggcattcaccccaatatccgtccaactatggctcgaacaaagcaaacgatgcgaagggtcaacgcatccgatcctcacgtggcccagctcgccacactacccagtgtcgagcaggatccacccgtccagaaggagggggatcaccaaggggacattggggtccaggaaattgaggaacaggacgatgtccctctgggaagtccttccgaggctaaggaacaggaggaggctgaacctccaaatttggaggatacaatgaggccggggagccggtgtttggagaaggtgaagttctagtcaaaggagtggactacatcaccgaggagcttactgaagcagtttctcacaagaggcaagtggccttaggtgccagatgcgtgagccctccgtccaagatcactgaggtacgtttgagggatttggacaagtctggctatctgggcgatcttgaatgttatgtctgttggaaattattt

SEQ ID NO: 233233 - DNA, 750 bp, Cannabis indica
ttctaagtagagtatttgctttttctcttttatttatttattatttgcatacattttggtattgtctaaattcttcctacaatattgttgaattaattttatattttatacatgatcatatatgtttcatatcatacatataaatttctaatagatgcatcatattcttacctctgtaaaagctaaaagcaaaattattcaagtggagttagatattcaaatctccataaaagtcgtacccacctcgtttggttaaaaacttttgattgcatttgatcatgaataaatatctatatataggtctatttcaaaagaaagcaagtactccaaagggtcttgatgatgtggcatctcagagaaataaaataataatcacaaccgtcttttctaaaccctcaataggacaaccaagagtcaccatctcacgacaacaacttgcttgcctctctttgatagtttccctaatgacacagctgtcagttgtgaaactaggggcatgtgttatagtgcgaattttttgcctagaaactcgagatcaatctcctataaaattgacacgtggatttaatcctcaagggatcgatgagttgcaaatcaattactcttcgagggttgacctcgcttgaaccaaactcgtaagatgatacgaccttggcaaggtctagtcgcatgctatgctttgcatagtgtaagacaagtaatattgagagggatttatacaagtcgcgcatatataaaaatatatgcgat

SEQ ID NO: 233234 - DNA, 1194 bp, Cannabis indica
catccccacttagccgaagccaggttcatttctttcgttttcttcgaaaaccaagacctccaagagactttggaagacaaagtttatcccaagctcttagatgcaggccatggtttcctttctcaaaaccccaccaaaaatccctgacaagaccatctattcttttaaccatgcgatcagaaagtttggtggtttgcatggcataaatcggaagcgataggccaacagatttaatcagggtcgcacgccctgccttggaaagcgtctttgctttccatccctgcaatttagatgtaagtctatcaaggatgaaattgaaatctgcatctttttgtcttgatctaaaaagaggcagacccagatatttaatgacaccctcctaagagccaatacccaacacattcttaatgcctcttctcatcccattgggagtattcttgctgaagaagattgacgttttgagcttgttcacttgttgaccagaccaggagcaaaacttttccagacaattccaaaagcatttggcttcattcacattggcccatccaaccaaaattaagtcatcagtaaagaataagtgtgttaggaccggccctcccctgcttaactttatgcctttaaagtcgcccttcctcaggccctcttccaatagtttagacagtatttcagcagcacaaatgaagaggtagggagaaagagggtcaccttggagaagcccacaagagggcataatctttcccaccattccaccgttaaggcatacattcagtgaggtggtggagatgcactgagaaacccaattacaaaaattctgggggaaaccgaaccaatcaagagcatgattaatggacttccagtttaacctatcataagctttaacaagatcaatttttattgcaaaatatccttcttttcctcttttcctgataaaggagtggatgatctcttgcacaatcacattgttatcctgtatattccgacccgggacaaaggccgcttgtgtagggcatattatcgaaggaaggataggtttaattctatttgcaactatcttggatataaccttgtacagcacattacacagagatataggcctgaaatggttaggtcttgtcggattctgaatttttgggatgagaacctataaggattcttaaataggtagagatagactcaaattttacagaagttgat

SEQ ID NO: 233235 - DNA, 1447 bp, Cannabis indica
tttataaaatcacatacgtggcgtccctatggaataggacgttacaacttggtatcagaacagccatggttttaagggtcctgaacactggtcgaatatgtacatttgctgcgaagagaggtcgactcattgtatagtaagtgtttatattatttgttattgtcttacttgcttagataaatatagtgtatgatggaaagaagtagcgtactgactatctatactaagaatatgtgtatggtatacacatctttatattgatatctgtttgagttttaagtgtttgaaagatgtagattaaatatgtgacaagttatacagtaagggcaattaaatttcctgattagcgagctgtctgggctcggagcaaacggtaaagagaagaatcctttattatcgtaatactggaaacatgtaaattctgttatgcatgatctgattagacaacaaggggaagcaaatttgagaattgagaaaacgataggcttctcttgtgtctattcttgtactgccgacacttcatgttgttccattggatgtggtgaaatatatgagctcaacttatgagcagatcaatacgtggaaactaaatgaaccaccaattatgggatagaacaaaagattctaggatgaccaggatagcaatcaaagtgagtatgagaaatggcaaccttatcttgagtgttcaagatgtaaaaaggcaccatttgggctaatgtagagctaaatcttgttattgtgggatagcggttaatctgaaagaacctgcccacagttaagaaagactgatgttaaagaagaaaagtgtacgagtcctgcccaagtgctaattatgattcaaagggacctgggtatcagtcctttgactgactcaagttagaattttatgggtaagattatagttgttgtttcaattgatatcgatatcaaacattttacactcaatgaggggatatcaaaatatctgcattggcagtgcgtgtatgttatttagtgataattcatctaataaggtagacagattagaaattaaatttgttaatattcccaagtggaacataggatctgagtagttaatggaaatatccatcctatttatttagagaacggagtcttttgatataaagtgatctagtgttagtataagtggaacaaattatgagtattgttaaaaaccctaggtgaattaaaggcaacgattatgtgggtggatctattcactaccagagggcatgagtcaagctgtgacaattagagtcccgtgatccgcggaggaaagaccaagagctgtataatccacattgcccgggaaaaggttgtatgtagtgattttaaaattatatatgcatgggactacatggtgttgaggacttgaatgaattgattgggactacctatattaggaaaaaaagtatcctgtttcggtagcccatcatgaaagaactcc

SEQ ID NO: 233236 - DNA, 948 bp, Cannabis indica
ggtatgtttcgtggaataaaatatgtaaagataagaatgaatgtggattagacttcaaggatattgctttatagaatctttctgctataagtaaacatgtttggacaatatctaataagaaggataatctttgagttaagtggattaactttgtctacttaaagcaagaggattggtgagactatcaagttacactagaagcgagctggtattgaaagagaattatgcaaaccaaaggcaaattaaagactgtattatcccaaagtgagtttcaaaactttcattttttcattgttagtctttaaattaaaatgcacaatgaagaggttagtagatggagatactttatgatttgggaaagaataagtgttcttaagcatagaataatcatttggttagccttacgcgaaagactcccaactcgagaccatctttgctattttggtaggatccaaaacaatgactgtttgttatgtggaggtgcgattgaagaccataagcaccttttgtttacttgctactatagcaagaagttggaccaaattaccaactagtgtaggctgatttaaggagtaaatgagttaaaaaaaatgatacacaagttgcaaaaaaggaggctctcgaaaggcaggaacaaggtgttgatttctataacctcagcagtggtttattttgtgtggagtagtaggaacataggtggcgtttggttggaggtaatgaaatggaatagaatgaaaagaaaataattttcattccatttctttatttggttgcattttaaagtattggaatgtcattccaatggaatgctctttccaccattttgatggaatgaatatttcattttaaaaatgaagaaaaaaccattccaatgtaaccaagacaaaaaaattaatgcctttttataaattttttttatgccattttaaattttattctattatattc

SEQ ID NO: 233237 - DNA, 667 bp, Cannabis indica
aattatttaaaattataaatatagtcaaatatattattaaaaaattacatctaaagacaatataataattttataaataaatattctccatccttctatcatttcatcccttctactaaacaacttaaaaggattgctactctcctctccctccctcttattctgcatcctccactaactctccatcctccctattctccatcctatctaaaaaacatccaaggctcattcttattactcctcctctttcggatcataatttccaacagtggcgtcgcgacttcaatctcgctcttggtgccaaaaataagactgtcttcatagatggcaccttactgcaaccagatccgtctagtcctttgtttcattcatggattcgttgcaaccaaatggtaatgtcttggattattcattgtgtttctttagatattaagagcagtataatgtttcttgatactgctcatgagatgtggtctgagcttactaacagatttagtcaagcaaatggacctcgtctttttgaacttcaagaatctttaacatatttacgacaaggagacgaatctgtcactgcctatttcaccaagcttcgggctatatgggatgagatcaatgagctccgaccttgtctcccttgcacttgtcaagcttctgctgataacaccaa

SEQ ID NO: 233238 - DNA, 813 bp, Cannabis indica
aacttgtaatgatttaaactttacaaacaatccaaaaagacaacatatttcgggatcccataaaactttttgcaaaatattacaagttattttacacgccggcctaagcgacaaaactcgagaatacaaaatatatccacgggtagacctaacccgcttggtctagtctggcccgaacatgtacaatccatcgccaagctcgcgcactcatggttgattactaacagatttacccttttctgcacagtagagcacccgtgagccaagcccagcaagacagtaaaatatgaatatacacaataaaacatatcacaaatatattaatgtcattgtacttattgtctatttgacatagacctgcgtgttacgttcacacgcctatttatgtctatgtggcatatacccacgtgttacgctcacacgtctatttacaataaggccttagaataatttatctcagttccgattactgagtctaacctaattatgccttgcatgcataattcttcatttcaatatatagtatggcatagtattcaaaatcatctaatcactggggtaataatcataggccatataaccactcactataggttaataaccttaagccatataactgctcactttaaggtaataaccctaattccgattatcatttaatcccaatcataatatcaaacatgagtgccatcgcacttaactctacgtgctaactactgtcttatctgatgtcccaagtacgtggaaattcaaattcctgggtgctcctgaacaagtgccggtaatcttagtcacaatttctgggattcacaa

SEQ ID NO: 233239 - DNA, 1535 bp, Cannabis indica
aagcctcatggtactttggcatgtttgggtcttgaggactagaaaaagacaatcacaatgggtgattataacttgtaatgctatgaaggggaagaagtagcttgcatctctaacatagtggctacaccagtgctaattcaacaagttaagcaacatcagtggcaaaatgaaaagctaagacttatttagaactgaatccaacatggtgagcaactagatgggtggacagttaacggtgaagagtacctataccatatgagaagactacttgttgaagatatccttgatcttaaggagtccattttgattgatgctcatatatccaagttttctgtgcatcctggaagtacaaagatgtatcaagacttaaagagacaatattggtgggaaggtatgaaaagagatgtggctagctttctacctaagtgtatagtttgtcagcaagttaaggctgagcatcaaagacctttaggtttacttcaacctttgcctatactagaatggaagtgggacaagatttcaatggactttgttattggattgccattgacacctttgaagcatgacgttgtttgggtgattgtcaatcgtttgactaagtctaccaattttattccaattagaaaggataacaagcttaccaggctagctcaactttatgtagacaatatagtccgactacatggagtgccttcaagcattttttctgatagagattctcgatttacatcaaagttttggaaggtcttgcaacaagccttaggaactgaacttcacttgagtactgcccatcatcaacagacagatggatagtctgagaggactatacaaactttggaagacatgcttcgctcttgtgttttggattttagaggtagttggggagaacacttatcactggtggaattcacatacaataataactatcaagccataggaatggctccttgtgaggctttatatgggagaccatacagatcgccattgtgtaggatagaactatatgagcatatcactaatggagcccaaattatcaccagtaccattgaaaagattaagagaatccaagaaagacttaaggctattcaaagtcgtcagaaaagctatgccaatctccaacgacgggaagttgagtttgatgttggtgattatgtcttcttgaaggttattcctatgcgtggcgtgaaaatatttggagtgaagggtaagctagccccgaggtatgttggaccttttgaggttatcaagaggatttgggaggtcgcttaccaattaaagttaccagggcagttgggacattttcataatgtgttccatgtgtctatgtcgaggaagtataccccagattcgtcacatgtccttgagtatgagggtatccctcttcaggaagatgtgacttatgaagaacaacctatcaagatcttggcgagagagctaaaagtttgaaggaatagagagattccagcagtcaaggtcttatagaaaaatcacaaagaagacgaggctacttgggagttagagtctaagatgtatat

SEQ ID NO: 233240 - DNA, 1158 bp, Cannabis indica
aaaacgttcataggataatattatctaccataatatcagcctatacttagtacgctagtcatactctagctgtagtgatgtgatagcatcgatcagtatcttagccaaacatacatatactagtatcaaatataactctacgcatattgataccgctatcgatgtaatctaacaggcttaataaagatgtatactaaacatgtgaacacatatgaatatcattatactaatcttacctcatttctgaattcaagtgagttggccgacctaaatggaaattttcgtgctagatcgatgccctagtcacattcacgcatacgggtaaatgacatgtcaaaaccttaatctaggaaactcaaactccaactaagggttctgctattggtcactactataacaataccctaaccataaaaaattagccaaccaaggctttgaaaacaacatgaatcgacaaaatggattgcgcgggaagcttgtcccaaaaccagttaactgattttacaggacctggaaagccggttaactggtttgcatcaggtttccctaagtaatcaaaatcttgcccaaaacgcatccaaacttagccaaactttccgcaacacctagaataacatccaacaataattttcaagcactaaaaacaacatacaatcgtagaatccaattccaccattaatgagccaagtatgagttctcaagctcaaacatgctcattccacaaataaaccagcaaaaccaacgataaataatcaattcaaacttaaaacaacctctagaaatgccctagagtaaatcctaaccaaaacgaccactatatctcaaaataaaaagctaaactcaactaaaagcttaaataacacaaagataatgatctagggtttaccttgactttgagcaacttccaatcttgctgataccttgctgaattccagaaaaataaagagcttggctgggttgttttctggttgtgtggaagtcgagcaagaaagatggagaaaaaaggtgaaattctaaggttctctttatttttcttaatttctttctaaaagaataatgtataagaccatttacttcagctgagataaaacaaagtggtcagctgccactctcccaagcagccaccaaatccctttttcaaattaccaaaataccctt

SEQ ID NO: 233241 - DNA, 651 bp, Cannabis indica
actaaacggtctttacattatttctttcagtatgttacctgaatccaagaaggataggagagccccacatacatcatctctaatagtctcccaattatcttgaaagaagatgttagagaagtcgtcgggacccagagatttattcccaggtatgctgaaaatagcctactttacatcctcttttgtgaatttctgcaataggtaatctgcctgatttgatgtcaccatagggcctttaattagaatgctcctctttacgtgtcttctgtgttcctgtttagtgccaagcagacttttataaaagtccaggaaggcctcagtgatgcgatttggattagtgaccacgctgccatcttgtttctgatcaatagataggatgcagtttcgcctcaatctctgcttgatgcaagcattaaatagggcagtattagcatcaccattttgtatccaataaagtttggccttttactgaagaaaggagatgtaatccttttggaccttcactaatctctcacgaatttatttttcctgcaggtgaagagtggaatcaagtggctgatgctgcaactgattttgaatagcctccaaatcagatttggcctcagcaaccttctactttaaattacagtagccctctttattcagcatttt

SEQ ID NO: 233242 - DNA, 842 bp, Cannabis indica
ttgactcccacattagtatgataatgtctgctttggactagattctcacagttttataattgagaaccttcccaaaagcctcatactaatggagtacgtaaaacacttatattcaagacaactcttgtctatgcttccaatgcgggacttgagttgataccccaacaattttttcttatctgtcttgctagaaatcttcttcttaaatgaatctttgctggtttggggatgacaatgacggggttgtggtgtttctcgggttctggttctcttctaggaggttgggtgggggatcaaatggttaggcattgtcgatccgctgagtggttgatgggtagcaatcccttgctatggtcattgggtctagtgcgatggggtttagagactggggctagattctggtaattgtctaatgaagagggtttgtatattgcttttggtttgatgagtgtcgatcatgtgtggtagtttttcagtcttttttttttttgaagtaagcgtgtaatcattgattcaaataaagctagacctcatggtcattacataaaaggttctccggtaaaacagagactgggatagatccaaacatctgatgagcaaacgcccatctagccacattgtgagcggtaaaattacagatcgactataaaagaaaaattacagctaatcaaagagggagaagacttagaacaaaaagagacatagttttcaagtgcccagcgatactccttcccattgatagcgttgatcaccaccctcgagtcattctccactataacaaacttgcacccgatatctaaggctaccgacacagccaagcagcaggccgcaacttctccgca

SEQ ID NO: 233243 - DNA, 1082 bp, Cannabis indica
atttattaatagacaatttaatcgacgaatgaattatgcaaatcacgaagtttgtggtcaattcatctattaattgcaaatatgaagaactagtacacaagttgaaacaagtgctggaatacaaccaagagcacactgaactacaagtgaaataccaggtgaaagaaggataccaaccattgaggataaaagaagatccaagcctattcttatacatatacaactaaaactgaaagaacctgacttcacaagatatccattgtgtgtgaacgtggtcagtaacatagcaactaacaacacctccttctttacatgagaaactcatagttgcataactattgttttaagggtatataccatatccaaaatattaacaaaacataaagcattatcaacatcatatatttaaaatattaaggggaagttctaaaacttttcttattacacagactattttgttgaatctttaaaagttgtccaatcgttgattgatagttgtaaaaatgtgttatacataatacaataattcaaagattcaaataatttttgtaactatattccttggtttactaattagataggttgcataaaagttatttcatcattgaattaaatattatatatattgacataattcagaaacatgtaaacatgagcatgaaaacaaaatacaaaactatacaatatatccaaacccataatcaaggtgaactcttcaacgctaaaatgaacgcatggaccagcaatgttttcccaaaattcattcgaattggactgctatatctctcttaagagaataccatgaacagcttgaggaaacaatttgaacagaggaatattctaaaaatttataaaattgggttgcacggaacaaattcttaacatttcccgaaaaaatagaattaagcttctaaatgatattgttactccaattaagtggaggccactttcgatctatagtgatcagaagcagggtacatgcatttccaaaacccaaaaaatggtaaacaatcggccaaagaatactaaaaatatatatatataaaaaaaaaacagtacaaatattcattacaaaataaagt

SEQ ID NO: 233244 - DNA, 933 bp, Cannabis indica
tttccgtgtggtttagtgtcaatgggtcatggcgaaatacattcccactttcctaatcttcaagtcttaccactaaacgacctcccattcccaatgtcaactctcagaagcaccagcaaccacaacaagaggaagaagacgaagaaatttcaagtactaacctcaattaaaagcaactacaacgacattatgtattttggacactgacaaaatccagagttctacttcttgattcttcttgtaattggtatttttttatttatttattgcaattattatttattatatgattttttgttatttgggtttgatcattattctaccttttattgttgatgcagataatgttcatagcattctttacaagcaccagaaatggaccaattcctactgggtatgacattttttttccttttcttttttttttttatctcgaatgtatataagaacggatttggtttagagtgttttgttaaaatagcctgaaaattttattagcaaattaattttattagcaaaataatcttcaatagttgcaaaaacgatcgtgagttatactgtgcgaccataaacaactattataatcgtaaaataaccataaatttacactgtgcaactattatgattgtatagagtaaattaagtgaggttattttgcaaattttagtatttcaaatagttagtggcaaatttcactttggttaaatgggtaatcttaaatctgttaattggattcgtgaaactctacttttagcaaaaatatttttagttatatctaattttactatgctctgtgaataaatgtttagtgaacttatcagtgcctgcttttagtggataaatgatcgggtttaaacaagtttaatggcattataatgagaagatggttctgtattgcttgtgtgtattaacattcactctttgtttcaaaat

SEQ ID NO: 233245 - DNA, 1587 bp, Cannabis indica
ataatgagatatgtattatatatatgatggtatgtataattaagtacatggcatgcatagacccaccataatattttattcttaaagataacaaattgaacaacacatctctgtgatttgtgcattcatgggcgacagctgctccacctcctccgccattggagaacccattctcaagcagaggagagattcagcttggactcttggagaacctctgattcactgcttggatggtagtggtgacggtagagtcggggatctcagatctctgatctcatatcgcatctctctctctctctctctctctctcctccagatctcacccctatctcgatatatggtgtggttccatctctgatttcatcttttctttcgtgttgtttctgaatttatatacgatttcaggtgattatttttgttagttgatgttgagaagtggagtagctaattttggttgtggtttaagatattggagtagctgaatctcacaataatctctaccccatattaaaaggtcccaaatgaaccctaatcctttctctgcgcacttacattctagatattcatattcttgcttccctgttcatagttgctaacctattctttttttattctaatcttagaaaaatcgaacctttgaatcttcttttggttgaagtgatatatatctatatattttataaatgaatattttttagggttttattattatcgcctttctatatttctaccgattaattttgttgaaaaattatatatttatttcgtttgataaattttattaagatactgatttctcgtcacgtttttctaatgtgtttatttgcttgccgggggtttcttaaattattaaatcaagtttgttgtaattcaatgtcttaactttagaatagtagagtggttggtgttcggagattaagaaaattgaattctatgttcctggggagaggctgatttaggaagtaatagttggataatcggggtagttgattatgaattaataactttgtcttgcagttgatttgtgtgtaaattttttctggtttatcttgagtttgtaaaaatgtctctaggttatttagtcttcttgcttggatgttggtttagttttgaaggggagtttttgatggtaattatagtatttggattctgggtcttttcgggcttttgcaattttagtttttaagctaaatgtttttttggttttgttttgttttttaaggaatgaaagtaccaatttgatgaatgagttgcgccattatttatggctttggtaccttttaaggtttttgcgcttaatatatggctggcccttaattatttagtgtaatttgtttaaaatatcatgatatcatgaaatataaaatattatgaaatttaaagttaaaagtgtttgcacagattttactaattggttctaaaagggttaactttaataaatgtatgatttaaggaaaaatttaagtgaatctgatattatttaagaggattaaagattaaatagtaataatcgtgacttattgtgttcaaggtatgatttaagaaaatgtttaaagaattttaagtattatttaagaggattaaaga

SEQ ID NO: 233246 - DNA, 917 bp, Cannabis indica
tgtgcaggtttactagtagacctagtatagagtatttacatgctattgagagggtcatgagatacctaaagagaaccatatgaaccttggattgcattattaaaagttttaagctgtccttgaaggatacaacgatgctgcctggaacactttatcaaataaatccaaaaaaactagtgcctatatttttagtatagctggtggagctatttcttggaaatcaaagaaacaaactattttggcacagtctaccatggagtttgaaatgatagcactagctactactagtgaataagtaggttggttgagaagcctgctagctgagattccttaataagaaagaccgataccagttgtgttgatccactgtgattgtaccacggatattgcaaaatttcaaaaccgttgttataacggtgggagacgacatattcatcataaatataatactgtgagagagttcctctctcttggagcattaagagtggatcatgtatgcacttataaaaacttagccgatcctttgacgaaagaattagctatagagaaagtccttaaaactcaaaaagaattataaccaccactttatttacatcgcttttacaatgaaaaagggggaaaacataactttataagtttaggtatcaaaaatagaaagttttaaaaaaattgaggtaaaatggtgtaaaaatggtagagatagggaattttttaggggtggtgaaggttttggtggtgggtttctctggtttcgactggctgctgctctttcatgatgtagaagacaaagtgtggttcgagtgctgaaagggtttgataaataaccttatggcgtcagttttatcaaataactgacgccatatgctataaatgttacatgtgtcagtatatgatatggcattgattatttaagaaaa

SEQ ID NO: 233247 - DNA, 1706 bp, Cannabis indica
gaaaaatagagagcaaaagaaaagaagagaaaaagaatgaaaactcagctcaacaaaatcattggctgattgcttgtatttataatgacttgtccactatacaaaataatgacctagacctttttacacaattacaaattaatcattacagcagggaatattctaacaagaatttataacacattgggaccacactgttcggttatgacaactcacagcttctacaactagtgagatattttcatttttttcacaataggcacttagggcacaagtaaatgtataaggtgcttcagaattatactatttttgtgttgctcttagtttaaatggttgaaggaaaatttcaatctggtagaaaatttgaaaagttgtggctcttttaaaaaaaataaataaaaaatcatctcatattgtggttcagacttgtgttttaaatttccttcacgctacagtgttattttgttgttaagttatactttctagggaacactacatgttctccttcatcacttgaatgttccaagaaatgtcacataatattattcttcatgaactgatatgtataatagaataggggctaaagaacactagctaaagtgagaacaggtagttacatatgtttgttttcgaaatagcatttgcgggtaaaggacaagcatctcaattttccatggttacttttttctcagccatgcaaggatagctcaagtagtaggtgtgcaagggcaaaaaggttactattaggcagcaagagtcaaacaaatggaaataaatcaagtagtggggagtgtgcaagaacttcaaaaagagagtatatattttgtcattcaaaagtaaggggttcgggtaagtgtaatagtcctagaaatattgagtatacataaacagtgcaagagtgattgaaaggggtcatctactatatgaatttggagtagagttgttgctcttggaagaggggtggtctttcaaataccaacaggttcctgtaatgttctctattcctctgtgagaatttatttgggtcctaacagtggtatcagagaattcatcttgggcatggaaaaataagtttttgaagctcgcagcagacagtcaaattaaaaaggtggaatcatttagacatgaagccaacaactgatgaattctcaatatgaatcaaatccctattatactagatatgattaagagagattattcatacagaaactttcatcaatggtgacaagcaaagcttctcaccgtaatggagatgttgcaatagtgacactcactgcattaaacacttacaaccaagggaatacactcactttgtgattagggttcacctagagaaaaatatgtgagacaagagaaaatgcctatccttgtgcataacatttccaaagaatgtgtctctgagctaacaaaagtggtggtagtgttaggaaaccactagagcaagattttttaaatggtgaaggtgagaatgattcacaatccataatcatctttgaccacaaaagagcaattcaaatgctagatggggaagaaaacagtgatgagaaacagttttctttactagaatcagtgcaagggacactaccacaggacctaaactattttctctgtttatgacccaccagagaagtcctaaggaaatgctggcaccgtagaaggcagcgattacagtatttcaactgttgcttggttcgtcgcaagggtgg

SEQ ID NO: 233248 - DNA, 953 bp, Cannabis indica
agattattgtatttgtggttgtgtgtgaaattaaattgattgtaactgtaaaataatatagaataatttgtggctaaacttttttatcttttttattttaatactgttaatcttttaattttgtttagttgttttatttgcatttcttaaatttgaattaattttaaaaaaattacttctaatctatcttttacattgttttttgagaaatggttaataagttagatactggttgtaagtagagtctagtcattcaatcacttatctaagcaaataaaataacagcctctaaacatattggtttcaccaaataaaagcctatatggaataaaagccttcatttccatttccaaggtgaatgtgttggaataagatgtcattagaagaaagatatagtgtgtccaccaccatatatcaaaaatattgtaccttcaatatttgctttcccaaaatatgtagtaaatatacataattactaatattgtaggaggggaaataccacttggtttaaaagcttaatcaaaaataaaccatttagtttgtggaaatttgatatttgaaaatcccaaaaaatgaaaatatttttatgattgggtgtttttctaatgaaaatttcattgtaaaactgaaaaaaatttagtgttactgactctcgctgaaaaatgtcagagaaaaagaaagatatgttaatttcactgttaaatcttgctacttgataagcatgaaagtttatgcttattgatatttcattattatttcatgtactatcaattcatattagtagtagaattagtggttcatccagcaacaaaaaattgcaaaaatcacatgaatttgtgtgcttattccttgtgattcttgcatttacaagactaatttggtattaataaatgcaagagggtgttgggaaaagaggaactactgactgtagttttgcattttgttttgtatta

SEQ ID NO: 233249 - DNA, 1235 bp, Cannabis indica
attaacataaataactgctaatttccaaattaactaagcgggctttacagtaaatgtgtatgtcagtggcgatggaataatggatgatgtgatttagaattctagaaggcagtccctaaaccctagcctataattatatatataggcctagaatttgttagttatcctccacacgtcaaggtatctcacttcaaaatctttatgttaatacaaaataatgaataataaatgtaaataaatataaatctaggaaaagatcccaaatttgtaggaaaatatcccacaattattgggattgtcgttaaatttagtaatttcctttcctccattgaagttccttatgtggcattttacttcaccttggggaatggaaaaaattggagaggagtgtccaagggatggcacttctcggctaggaagtcgcaaatgttgtgtcatagtcctttgggaataacagaattggagaggagtgacaagggagtgtcacctctcggctaggaggttacaaaattggagagtgacaaggggtatcacctctcgaccaagaagcaaaataattgaagaggagtgacaaggtagtgtcacctctcatctaggaggttagataattggagaagtgtgaccaaggggaagcacttctcggctaggaagtcacacacaattggagatgagtgaccaaggcaaagcacttctcgactaggaagtcacacaattggagagcaatgtctaagggcttaaacatcttggccatgatgcctcataggttgtgtcatagctctcccaacaccccttgtggtccccacatagcacaacttagtaattcctgagtaaagtgtgctagcctattttgtgagtcaattttgagcccgataacttcagaattgtgtgatttccatgcgacatacttagatcttacttgaaaagatctttaaaattaaagttgaaccaagtcatttggataaacattaagagtgttatgatcgttttactgaagggttgtacgtactttttggtcaaaaatttgaccactgccacatcatagtggcagttctcagacctacatgttcctggacccttttgggtgtattttgacttttttttttttgcgaataatcatattttgtttgtttcggggtcccaaaacctcatctcaacctttgaaaccccaattggaaaccactgtcatcagtcggtgccaaaagacggcagtgctaggccagggctattgggaagca

SEQ ID NO: 233250 - DNA, 1855 bp, Cannabis indica
aaccgatggttaggagtgaaaatttgaggaaccactggttcaaggaacagagccgcatgatcggagcacgagtagtcaagattcaaaagagtagcttgagggaatacctgaagccaagccgaggtggctaaggccctgtctagacgaacttcgatccagttgtttgagcctctccccttctcccatgtaaacgggtgtccttgtaactcgatgtcgtgcagattgcattgttgaagtgcttcgttgaaacccgtgatgagtcgttgaggataaggtctgccgcctctcttttcttcatgacagacaatgttgtttgtatcaccgattatgcaccacgggagagtcgaacgagtagctagagttcttaacaaattccacgtctcatgtctgcggctgcggttgggttcgccatagagacccgtaagtctccaatctccagcgtgagtcgtatgcaccatgaaatcaatatgattatttgagtagcccaataaactgccatcttccttgttcttccataaaagagcaaggcccccagaatgaccaatagcatccacagtaaaagctccatcaaagcccaaaagtcttgcaagcccatccactttagttttttgacactttatttcacatagaaacacaaaattgggtttcttatgagatatcatctctttaaggaattgaatggtccgttggttcccaagcccccggcaattccagctcaaaacattcataatgcttggcgggtctggaccccagaacccgccccatacaagttttttggatcgcccccttgatccataaggtcttcatttaattccatagtagcaccagagaccaattgtgactttggtccatgtttgttaaggcccacctgcccatcaagaccctccttcggcccactagcttggccttctataactctccttcttttagaatcaagaaaaaccaacccaacattagcattttccacctcagcatccatattactttccttaaaaacctcctccccaaaactgtgggatttgtttttattgtttccatattgattatcttgactatcatcagattccttctcatacggtccatgatttcctccctcctttgaatgtgcattaaatccttctccagccgcacctctgcctacagccgcctgccccctcaccggagttcttcctggattcgatgaactcccccctgcccagccagcgttttttgtggctaatccagatcgcagccacttagaaccgtcagcatagttacgtcttctcggagccgccttcatttctagcccgtactcctttgtgatcaactcctttggagtgtcaaaaagcttttcgcagaatctttcggagtgaccaagaatcccacaaatgaaacaaaaggtgggtagatcctcgtatttgaaaacaacatgacacaccggtcccccttgcatttctaatttcttcttctttttcagcggctttccaatcgggatcttaacccgaattctcaagtaatcccgccaaactcccaaaaagttgtttgggtccgatttgacgaacgtaccaatgtaattgcctacacccctaatcaccttctccgacataaatccaatagtcaaattatgtagttgaacccaaaggtcaaaatgcgttagcggtattgatcgcggattaataccatgagagaccctttccattaacaatggcgcacgatcgaatgtccaagggctaccttcaataacacgctcaatatccacttcatggtaaaattgaaagagaaagaggttcggatcaagctctttcacatataagcctctacccggttgccatagagtggctattttattttgcatcgcctggaagtcaattgagcg

SEQ ID NO: 233251 - DNA, 1886 bp, Cannabis indica
aaaaaataaataaaaactatacacataaataaatagtataaaaaatacagtaaaaatgtaatatattcattataacagtaaaattgaaataaaatagaaaaaaatagtaattagtgtaaatttcccaaaaattaatgattgtgtaatcttcagttaatatatttatatcaattaaaataataaaatcacttccactatacagtcaccacaaattttttggttttctttttcttttagtgatcgaatattaattttgtttccaaactatatagttaattagttaattcactcacgcgtcgcgtggtgattaattattttaacttgacttaattttgtgaatgtgtaataaataccaattgcagtagtgcattgctcaacgtgtcttataaggttaaaaaaaggccatgatcaattgggcgcatgatttgaatggtaaacatggatcacatgatcatatatacagattatcataactatgtgtattcgcattataaatttttatttttttgaaagggattataatttataattaagtacatttaaattataatttattttattttatttttttaatataatcgaggaggggtatagtattatagatactagtggtggctttttgggtggccttgattgaactaatttgtttagatagagaaaaagtactaatggactatctgaccatttatctgcatatcatgtcttctcgtgattggctaaagtaacaaagttcaaccttttcttttgttattatacaaaacaaaaattaaagtattgggatatatgggaccatatataatatagtttgttaattgaaaatataataacatatattaatatctccttttggttactttaattatcataattaattattatgttacaaatacaggaaaattaaagtaagtgcccatggcagtggggcactgcatgttttagtattcttttaataaaaccatatacatatatattatatgattaaatgtatgactcactttaatagggtcttttcttttgcttcgactagaagagtagaacaaagcgtgttctattcaaatatggaactcttaaatcttaattaatattgtttatatataaatatggaaatcatgggttttatttatgtatataataagttcattacttgcattgttattctcacaattaattaaatgtgcttattctttgtataacttgtcacggaatcacccaacatggattattgtttgagtttcttatattaaattattaattttttatggagtttattagtcttttgaatgaaaacaaaatatttgatctatttattcagaatataatgatatatatgtgcaccctaatattattgtgcaaaatgtcataaaaacagtattttaaaccaatgatatttatttaaaccgaaactagctagctagtaataaagaacgttgtgtgcaaggttaactgtgttatccatgtattacccaaattagttttagattgtaaagtgagtgcttcttggaatgggattgttctctatgttgtgagttctgtttttcatacagaattgcttatttatttgtaatttatactagttgttaatgaaattccatattaaaaaaaaatgtaattcaatgatccaacattgttacaatatgcaatttttgtatgcatttatgggtaggtatcggatccaatccaatttttttttctcatccgattcaatcaaattagtaattagatttgaaaaattattatccaatccaatccgattagacctcacaatccaatccaaaaactaattggattggatcggttttttaattggatatcaaattactcacctaaattttaatattaacataaaaatatgaaaaaaaaaaagtaaaaattaaatattatctttt

SEQ ID NO: 233252 - DNA, 862 bp, Cannabis indica
aagttaatcactggtaataaggttgaaaatgctcgctttttcaattgttctttactatcaagccatttggccaagccaatttatacacccctggtcctatcacagctactattacataaggaccttcctaatttggattaaacactccaacttcagggtcttgtgtattgctttgtgattaaggcctaaatttgtatattttgagccttaatagtgtagctaaaattattttcaattgaatattttcatggttttaattataaaattattttatttgaaaatatttcatttgttttaattttgtgtcatttttcaaatttgattaaattggtataaatgaaaatggcttctgaagccaaacaattttaaacaagctttattccaaatgaatttacatatatcaattaattatctacgattatgttgatcatttttagtgtggattcttttggacaactaaatttgtaattaaatgaactttgtcaaagcaaaagggtcaagtcttcaattatgcaactaaattcctaaacccacgttgaagcttgtcccaccatcaccattttctagcgcttgatcaatgaagccacttcctcagcagctaactgacacacgattcccactccatctgatagaagttcaatctgtgtgccacttgaccgcatgtctccaaatttgaccactccatctgacgccccataacaccatttcatccgcatattatgtcatttttcctctattcacactacacgcaaatgtcagatttgaggagaaatgttgcactataaaatggagccaaatgcaatacaaaaggcatcagattttagagagagtagagaattactttgtcattttatttttctct

SEQ ID NO: 233253 - DNA, 1177 bp, Cannabis indica
aagaatatgtactatttatattgcatgcctatcaacttactaagagcattcacaacaatttctttaaaatagagaagcttttaaaaatttaaaaaaatgtactcataatatgttacagtagatgttttaaactcttttttcattttaaagtttctttaaaatttactattcacacactacatttatagaatattattcattgctctaaacatatttattaattgttttgagttttaataattattaatgtatgaggatatgtttatattaatattatatattttatatgaataaaatataataaaaattttaaaaagtagattttccgtgatgtagtttaaagaaattaatgtatgaagtgatataatataaaattgtgttgtaaaatagaaaaaggaagagttttaatgacatattttaaatgataaagtggagaagttgttgggagtactctaagttacacctcaaacttaataaagttatctctacacaccaattacattatatgaaaaactaattgaggtgtttgaattcataacttaaaaactgtttttcagattacatcacatgaaaaattaataaggtatttgacttcataacttaattttttttttcagatcttaaaaatcgaaatcaatttttaaaaactaataggtttggccatacttttcaattttttttttttgtaaaattaagttttttaaaaaaaaaactaaaaatacaaaatgttgttttctattttttattttttttattattctctcacaaacccagttctaggttcgggactgggattcgggtctgggtctgggtctggggccaaggtttgaaccgggttcgaggctgcgagtcagggtccgattatgggtttgggtctgggccaaggtccgaggtcgagtctagggctggggtcgagggttgttggttttatggtactaaatcaagtacgcaacagaagagtttcatattatcttattatcatcgtaccatgttctaatagatctctagatgtatgtacattaaaaaaaaattatataataagtttaaagtttacctcttgaaggctatcagggtatcctcaaaacttctcgtaagttatattccttaatccaaatgatgaagaaattgtaattagactcacacaaatatcttccaaattgatccaccacacataaag

SEQ ID NO: 233254 - DNA, 2078 bp, Cannabis indica
actgcccatcctactcttcaggatcactcccagcactttgccattcccaccatggccgcgccctccccttccactattatcactcaccccctcactcctccatccgttccaaccatggctaccaccccctcggctccatctccgaataccgtctcctctccatccccacctttggccgctcctgtccactgcccccttcctgtccaacccttcaccaatgccaccaccaacccctctatcaacaagggaaaagctcctatgtatccctgcaccaccatccctctcgtgagcagcccccctatttccagtctccgcatccacgacacccccaatgtccctgactccaccaggaaacgttctttcgccaggcagcagtgtcaagtcggctcttcggttcgcagtatgttgaaaagagctcgtgcttctcactctgacttcgcggtcgtcccatcaatgtccgataatgaggaaacggcgggtgttgctcggcaaccccgccgagaaaaatgagtttcatcagttggaatgctcgtggattagggagttcccgagcattccataatctctccctcctttgcaagcagcaccggcctcagcttctttttgtaatggaaacaaaattacctataaactcttctgttatagctaaggctaagacgttttttgataatgtttttcaagttcctagggagggtttagggggaggattgcttttgttttggaaggataatattgatgttaatattttgtctcactcccttaatcatatcgactgtataattactattaataatataagttttcatttgtcttgttattatggttccccttatgttgctgataaaaatcactcttggaccttactgaatcgtctctttgatgctgcccctttagcaccttggatcataataggggactttaatgattatcttggcttcaatgaccgcaactctaacagtttaccccctccccactctatggtttcttttcagaacttcatagggaaatactctctttctccgctttctttttctggaagccgttttacttggaagcatggtaccacgttagagcgattagattgggccattgtcaaccacaaatggactaatttatttccctcggcctcccttcaacacttgggtttttttggctctgatcatagagctctcaaagttgtgtgggatggaaacccacccaataaccccaaaccccgacttgacaaccattggttacttgaggatgatttccctgatttccttaggagaacctgggtttctgatccttccctttccagccatcctaaccctctctccaacttcatctccaagcaaaataattgctccctttctctgtcttcctggagtcgaaacaaaatcaattttcccacgacattaaaagccttcaatctgagatggatcagcttttggcaggacctgttatttctcaggccaatgctactaaagccaacgatcttcaacgtacccttgactccattttacttaaacaggaaatattttggaaacagcgctctcgtgttaactggcttaaagcaggggacaaaaacactcggtactttcacaatcgtgctacgaccaggaaacgcactaattacattaagtccatctctggagcggataactctcaaatcaccaacctcaaggacatctcctccacttttgttcagttctacactgatctctttacctcccagggtacaaattccgatgctatgaacatggccacacagggtctgactaagcatctcaaccccactcagattgcgtttcttggctccccttttacttttgatgaagttaaatctgctctctttcagctcgcgggtgataaagccccaggtcctgacggctttaatccgaatttctttcagaagaattgggacctagctggcaccgatctttgtcatgctgttttactgctcttgcaaccaatgctgatattggcccgcttaatgaaaccattctggttctcatacccaaagttaaaaatgcctctcgtgtcaaagactttcgacctatcagcctctgttccaccttttacaaagtcgtttccaaaac

SEQ ID NO: 233255 - DNA, 1380 bp, Cannabis indica
agctttttattttttctgtgtgaaatcgctactacgaggctcaaatttggttaacaaaaatctgcgttaacaactgccaccagttggagccagacaatggcaacggtcgatcatggcttgtgggaagccatgggtggtgtttctcatttgtatttgataaatggatgttaaaaatacaatttgacccataaataccttttccttgtgtagtagccgaccactaccactccactatggtagtgtcttgtaaagcattgggttacttttctcatttgtatttgatacatatatgttggaaatgtaacttggccaatttcttatgtaggggccgaccactgccactccattgtggcagtggtcggccaagtggtttctttaccacttggtggcttttttcacttggttttgacatattattgatgaaaatgcattgttgaaaaggaatctcacttcccttcttattggccgaccactgtcatctccttatggcagtgctcatcgaaattggggagcactgccatttccttatgacactagtcagctagggaaatttataggcaggaaatgatttttctcacttgtttttactccttggtattgagaaaatccatttgaacaattttcccttcatggtttgtaaagagagaccactgccatctccttatggtagtgctccccaaaattggagagcactgccatttccttatagtgggcgcatatgccttttttcttgaggatttaatgccatattggctttatgcttaaactttagtcaattgatgcccaaacaagacaagtccttattggtttccttggcaaattgatatttctaagggtgaaaacgctcacacgggcccatgaatcctagtttgggcacacttgggtgtgtgagtgccggcgccaaaaggttggttgacgttttcgagccctctagaagtgccatgaggccctcaagaaggatgtcttgtatttatttaacatttagtgagccttggtcaaagtcgtaaggttgtacttttttttatattttttaaaacttgggtataacaattttaaattaatttatttttaaaattttattttaattttaaatatttatttacgtggaccaattaaattgtgccacgtggatatttcaacatgacacttacagtaaaaaatgaatggaaatgttaaactgctaacagaacacggattttggaggttttgcccctaaaatttttgttttggtggttaattgctagtggaataaagttttaggggttttgccgcaattaaccctattattaataacatatacatatatatatatatatgaaaagaaattttctaataataaacaaaaatcttgaaaacaattataaaaatatagttaatacg

SEQ ID NO: 233256 - DNA, 1038 bp, Cannabis indica
atttccatatggcagtgggcgcataggctctattccatggggtgttttatgccattttgactttatgcacaaatctatgtcttttcatgcccaaatgagtcaagtccttgttagtttccttgttggattgaggtctctacggtaaaaacactcacacgggcccatgaatcctagtttgggcatacttggatgtgtgagtcttgacacctggttaatgttttcgagttctttagaggtgccattgggccctcaaaaagcatgtcttaactcatttgatatttataagtctgggtcaaagtcgcaaaatttacttttttaattctttgaaaattgggtataataatgcgcttataataatatgtaatatgcttatctataaaattaaatcttattattgtatattttatgattaataaagaatttcaacaaaaaagaaagcttttaggtagtgttttcacaattagtttcttatcaaccattaataataaacaaccactacctttatctttcttttaatcttcttaacactttaggtatagttctctaattttcaaaattctagacattatttttatttatttattttacaatttttaaccatattcttattatcacattaaaaaaattaacaaacatagcctaaaaaactaagcaaataactaaatataacactaatctagtatatcacttaagattgtacacatttaccaaaaaaaaaaaaacttgagacgtatactaaccaaaaagtaaagggtaattagtaatttttcctctcgaactttgacatgtactaaatcgtccctctaaatttttttggccgttaaaaattccccatgaactattaagattgttaaatttaaagatttttgtctaattttagtaaaaaattctaacatgaatgaaagttcaaggggcatgtttaagtacatatcaataatttggtagatatcaaagtctagggagcatagtttactacataaacaatcactaaaacagtaaaattgaatgaaattagacaaaagtccttaaatttaacaa

SEQ ID NO: 233257 - DNA, 2354 bp, Cannabis indica
gtgatggcctaatttgtagaaatcgatgtcccaatttcggtcgtttggatggaatacccgttcaaaagttttaaagtttaaataagcgaagatatatttgaacatataatagcttcttactttcaataaatgtaagttattgaagtaacaacacattccatccaataaatgaataaaacaattacttatcgttcaaattgtgttaattctttatatgattatttgcaaatattagtgatttatcttttaagtcacggagttacctaacatgtgtgcaaataggtatgctcaaatataaagtaggaacatgctactatggagcatttagttaattttcaagtgaacaagagtataaagcctgctcggtcacttggggggcacctacacctctacaacataagtaaggtagcatggaaaatactgaagtaaaaatctaagaattaagtatatatgcaaattgaaaaagttttatcggatatataacagttaaagcccgaggttaaaaggtacctggtcagccatatgtctacagagtgaaaaaattaaagccaagtttaaaagcctcttggtcggctaaattgtatcaaaaaataaggccattaatggtcgtgaaaaagaagaaaaatttaaaacttttcaacttcagtccattggggtcgcaggattcaggtattcactgaataatgggtcttgtggaacctggacggacgaggtaggatcaatagcttcagtttggtcagtacttgccctagcattttcactagcattttggccaaccttcttcgccttgtcctcggctttccaaaattcccaatacccaatcatgttagcatatatttctagagtgagatagccaaagtgagctttgagatattagccttccaaactcatagaatacttccgcaaaagtggtcttatgatattcaacatctttggcatgggcatccctctcagatacgagcgcctcctcagctcgtttttctcttctttatgagttgaattctccttttggtaggattcctccttttccttgagagcttcaatgagatccttaattttggtctcttgattttgaaggtgagtatggatgccttctctctcatccaaaagttctcggaccctttttgactcatgttctaggtctttttccaacttggcagtggaagacatgtcaaccagctactgctttaactccttgattgtgttgtttacgacaataagcttcttattcacctcaccaagataagtgctttttgctttttttcatccttgtcccctttcaaagctttcttcagcttattggtggaagaatcggtcccgagaacaatagatttggcttgggaataaacatagtcgagcttcaagttggtctaaaaaaataaaaaatgagccaagttaaaaaaatgacatagatagtgcaataaattcaaagatacaaaactcaccttggtaagctccttcattaggccaccaaccaaaagttcaaatggaaggtcttcacatcctgtcaattgctcgttcgcctctaccattacatgttcttgataaaactaagcacctctttggccttttttatctcagcctgcaccacgacggtaattgtggttgattttccaaggtgacccccatgagcaggcttaagcaaattaagcctctcaacgttaacaatattgacaccagaagtgtccttgaatgatatgataggcttcatttgagcaactgaggggcagaccgttaaagatttcttggtcatggtacgctccgtagataggagtttggtgcctctaaatctgtaacttctcacacccgaggaatcgagtctgatggtgctttttcaagcctaagttgggaaattttgcaacttgggtccatggtgatcagtggaggagcgtcttccttccttggcagcttagtaggggacccctgactagaagagccacccaccttccacttcagcatgctcttgagtcttctcatcataacttcaaaaaaacaagatagttaataaaaaggaaaatctagtgaaggacaaagttattgaagtatcaagcagtcaatatcttgaacctccacgggagcattttccctaagagtaatgattagggcatcatatcgttggatgaggaatctcttaactcctattcgagaacacccttgcccttgccgtcaatatcaacaagtcaagtagactgaggaggctctgcaaatggctcctggatgctcataggggacctcacagaaaagagcagcaatctgagcaggtctttccccaattttggaatatccctgatttagaggggttgaggccccatggccggcccaaaaacggctgtgcagccagatcaaattgcaca

SEQ ID NO: 233258 - DNA, 1156 bp, Cannabis indica
actaaatttccctttattttattaataattatatttagtttttttttctgaaatgggccctgagcggtggaagcctaaggcgacccgcctccttcgtcttagctcaaggtcggccatgtatataggatgattttacaatgtaccccttataaaggagtgtactgatgcaccatctacttacttggaaaaaactaatttttttaatactcatatatgttatagctatttaagatatcttacaaatttttaagaaatttggaataatttacaatatataaaataatattcaaacagtttattttacacggtataaaataaaataatcacgcgtgcaagatactatttgaatctagtttttaacgtgttaaactttttttaattttttaaaattttataaaatatcttaaataactataatttatatcgtaaaaaaacttaactaaaaagttattttagaactaaaacgggtgcgtctattttaaagggtccattatatgtaccaataaaatttatgtatggcaagtggtgaggcgatgtgacctgtgtcgacgttgactataattacaacagattaaccctacacttcactatgccttataataaaaaacgcgtagaagaatttgttggattaaaataaatattatgaaccaataataataataataataataataaattataaagcaaaattgacttgtccttccttatattagctgtctttttttttttgttatattgttaaagtttccaggacactttgaccaaacacttacttcatacttgagattgatgtatgtacccgttcacattattaattaagataataaaaataaaaattcgaaactgtttatgatctaaatcctaatttatggcgtccacaatattatactttgagtattattattgagtattttatagtgtccaataggactaatactatatcgatgtggcgtagtacaaatagttagcgattaattatagtatttattaaattaaaatatatataactagatattaatttgtactaataattatatgtcacctcatttgatatttggcactataagatattccttagcatttatcttataatattcctatcttgttgagtttcgattactgataaatgtactttttatgtaatttgaattaaatg

SEQ ID NO: 233259 - DNA, 2686 bp, Cannabis indica
cttgaaattatttttacactatcctacatgcatcccaatataactttttagtgcgcattggatgctagaggtcgttgtgccagggaaaattatctatttaaaccctatatgtggccacatagttacccccacaaattaatgcaatgttgaaaatgtaataatttaattactctttatgtaacaaatcttttaattaattaagttatacatatatatgttaatgaattgaaatgttaatataatttttaagacagagcatacgaaattataggggaatcaaatgtgtttcttagggtgtggccagaaatttcactagcaaattgtccaagacaacctaaaaatcaagaatgtagtttttatgttttgaaatacatgactgacatcgtcgcatgtgcaaaccctaacaattatataaacgatcaaaaaactataagttttaattattcattatcgtatttattatattatcaaataataatatatatatattaatataaatttttacttctttttacagtttggggaaaagaagatatacgatccaaaaactgagttgttacgggtacaacgacagtggatagaacgatttctggcggtgattcacgaaggcttggacgattgatgttgaaatgtaatagaagttttcttccctagcttatttttataggttaacttgtcattagatttattaacttgttaacacttggactaattttaaaatatttgtaaaaaaaaaataaaagtaattttaataagcgctccaaggaaattaatttaagtatattggctaatcataaaattaatttaaagatatttaatttatctttaaaaaatataatattaaatttaaattaaataatatttattttaaattaataaatatataatttaaataaattaaatttatgaaattataataggttttaaactggaaaaataaattaattgttaagaatgtggcttcggttattaagcttttgtcgtcgtttattatagcatatggtgttggttatatcctaataatcgatgccatagtgtatatatagcatcagttattatataataatcgatgccaatgtgtacattatagcgtcggttatgttcgatcctatagcgttgcctgaatcaacattgatagtaaattttgttaaaatcaacgctgaaaaactttaaaaactgcatctgaaggtcaaatttatagtagtaaaaatcaacctttaaaagcccaaattgtaatagtaatttaagttgtgtatataacactattaagctatacatcatgtgctctctttatgtattaatttattacatctttttcttttcaatttatttctcattatgaagatttatgttcagtttaggggcgtagggtgtgttctctctcttccaatggcgaagaagaagagaaatgttttgaagcctactaaaccatccatagtcgatgtacctgaagatcaagagctgcctttgagccaagatggagtggaagatcagaacctggcgaaggtttttctcgacccctgcgaagagcttgaaccgaaaatatcagtaatggagaaaccagcgagcagccctttatcgcagatctgggcagatgagatggagcaagtcgattatcaatcgagtgctaaggatatgtggagaaatttcaaaataaaccaggtgagaactccttctactagacttgaatttacagaacctttgagagttggggatcaggttattgcaaaattggatatggaagaaatagaagttgaggctgcctattggaaaaatgctatagtatgtatagttcttggtgctgacccgccttttagagtgtttgaaggttttgtgaagagagtgtgggggaacttaggagttgagaagatagtgagaatgcattctggattcactcttgttagctttagggatgaggctacaagagatttagtgcttgaaaaaggtgtgatacactttgacaaaaaaccggtggtgttgaggccatgctctactgatatggatacggcccaaatggttaaatctgtcccaatttggataaggctaaatggcttgggtcttcaatattggggtaggaacagcctaagtgctttagttagcaccatagaaaaacaaatcatgatggatagtcataaggtcacaaaggagaagtcgatgatcaaatttgtgagaattctagtggacattgaaatttcaaacaatcctccaaaagctatatcattcattaatgagaagaagcaaatggtgaaacaatcaatagagtatgagtggttaccttctaaatgtatagcttgtactatgttaggccacacggtggctaattgtaataaagaaaaaggtttgttaggaagaaaaagagtgcagcgagcaagaagcaagaaccaaatattgggggtgaaacataagtggaaaatgatgctgagattgtagaggggctgttatggagaaacctgacggcaccattgtgaagaaggatgaaaggaagaaaacagagaagaacaagtcgacaactacaacagattcaggaggtttagggtactggattacgcctaggaagaaggggcataaactagtggaaatagcttgtccgagggccacaaccagtaatggatctgatgtgctacagaataatggagatggatttggggaaacaactaaaactcagccagttaatggacagtgttag

SEQ ID NO: 233260 - DNA, 1551 bp, Cannabis indica
aatcgggctcagatcttggtgatactgtgctacagaaaggatacaagggttagagatctgagcggaaggagtcatttaattctgttgcacccacggtaaggtttcttaaactttatatgtgtttattttcattgttttagagattcatatttaggatgttaaacaacatacatggtagtaaatctagatcctggtaaaatatttccaccaacaagtatcagcatatgccaatgtcatcaaggatttatgcaccatgaaaagaaagcaccatgtgaagaaaattgtattcttgatagaagtgtagtgatcaaataaaagataccaatcaaatacaaagatccaggttatcctacaatcgcttgccaaattgggacacaaggatttggtcaagccctcctaaacttaggcgcaagtgttaatctcatgttttatttagtttacttgcaactaggcctaggagaaatcaagcccacatttgtggtgttacaattggctgaccactcaattaaataaccacgatgaatagttgaagatatcttgatttaagttggaaaattctattatcccactgactttttgcttttggacactcagtttgaggttaatattgggtcaaaaactctcatcattctcggtaagcctttccttgcaaaagcaaatgctctcattaactgtaggaatggtctcatgaaattatctttcgggaatatgactatggaggtcaatatttttcatgttgagaaataaccaccacgaggaggaagattgctatcatactaatgtgatagacacaattgttgaggaggaaatttttattcatgatgattctgattctttaaatgatctcctccatgactttgatactgaaaatatgctttatccatctgagggaggcaatgtttcttccattcttgagatgtcccaggatgaagcatcacaatcacaatatgaaaatttgcgattacaggcccgatccatgaaaagcttcttcgggtccatgtgcaatattgacaactttcggtaagagggtaggcttacctgaggagatcacctttgtgactctagcataccctgaatgatcatgttgtttctatttttgtttattgccttgtttacattttattcgatgtttatttcctttgtcattttttttttttagaggatcaatatcatcgttatccatggttgcttgcttttcatgtgttctatttccttattcttttaatttctatatctttagacattgaggacactgtctgattttagttggggtgatgagcatatttaagtattgtgatttgtattttgtcatattaatattttcatggtcataattttcaaaaattactcaattattcttgtcgaatgttatttttaagctaatttttgctatctttgttacttaaaatttttctagagttataaaatacacatgtcaaactttgtggtaagatggttgttatcacatatttgcttaaaaaatttatcaagtttaagtatttatatttttatgagtggtgagatttgggaaaacaacctttgaattttcat

SEQ ID NO: 233261 - DNA, 1033 bp, Cannabis indica
tgccgttaaataggcacttttaatatataaagatatagtggctgataactgattttctctggttttagctcttgcaactgagaggctggtgctatggctaaaacaagatcaaagaaccatggaaaatcgaaatttcctgctaaaatttcaagaaagaaagctagtaatggtgttagcgatatcgatcttgttgatgctttggggcgaattgctgaaatcgaaccactagaagttacggatgaggaggaatcgccaggggaggatcgtctcaatgagggagaggatcgtcatgattttcgacctctgtctcccgatacttcactgagggtgattcaaaggcaagatgaggttaggaatgatgctcggaacgattttatccattttctcagagccaacagtcaatgtaacagtgaaatacggcaaggtaaggattcaattcctcctattttacgttctaaatttgtgatgagaaacctaaaaacttcttttaaagatacggagcaggctactgggaaagtaaaaatcactttagatgatattgaagaggagattttgttttggaaaccttcaattgtgtgctatgttcttggtgtaaatccaccattgcacattcttaaaggttttgcaaaaaggatatggcaagataaggtggatcgagttaaagctttgtttcatggaatttttatcattcaattcacctctcttgaattcagagaccaggtcatgaatgggggctatgtgttctttaatcgaagacctgtaattttgaaaccttgggaccctaatactaatttcaagaaagaggatgtcaagtgtgtcccaatttgggtgcagcttgaagatcttgaactgaaatattggggccaaaggtctctctttaaaattgttggccaaattggaaagcctcttatggaggatgctgttactaaggatagggagagattgagctatgctagagtgctaattgaagtgcaaatggaccaccaactcccaaacatgataaaattcgaaaatgaacatggccttaacattt

SEQ ID NO: 233262 - DNA, 1544 bp, Cannabis indica
taatctttcattaaaattcttttatttgttaattttttttaatcaaattatatttttatataaaaattaaataaattattcaactatttatatataataaaacttcttaatttttttttagtagtttctcaattactttatccattttttttaaaaaaataatcttttaaatgaaaaaactacaccattaattacaagctcaatttattaaacttataaatttataatttaatattttaaaaatgctaaattatgtatccaataacttaaaaaatgttactttgtttaaaaaatattttttattatatcacaattagtaaaaaaatcaaattttaaaagaattacaaaaatttagcaacacgagcgacttaattctctagttcattaataaagtgatgttttttatttaaaaagagtgcttttcaacacaacaattagcttacaaacacccccatagtgtctttttcaacaccttatagtagaaaattcctactattattattattatttaataaattattattattataggacacttgtaatattacaagaagatatccgtactagagaaacgacgaatatctagtcagagcttgctagtaatgttgatgcttctcactttagaaggctttggagttgtatccttaggaacaattatggtgagaagaccattttccacttgagctttaatctgatcaaatttcacattttctggcaattcaattttccgagaaaacgctcgttttcctgtccctctctctgctacatgcaaagcgctgtcctttgagtttgactcctcttttgctccttctcctcttatgtgcaaaatgtttccatcttctatctcaacttttatatcttctttgcccaaacctgtttcaacatcgttaacaaaatctccacatttagaatcgaaacaatcacctcctgtaactaaattaaacagaagagaagagatgttataacctggaacgttgaatttgaagatgtgtgcagaatgggattcaagccactccataagacccgttgatcccgaccagtcttcgaagatcggagggttccaaaatcgaaagaaagggtgactaaaaacactataggccattgaagtagtttgtactaatataataaacttctttccctggtttgcttataaaggaaattatctacatgtatttgcggataggtatccagaagcttctggcgggactcgtcttacttttcgagagttctagcaccatatttatgtaaatagcaaattggtcccttagtgttgataatattgtttttagtccttaatagtatatgtatttgtaaatactcctttcaatgaaaggctttcatttttgggaattgacagaaaaaggcaattatcaacagaccgtacaaaaggcaaaagcccaaacggtttgatcacattctttctccttctcttttccctacaacacgcccacctaccctttctctcaacgccacccactctccctctccgacatccattattgacggtgacggtagtctgctcatttctcacggacggttttctc

SEQ ID NO: 233263 - DNA, 1266 bp, Cannabis indica
ccttgggaggaaggttcaagtgctaaaagtgtttgccaccaaggaaaactactattagaggatgaagcacgaggttcgttcttgtcttggtttgcaagccaattataaccatttttaacagagtagaaaccatgcttctcagaccgccaaacaagtttacccgaaacattgcgcaatgaccaattgcaattgagagaattgcccctgcttcttcaggtgagaagtattacaataatgtttctttagcttctaggcttagtccttagatgcattcattgtaatttgaatgtttttagagttttctttttttaaaaaaaaaatggaaatatttttgttgatttttttacatgacacttttttattaaataaaatttagtttaatcctaatattaaaacacaattacaaaatttgaaataaatataacattaatttatttttgaactacttcagcgcataatttttcatttcactatataatttattgtaatcttattattaaccacattcagacaattagcatcaaattagcatcaaattgaacatttttataccaaaacgatgacattggattctcacattacgaaaaagcaagagcttcaacaacttcaatttgaaaatagccaatcatgtgccaattagatgaggcatagacaatcccataaatatcacagataactatgttcatgtcaaagaaacttcctttcacatctaaagttgcattaatattgaccttgaaaaaaagccatcaaaggaagtgtacaaaaaggagaaaaaaaattagccacggtttacttagaagatctcctacaacaatctctgttgtcttcaaaagaggcttttggtaatcataccaaaaaaagtaacaatcccaattgacaactaatttaggtgacatcaaacaattatattaatgaggggacaaaatattaatacatatacttatatactatatgtatagcactttagtttaataaaaaattacaaaaaaaaaaagttaaaatatacaataattttttttttggcatatgcccctatatgtctatgatttgttccatttaaagtagacaaaaccttattccttttgttaaaataaaaaattagagagtttactattaagttctccagccattactcacaaaataacattaaaaaaaaaaaaaaaacttaaattaatctgaaatatttttcatgtcaattatttttttttaaaaaaaaaaataaaaacggaggatatatgagctagagtcaactagctatatcacttg

SEQ ID NO: 233264 - DNA, 990 bp, Cannabis indica
aagaatcaatttaagaatattaataaataaattaatcatatttataagataaatatggactcatcaattcactacttggaaatatatagaaactgatcaatataattagacttgaaactcctgtaaaccgtagggctactggtttgatgacttgaaatgaaatgggaattagacttggctgctgaagtgttgagttggtatagtccatccttaagagtcccttgaagtaccacctttcttgttgctttgtccttcacaaaacaacaattagaatgaaattcaacaaacacattttgttactagttaatttggagagtgatcaaatttttagcaatcttaggtacatgtaacagttcatttaacatcaaaggaaaatccaattcagtttgtaaagaaccagatccaaataagtgagatattgatttgattaccatcacatattattaatttttccttaccaccatactctattttttggtttagattgtctgctgctgaagtgatgtggttgctagcccctgaatctgcgtaccaaacatcactgtctacaaccttaggtgaggcaacaaaggcagtgtgaccacctcttgtttgagaagtttgatgagcatttggataggtaaaaataaaatatttagggatgcaacgtaagaatttatcaggaggtgacccaccctaaaactattttctcccaaacacatttaactatagagttatgataggattctgagatacattaatactctgcactgcactccatctaaatttacaattactaagcatttgccatttggtgtgatgtgatttacatctataattcgatggcccaaagagaaaagaaaaaccaagtttatagtaagtgtccaaatggaccaaaaccactgactgatattacatgggcctaataagtaaaaactaggaaattacactctatactctttttatattgttcttttttatttttaccttcttttttaaaatctattattt

SEQ ID NO: 233265 - DNA, 936 bp, Cannabis indica
cttttattgttattattaaaaccgcatgtgcgggtgcggtttgggaaatttaaaaaaccgcatgtgcgggttagtttgaaaaaatagtcaaaaaccgcaccacccgtaccgcgaacacccctactgtaaactttaggacacatttatatgcactcataaattataaatgtactctaatattttttatttcaagtctactaatatataaatatgataaaaggaaatagccatctagttaattctcgaaaagcttagatagtcatattagataaatatgtattcaattcaaatcaataacccatcataatcaaaggaaaagggtagacaaaattgatcaaggaagaatctaactgattctatgaaccattagttttagtttcactagctatattgttctgacttgtgtaacactatttttcttataggtaatggaatatttaattgacattagaaatgccacatcagttggtgaaactatggaggtaaaatgctaaaaacaagcgtgacttgcttattgcaatattatttgaaatgcttgtgcagactatgtttgcataatgctaatttggtacatttacttaattgctgagattcttacctgtgttttaggtgcttggatagagtcaagattatggtatacatggagagcgtatgagaaatgcttggtggagatatctttgtcaaagtggtgccatagaatttaaagaggtaaaagtaatattttattttacttagtttagattgtttgtttgtttagttgttcagttctatataaaatttacaaaacgtgatcactctaaacaagaaaattctgaagtatggaatgaattctcattctgattctttgagtacaaaggaaaaggacatgatattatttcattgacaaaagttgtgaatatgtggaatttggtgaataattaatctatggaatctatg

SEQ ID NO: 233266 - DNA, 1385 bp, Cannabis indica
aaatgcagtttgaaatttttgcgatagtttgaatttttcctaaactacgcggtgcagtgcagtttgtggttttgaattgttaatatgcggttcaaaccgcaccgcaccgcacattataaaataactaatttttatatttatttaggtccaatatgtgaaggtcctgcccaaagcccactaattattgtattgttgaaacttaaatatttattttcaagccttatggtatttttgacaagtgttgctcaagctttgttgtatttgtgatagtttagttatttggtgatagtctaaaccgcagaaactgcaaaaaccgcgccgcactattttttatggcgcagtttctgtagttttttagtttcgtggtgtgggtacagtttgggaaattggaaaaaccgcatgtgcatgttgatttgaaaaaatagtcaaaaattatatcatccgcaccgcaaacacccctagcttctatattataaaaaatcttcactacttatccttaactacttttaaactcattaaaacttctaagaaaaattaaactaataatcttaatccataattcaacaaaccaaaataaaatttatagtccaaaaaataaagtcgattgtccaaaacaaactaaattctataatctaaaaaataaaatccatagtccaaacaaagtctaaagaaaacaaaatccatagtcgataataatccaacaacaaacatataattaaactatcaaagtgtgatgatcaaagtccaaactaaaactaaacaaaaaacacgtaaacaaatcaaactagaatgtctaacaaagtccaaaatcaaactcttggtttagaatagaatgaaggtgccagagtagtactagtgtatgtggcggagatggaagctaagcactgtgagctagtaggagtagcaacagcaactgcaccacctctattattggtcttctctgcaacttgttagtaaaattaaaacattagtataaaaataattgtaaattgaattattattagaaaactaaaccaaagtttaataaaatatcgttcttaaaaatatcttctggctgtaactcagtttttttttacttaaaagattcgtgtttttcatttttttttcttaaatttgggcacaacccaatattgaaatatattttaccaggatctagatttattaacaagtatgtttttaacatcttaaacataaacttctaaaacgatataaaataaacacataaaaggtatgagaaaccttacattagttaccgcggaattaaatgtctcattccactcagatctctaacccttttatcctttctgtagcaaagtatcactaagatctgaaaccgacactccttctattgtttggattcttcagtcttatacactataattgag

SEQ ID NO: 233267 - DNA, 868 bp, Cannabis indica
tgtcagtacatgaatgcccaatatgtgatcagtatagccgcaagctagcatctatcttgtaaataatcccaaggttttgtggcccaaagacttgatatgcgagtaaccccagagaactcgcaagttcatatgttactcaggaaagtgtacggtgaatatgtcgcatacatttagatattaaataagaataatcaaaattgttctctcatttattctgtaaacggtttttttttatcttaattgaatatacttaatattgtaacattcttgtctgattggttatgtgtaacaccctactagtttagggtgtaattaggggtttttatggagatgtaccaagcgaaaaacatgaagtgcatgtggttccgctgagcaatagatgaattcagaggtgaggaatgttgtatccttgagagagcatatggtagtcaaataaaaaattgtttgaacgaagttgggaactaactgaatcattaatacccaattgagaaaaaagaatgtaagcgagcaaagagggaatggggaaatgcatgagctccatatgctttccactcatcagaatctcccttagacatttcaagatcttccagattaatgttcaattcatgttttgttagcatacgaaaggttaccccttctataacaggatactcagagcaaatgtacttgaaagtcggttcatattcaaacatgaagttggggttagcaatgggagaagctttatttgtagcaaacttgggattgttcttgaaaactcgtgaagtctaagcaaagtaagaagatggaaatgtagaaaaggggaataaagtgaaggatgttaagctatttttagcttaagttttgggtcacattttatagttatttttct

SEQ ID NO: 233268 - DNA, 1867 bp, Cannabis indica
ttgcgtgtaatgtggagcaatgctatgttgttgttgattggaaaaataatctgtacttgtttcaaattttattcggcattttaataggagaagcagaaaagacaatgcttcattgaattgattactaagtaatgacctgtttagggaagtttagaaccaaaatgtgcaatacttcattgaatagctaccaactaataaagcgtttaaagaagttgtgaacaattatggtttattcatttgcatctcttcagcattgttgttagtatttgacggatttcttttagaactaacagggtttttagcagtattctgttaagccacaagaaattctgttagataggcatttattatataggtaagagatatgtgtgtgggggcgagcgtagtactttgacattgagcaaatcagtatgactgttgcataaaaaccatagataaactgatcatttgtagttagggggtttattacatatgaaagatacattgtttcttttaaaaaaaaatttagattagaaaaaaaacaaatacattgtttcatagctatatattgatccttttagtcccatagccaattacatataatccaatggccagttggagcatatagagaagaataaattagttaggatggctatgctgtcctcaaaagataaaaaaagcttgtgttcaaattatgtaagaatgaagttgctctaagtcatatgctgtccttgtagatgtaagccaatcgtttgtctgtgcattctattttacttctccaaggaggaagttttcagatgtgttgtacaagtaagacatgctcaggcagctaatttggttgtacattcatgataggacatgagtctgatttttaatgtagactactagacattttgggtggttgtgtgtgatcgatttaaattgaaaatataaatattaaatattaattttttaattaaatgaaatttatttaaaagtatataaaatgccaaaataaataaataaataaaatgccatatatgttgaattgaaaacaaaaattattagaagagaaacaataggttgcattaagacttattaaattaaaattatatatatttttacatttaagctagcaatttataagaaattaatactatagtgatgtctattttgatatttttgtatttataaattatataattatcaaacactcaaatacaattacactatacaattaatatcgaatgtatgcttaagttggttaagaaaaagattagctagctagtttggactctagcttgaaatgtctcgttggcttaatcatgaaggtagataaatatggcattatcaggtttggggttaatgtgtcatagcttcaagatagacgtttcccatggtattggtaaggtggtccataagaacaaaaaagattttagtccttagctccttcttgacatgaacaatgccctccatctccatccaaaacatatagaagaaattatagcactgcccacaaatcccagcttctttctcgtagaatttccttctccatcatcaaagctattaatctagattttccttttattttccagcaatgtgagtgtagttaaaggactaggtagtagggacaacctccatctcctcctcttggttttagtttatcactagtgtgaaaatatatttttgattttgttttgcagcctaaggcttgattgattaattcagaaagagtagcatgattgcccaaaatatacatattcttttgaccgaaattgacttggtcaggtccagttcattaacacatatcactggataggcatctcgcctgataacagagtgatcgctccctggactccaacatctgcccaattttatgtttgagtttcttctgtttgtgtgagaaagc

SEQ ID NO: 233269 - DNA, 2492 bp, Cannabis indica
attattgtcattagtcaattgagaaacactgatcaagtttttcctcatagagggaacagtaaggatcgaatttagatgaagagaggtatgagaggaagaggataaggaagtagagcctatgtgagaaatagccaatttcttaccattacctacaaccaatgtatcatttccattgtagactatagcagtgtcaaggttgtcttgagtgttggtaacatgattggtagccccggtgtcgacaaaccacccaaaattgtcaccaaaatctggaagaacttgaggggagtagctggtagagtcttgatcattttccacttcagtgagataagcccgaggagtattggcattgggtttgggggtaacccagttcttatcagatctatagtgacatatagctgctgtatggccactttttaagcaaagttgacatatgaggtgtgagttggaaggaaaacctctgccatttcctcggccaataggtctaaaagaattttctggtgcgaaacctcttgcagcaggttgaaattggcgagatggaccatgtttttgtgagccataggcaagattggcttgcatctttaaggtcagatcggtaacagcgttgtgatgatcaagacgactctcatgagccattagaagtgcttgcacttcttcaatggttaaatcatcacttcgagaagtgatacccgagacaacggaatcgtattcaggacccaaaccatttagcaattgaaggattaaatcttgatccgaaatagaagaaccagcagtgataatagagtcagaaagcgactggactttgtccacataatcagaaatggttaaagaacccttacgaacatgagagaattgaccttttagttgtagtaagcgggcacgagagtggcttgtgaaacgttgttcaagggcacgccatagctgggatgaagtggtgtaagaggcaacggcagcaagaatgcctttggtcatggaggaccttagccaagatagaagaagttgatcacgtttggtccattgaagatattgggggttttgagctccattgactagattgcgtgggggtggaataccagtaaaaagaacatcatcaagatcatgtccgattacggttggtacaacttgggatttccaggccaagaagttggtgcgatccaactttacagtgagcgatgcagagagagaatgagcaaatggattccatggctgaacttgtggaggcagaggaggtgcagcggtagcagtatcagtaacaggatcattgtgagcagcggtagaggagttgttatcttgggaagccatgaaagacagaggtcaaaggcgattgataccatgtaaagcttgtaatggcagattgaagaattggtacacaccagtggtacaaaccagagaagaagaaaagaaggagaaacagaaatgtaaaatgccaagaaaagctcaaccaaaacagttggctttgaactctttatttatagtgaagaatacattcagatacacaagaaaatgcctaacagaatttataacaaactacatttaactactgactataaccgttttaactaactagttagttaatgggtttatagaaacaattcacaagttaagttgccataacataattactgttaactgaggtgaactaattagttgtctgatttaatttttttttccttttgttataaagtatcttgacaattgctcgtgacatcaggtcagaatactgtcatttccctaaaatcattgtttgaacctgaatgttcctaaagttttaactaattacaactcatttcactatacagttttaaataaacgaaaaattgatctttgcactaccactaccaacagaatttcaaaacacttattctgattgcctatcttattactgagctgcaagaaacttataaaaatgcttagtatatatacaaaatgagctgtaaatagagccactttgccttaaaaaatgaggcctggaacggagcctcaaagaagaaattccaagagcagttacaaaagaaacttccagctccttgcacatatatgagctaggctcatatacataatcaaaaagagacctataatcaaagagaaaccttttgcatatacagtgagcaacaatagtgagaattgaccaaataataatgaagaaatgaacacatgagattagattatagaagcaatatccatttttcaacagctcttaaaaattaaattgggaaagataaaaaattgcaaacccttgtctcagttgtctggctgtagttgtgagcttgaaaaccgtaaaaaatagctagggaaataattaagaacatatatagctagatagatatgcgaagcattaaacctcacatgcctacaactctaatataatgctaaaaacaaatgttaatgaagatgaaatctaattataaagggatagaatccattcaacctacatccattaaattaaaactataaggtctcaagtctttgaataaggccttcttcttttctacata

SEQ ID NO: 233270 - DNA, 1404 bp, Cannabis indica
atcatcttagcctacatatctctctaacaaacatatcttgaagaatattaaataatttttttatttatttttaaaaagaaaatctttatatataaaaactctactataacgattttttaacgattttttttaacaatatctttttttgttataaaaaaaactctactataacgattgaagttaagagcgttaacctagctttaacgtttttctcagtcaaacctcaaatgaggggaaatcggatcgaatttacctgaagcaagaaaacaagtttagaaaaatcatgaatcaattatgcagccatttttcttcttctctctatggagcaaagacatgaatcctacccatcccaattcgtcgagtgtccataaagagggagaacccatagccatggttttacatcagagctcaattttcatttttctaatttgaatgtggatcttaatctagaaaagcactacccaatttccctcgcaacgatgactactcgtcgtggtccttgataagattccgcaaggctctgagacccaattgacaagtctgcaacctccaattcatcaatgttcaatgcaaacacgtcaaacaatgtaggcggtgacgagttgggggagcttcctttttattaggtggatttgacattgcccataaattttttcttgtttgcacaagattatttgctgtctcattaagtatttgattgacttgagtttctgcatttgtgttgcttttatttatgtttggtaaattcctagatttcctttttttgagctagctaccttactgttttatgaattctaataagatcttttattgatttcttgatatttgtgaagaaaggccttcacttctttaagaaggattcttcatctttgttacaaccaaggtaatgtttttttttggattttacatgacttattggttggcaactaataatttaaattttttctcattgagttgcttttgtgctgattttttctcttgtgctaataatctaattttatacattggaaaagctacaacataatatgattcgactaataaagtttcacttgtctaaaatttgttctaaattctcaaatagtggtagaaaactgaagtgaattgttgaactaatattcattaattataggtagaaaatgtatgagatgaagattagcctagaagttcaaataattgatgtattatagttgtgaattgtactggtattattgatattttaagtttttgatattgtagaataccacaccaaaagtcagagagtgaagattatagcatgtactcaaggggggctttcttaattacaaggtgaagatgaagtaactaccagcctcttctaccttggtatggtttgtatattgttattatattttaagaattatgaatgaatgaatgaataattttaat

SEQ ID NO: 233271 - DNA, 1219 bp, Cannabis indica
ttttagtcacaaattttgttgtaactaaaagtaaaattatttgtaatgtcttgactcgtcaaatgaggaatcaccttatataaccaaatatgaaagataaacaccaaccaacttgtacattttagtaatgtaatcaaaattagtataataatagttatttattattttgaaatataatttattttatgatagttgacatactacttggtacatatatttattttgaaaatttattaaaattgctctttaacataaatttaataaaactacaatctaataacattaaaatttgaaataataaccgactttttagtaactcatcatcaaattgattaatttattaaattttgttaaaatttaaaggttgattattttttaagtattttttttggacattttttttatattaattaattagaaaaaaaccttaaaagttatatttattttttatcatcttctctgaaaaggcaaaaaaaatatatacttatcaaagtgatcactttgaagagtatctcgcgatagtataatttatgagcctaaataattactaatgtggttggagaagttttcttaaagagagaatttgtttaaaaaaaattagtttcttataagttattttagaaattagttggtatttaaaatttattttttagtaaagaaactaaaatgttacttctaagtttaattatctttatcgacaatggtaagaaacatatgcttcccgcataataaaacgattcccttagaaagtagattgaggtgatataatttttgagcttatataataactttatgttttagacagctaaatatgtcccaaatgaaagcataccacactttctacaaatgagatgttttaagatttttacagagattagtaatattaaaattcatacctttaaattcctccaagtccattttttccattgattgcctccttaatctcaatatttttttaccaataccaaatagagctttgtggagaactataactcaaacaatcttagcctttaagatataccgagtggttacacttacacaaaggctaactttatccagagaaatatctcaaacatatcttcctggagccctaaagttctattgttcagtatttcgaaatgctaaaccaccaacaactttaggattacaaatctgttgccaagaaaccaaacccgacccttgagcatcataggaattttttcacgaaaaggctctacaa

SEQ ID NO: 233272 - DNA, 524 bp, Cannabis indica
aggcttggtttttatttattcatttttttatcgaggaagatggccttaatgccgagacaatggtttgccccttgtggcacttttcgaaagacaaatttgcaaggttggatggccaactttgcttttattttatcttttatttgatgcctcgtattttgcatttgactttaatatatttgcctatttgtgttttcattcgcaacttaaaaaattatattttgatcaaatttaaaattttttaagcatctccattgctcgtattttcctttgatattatttaagtagttagtaatctactatgttcgtgagctaatattatctgctatgcttttgattcgcgagcagttatcagttctgcttcgcataaacaattataattcgttttaagcaaacttaaatacacttttaatgattcatcactttgtatatttttaattgcttacatgaaaagttaggtcttctgttgatatattaggtttaagtattttttttcaaggcatcttggtgtcttgtttaatactttc

SEQ ID NO: 233273 - DNA, 631 bp, Cannabis indica
ttaatttgcaattttgcaggatccataaagaacaaacggagaaatggatggacgagatcaaagaactcaggttgcttgatgcctcaaatgaggaggctcatgctcttctgcataatgctcgatacttgctccaaaatcctcatgttgattgattctcatccaatttcaaggtattcgatagacactcgagctttatcatcgttccagcactatccacttatataatctctggttatgcaggtcaaaggagttaccactttcaatatattagtagttagtatttgttagagtttccatatactagtctaaactctcaagtttcttatatgttctacatcaaagaataaactacattctttgtacataataaaggacaatttcctttcacctctgactttcttacctttggatcagaggcacaaaactatttgtagcatggagaatttcactatcacaagtaactattatagtagatgaaatgaaaaacacttgaacttgtgctttgtcttatttaacttatggcagtttaaccaaataagatcattcataataaacaacaataatggtttaataatttaattagatatcagccttattgctgatgatgtttacaattcttttttcatgaatg

SEQ ID NO: 233274 - DNA, 754 bp, Cannabis indica
aaaaagaaaagaatagaaaaaaactagtttgtatcagtacatgcccatgactgattctgattataaaaaagagatcacatctgaaataatgaagagatatatatatatccacatattaatattcttccattccatgtgacatataattgcagaaggaaaatatatttcccagaactgcggctaacactcaaacaatggacataacattaagtcatctgcaaaaaatgtacttgtttccctagtccctcagtcaatgaaatatacagttatgtaaaaaagataggagaaaaccaggataaagggtacaacaaggcaacccaaaacaaacaaagcacataattaatgagaaaaggaaataaaattacagcattacaaggaacaaaagaagataaataacaacacaacaatgtaatgccagaaaggcaaaaacagaagcccaaaatcatacataccacaaatacacaagcaaacagttacatgtcaatatttatgttctctcacatgttggtaatgcaaagcatacattttgtcaaagcaactgaagcaaccaactgcttttggtttcaaaaggactgctataaaagacatgatggaaaaacattactaaatccaataaaatttatgtaacaaatatgtttaattctaaaaaatccaaactcagaaattatcaaatcagaggttgtaacttttgttaaatttatttcaccaaaaactactgtaagcattttcagagcttagcttagcatagccaaag

SEQ ID NO: 233275 - DNA, 987 bp, Cannabis indica
atttgattaactgatgaaactagtttctattattttattataatcatttatgttttattttctataatcttcactgttattgtgtgacgaaactagtttttgttttagtttgtttggtttcataatgttcattgtggttgtatgacgaaactagtttcgacttatttttttagtttttgttgaggtggaatctaatacctctagtaaaaatgcaatggaagatgttgctaaatatttcaagcgctgactttgagaagaaacgtcctccatattaagaagaagaaaaaaagtaatttcaagtatgtttatttttttctaatttatcttcgcatagttttatatgtttatttgcataaaagtgttttttaggtgtcttatatcagttcaatttcttagttgtttatttatagtttttaaaattggttttttttaataggaagctagtttttttaggtgtcttatttatgttcaatttctttgttagttatcctaaataactggtttctgtgtataaatattaggttttttaaatgtagttgaggtttaagttttttatagttattttaagaaactggtttcattgttcaaaattttaatcagctaataaatgtattcgacttctgtgagatagattttaacgtctaactccggtggcaactctagcatcaaactccagtaacggcgataacaccgatgactttgcagtgattttttttggtgacgatgccaattttgacaacttttcgagaccatcagcaactccagtgactttttgtcaccgttaacaaattctgacaactttttcgacacgacagtaactctaacgactgtgttggtggtcaagtcttagagcttctaagaagcatgtcaaatttatgagttttcgtcaaggaatcagttttttgattatatagaattaattgacttattcatttatttttttaataaaattatttgggcttttttcataaatgtacaacaaaaaca

SEQ ID NO: 233276 - DNA, 1297 bp, Cannabis indica
tttcatttaagttgtgttatttttagttattattgctttactcgagggtgagtaaaggttaagttgttagtcccaacaacagcgccaaaaaacttgttgtggtattttcaacacacaagtatatgtattgttaacaagttatagactgacaaaaagtaaggtatatcccacaagaattattgtaactaaatactttaaagttaagcttttaattctatttggttgttcaaaattaagaaaagattaacactagaaagaagaaacaataaaaacaataaaataaggaagcaagatgcaagtgaattgatatgaaaattaacaataattgaaagttagggttattaattttaattgtatctatctattatggtctaatatgattcaatttccattactaatttctatgtaatagcaggtttactagtaatttatagtcttctcagatatattaatctcaattacatgcaaattttttactttcgtgataaattaaacatgtaaaaggcattaaatagaaaaaaccctataagttatatccaaaccacataagtactctcgtcctatatcgaaatttgttcctatttcactatagcataattgacactcacttttcagatctcgtatcaaaatcataaatatttatttgatggtcagataattaaaagtaattaagtacgaatgaaatagaatacatacaaaattggagaagaattaaatcagattaaaactataaatagatgtcaaataatatccatcaataccctaatactcttgttcatcgtaacaacttgacacatatcgattaagaacaaaagaaaaaattgagaagaagagaatattgaaaattccatcgaaaaagccttctcggtcatttctactctctaattttcgtactctctgaatgcttgttgaaaaatatgaaagtccgcctctttttatagccaaaaaaagatatgaaaaatattaattttttgaattttaaggaggcgggccgcgacactaaattcttatgccgcaaaccatgtatacaaattagatatttctctgattttttctgagacacgggccacgccactagatttcagtgcctttgcataacaccttaaatttggggcagcaagcttactgtataatatttttaccataactcttttaatattaaaattggacgacaagatgttttggaaagataaaagagatctagaacttttattcacaatattattgctcaaagtgagcgcatcatagtcaaaaattggcttaaagattcagacttttattttcgatcacaaacaga

SEQ ID NO: 233277 - DNA, 962 bp, Cannabis indica
aaaaatacattatataaaaaaaattattttaaatttaaatctgaaaattatattcttggttcacctatagatactcggtgcatatatttttctaaccatcaaatgttaaaaaaaacaaataaaaataaataaatattaaaaatcccatacaattgattatgataagatcagatgatcttttatacgattgaagactaccacctttgttctctcacctcattctcacctgctccgatccaagcaaacactattgccattaatggaatatcttgaaaccgatcacggtttggtgcttgtgtgatctgtaattggcgtacgacgaaatggagagtaaaacgataacgattcccactattgccattaatggaagaggaggaaagcttaacgaggcaagggttcgttctgtccacccaactttccatgacgaactgcttccgtctcttaaaaaccaaccccttttattttaaaaaaattctgtgtggaattaatgtgttgttatataatgtgtgtgtgtgtgagtgtttgctttggaataaattcgatcgagggtggtgttagtctatagagagattctatggtgattgcattgtacttattttactggttgaatgtggaattttagttgtgtttgctctatctgatatattgtaggtttcatgaatattactttgacaagataatttaaaacctggttttgagttcgattaaataattccaaatttcatgtatctttaatagatatttgttctgttattctgtttctccaacaaaaatctttataacatgaaggtgatatgtctatttatgaagttaaattaaagtatacatatatctatctatatatttaacatatagatcttagctcaaaatgattcttctcacttattctcttcctctaaatttttttgattaaaaatcgctgtggcaatttgtggattttcatccatacttgtctgtcatag

SEQ ID NO: 233278 - DNA, 1344 bp, Cannabis indica
atctacattgcatccattaaacaaggaaatgaccaaactgagttaggattcactgggtaattacagcattatatttttagcttttgatccctctgagaatctcatacacatttctacaaaatttaatttagtgacagttaaggcatttgatttcaaatctctcttgatttcaaccattcttttgttcttgaagagtatattttgaatatgaagcaattttcttcttcttctccaatctcaaatgcctcaactgcactaacttgaattttgttgaaatgtgtatgggattctaagatggatcaaaagctaaagatataatgttatcatttccaagtgaatcccaactctgtttggtcaattccttatttaatgcattgaaaatgttgattgtttagtcttgagtagggaagcactacctgcaacaaatgagaccctgacacgatgacaataccacaacatccttaaagagaaaatcaaaaattgtctatttgaatggaaagccttcttaatcaacaggaatgtatgtgacagttttgatatctttgttgagccatggaaacttgtcttggaagataaatcttgagagtacaagataaagtaattttccttttgctctttattgtattgcatagcaagttatattgcaatgtaattaatatgattgagaatggtgcatagcagtttttgtggtagggcaatagttgattttatggtgcatatcagtttttgttgtcaaagagtttcaattatggtcttttacttctttagtatagtgacacatgttatacatataattaatgatgaaatttgattttgtgtttcaagaaatgagaaagataaagtgctctaataatgatgaattcttcgaagtgctatacttattacctacagagacattgtttcaattgaaatgtgtatctaaaacttggaacaacttgatatctgattgttcttttatccaatctcaattacaaaggacaaaactctccatctcaaaattaaatttccaagacaagttctcatggctcaacaaatatatcaaaactgtgacatacatttatgttgatgaagaagtttttcaattcaaacagacaatctttgattttctccctaaggatgttgcgatattgtcatcgtgttagggtctcgtttgttgtgggagttgcttccctactcaagacctaaaaatttacatttgcaatccattaaacaaggaaatgaccaaactgagtttgcattcacttggaaatgaaagcattatatctttagcttttgatccatctcagaatctcatacacatttctacagaattcaatttagtgacagttgaggcatttgatttca

SEQ ID NO: 233279 - DNA, 981 bp, Cannabis indica
tgtttaaggaactagtgttatggatgcgactttgctgccaaattattgaggcaccctctgctctttgctggctacttggtggcattgtggaagttgctctcttgattatgcaaattacttgttaggccgtcgttcttcccaatctacaagtaaaaaaacttcacataggacggtcgtttacttgtcaatcttgtactttgtattaggttttatcggtcctcggcggtgtgtttctgtttagattggagtgattattgtaccagtaaccggtcctctgaacagattttatcaaaaaaaaaaaaagaaaatcgggtcctctgagcagtctctgtcgtctcatttaacaattttagccgctttgtttgatcgggaccagaggtagagttctgtgtttgatttgtctttctaatccattggattcgttttcttaccgaaaattttcatcttgtttgatcatcccgttgcgctcacaatggttttaaacatcaattctttaagggggctttcaaaaaaatctgattaattagaatattatacttgtcagtaaaatttataatcttgtttgttatacatgagaatttttaattagattactgttaattgaagttttcacatgatttgttgtggaagtcttataaaattattagtatattaaattaattgtattaaaattatcttcttatgaagaaatcttattattttctacagttaattttcttggacataaaagttaaaaatttaataccatgggaatgtggaagattattattactataaagatattacatccacaccaaagagtatttttatttttgtttaaacctattgaaataagaatatgtctcgagagttagaaccaaaaacaaaaacttagctttattccataaattggaagggttattaacaacaacattgacatgtactcacattgtataaaaatataaaaaacatataatgtttttttttaaattgttattcttt

SEQ ID NO: 233280 - DNA, 761 bp, Cannabis indica
cccgtggcccgcccataggcctcgagaacctctttgatgatattgcaagagctaatgttggcttgacaaaaaaggaaactgtcatcagcaaataggaggtgagagatagcaggggctcttctagcaactttaaagcctaaaagagttctccttctttcctgttggtgcaagagggaagagaagccctccgcacacagcaggaagagataaggggaaaggggatcgccctggcggatgcccctggaaggattgacactgcctaagactttgccgtttaggttgaattggaaggaggcagtggagatacaggcaaaaatcagatggacaaaccgtggagggaattggaatttcctgagaatagccactatgaaaggccactccacacggtcgaaggctttagccatgtcaagcttgatcgccatccatcctttttttccccgcgtcttaagcttgatggaatgcgcaacttcctgggctataatgatgttgtcagagatgagtcggcccgggaggaaagcgctttgttgaggtgagataagggaattcagaacaagtttcagcctattggcaatagtcttagaaatgattttatatatgatattacagagactgataggccgaaactcagagatacacttaggctgatggactttgggaataagcgtgatgagggtgttattcagaggggccacattcgcatttccattgagaaagctggaggccgcttcaaggacgtctttcctgacaacatgccagttggc

SEQ ID NO: 233281 - DNA, 1248 bp, Cannabis indica
aaaagtaaaaaattttgtaatgtttaaatgataagacctaagcccagaaagattaaaagaaaatcatgtattggtccaggcaaatccattctatgtaaaataagagaaaaaatcgaaatgtttttcatgaccctattgagatcagaccagaaaagaccgatcactccgccattaacagccgcatctgagaagtaaagttgattcctggtcgatgaatcttttcttggtttttcctttccaccacttttttaagatgaaaggttcccatcgagaaatgaatgaatttaagaagcctttgcttgctttgattaggactttgccaaatacaaaataaacataggacggaataagtgtatatacgaaaacttggtgtaatcttgtgcgaacccgaaccctttaatggaaatgaagtaattcaaagagttcgcactggattacatacctgattagaatagaatttctatttattttattcaaacttaattgaagaataaaaaacttattttgaagtgtatagaaccaacaaactttttaaaattttcaaaaaaaactatggataaaaataattacataaaagaggttggttacaataatagtagaaataataaaatcttatcattcaaaatggggtacataatataagggggaatatataattaaacaacaaaaattaactagataataatataatttaaatatgtaatatctactagtgcacatggtgtcaagaaaaaaacgaaaaaaacttttcattgtatttgaaaaaaaaatatgtcaaacaaataattaattatatgtatctacatctacaacgcaagagagatacaagaaaaaaaaataggaataaactaaaaatatacaacataacaaatgaatataaatccaaaattaactaaaaaataattgtacaataaaaaaaaattctaaaaccacttaaaaacaacaaaaccacaagataaaataacaaaacaattaaaaaaattaagaaggaataaactcaaattacacaccataacaaatacatataaataaataaaaataagcctaaaataattgtaacaacaaagaactattctaaaaatcactaaaaacaactaaaacacaatataataataatcaaaacaaatacaaaaatacacaacaaaaacaatgtcaggaataaactaaacaatataaaccataacaaatagcactaactaaaaaataacttatacgtacaacaactataacacgattgtagtaaaaaaa

SEQ ID NO: 233282 - DNA, 698 bp, Cannabis indica
aaaatcagcaataatatatagtagtattaatagaataaaaatatgtaattactttttcacatatttatctatattgttctcgagagatataactatttttctctttttgaggggagagagacatagctatctagctatatgcttataaattataattataaatatcatttaacaaaaatgtaaacagtacacatatatatgcatggaaatttttgattgacaaccacaacttagtgtgtcgacccttttaaatatatgggttgtgatattgcacatgtaccgccccattttgtggctgtctcttcctttacactatatataattctataactttcccttgtggctgctttttatatatgcactctataatcatggttcgattgaagaactactccatccaatatatatattttataaatatatttatcaatttctataatgtaggtatagtctatctacaaataaaaactgtacgttttcatacatataatacatagagtattcacatacataaaacattcctcaatctcgatatacagttgtggtaatttggtaaatgtcatagttattttttttttttttttgttattaaatttatcgaaagaataaatttgtgtgtggcctgtccaattgctcttgtttaatttatgcgtaaaaaagaaaaagaaataaaaccttatcttccagtaatcagttag

SEQ ID NO: 233283 - DNA, 744 bp, Cannabis indica
gtatggtataatatgaagttataggcaatgttggctatgcttgctgagtgaaagataggtagggttactcatgccctacacctatcggtatgtatgcgttttgagcattgctctacttggaccagagctctttgtaaagcaggtacatacaatggtctagggactaaagctcagatgatgagcagtacaggtccatctgagccagctcgtgagagctagctaacaaggtaagtggtatcggcttgagagctagcttaaccgattattgcatcagttagtgctattgctataagctccttaccacgaagataacttgttacgggaggtaatcaacctcaaagacctctacagtctagagagcttgtaccgctaatcatttaagttggctctcgagttagtaacacttaccttcttagcttgctcaatagcaactactcatcattatgctgacttaaatggacttgtaccactcttacacacagagctgctccaactaaagcaatgcactacctgaaaacactcgcgctatctcaaaacacatacatattgatagatgttgggcatgaacacgcccaagaccaatctatctttcatacaacaagcataccctaaattgcctataatattagcaagtatacacttgcctgtaccagactatataacctaacagatagtgtctatcaaaatgcatttctagatcatttacaatctattaatactactagcaacatgacgtcatatttt

SEQ ID NO: 233284 - DNA, 783 bp, Cannabis indica
attaattagtaaatctgattattgaattgggttttatttaggacacaaaatctaacacatatatctactaccatacaaggtataaaaaagtaataactaaaccaaagaaaccactaaaattcaggttcaacataatcttcaaaacggatcgtaataaaaataaaattaaataataaaaaaaacttctctaatacatgataaactaaaatgttcaaacggttataaagtagcttaaaaaaggcatttgtgccaggaagagacattcaagacaataatgtaattgctcaagaaattattcataccttcaaccgaaaaaaaggaagagaggggttctttttcatcaaaattaaccttactaaagcttatgataagcttagttggtagtttgtggatcacgtgttgagttattttggggtcccgacttaattctgcaattggatctctcaatgcattacaactaccactcttaagatctgtctaaatgggggccaagtgggcagaatcatccttcctgtggcattcatcagggagatcctttgttgccttacctgtgtcatttgggctacgaaaatcctttttagacttattcaggatgctctaaaacatggtactattaaggggatcaaactttcccaagggggaccaaccatgtctcatatctttttcgcgaatgatcttatcatggctggaaaagctacagtaggggaagctagaggtatgtggaattgtctagagaagttttgtgattggtcggggcagtgtatcaacaaacttaaaacctct

SEQ ID NO: 233285 - DNA, 1424 bp, Cannabis indica
tcatcgatctcaaaatcctaacaagtcattatgtcaggtctgtatgcgttatggtcacgttactcccacttgtcattacaggtttgataaaaatatattggatcacacctaaatctgttgctagcaatactcaacctcaagctcatcttactgagcagtttcttaattatgagcctgctgcttttgttgctcaaattattcttaattttgctgatgatcaagactggtatgttgatactggtgctactcaccatatctaagcttctctcgataacacaatcccttactctagtcaagaaacaatagatgtgggtgatggtaagaagcttgttattttttatattggtaaagtttttattccttctaaaagtccattttccttgcatttaaactctgttttacaagtccctttcatcactaaaaatcttattactgttttcaaacttactaatgataacaatgtttttcttgaatttcataaaacttgttgttttgtcaaggacaaacaaatgggagcaattcttgtcaaatggacacttaaggatggtctatatcttcttggggatgatggctcgagcttcttaagactttaattcaatgtcatttagttgagtccaactgtcctttaatgtcacaacattgtacctatcattcttgtaatcagtcatgttcttaggaatcatgtaattccattgctatgaataaaacaacaatctcttctcattttctcaaattcaatgctactgtgtataattttaatctttttattgacattattttgtgtcattgcaaacttggtcatccttcacttgccatacttacaaaaactctaactcggactaacattcctcattctcttaaaacattatagttttataatgcttgtcaacaagggaaaaatcacaggcttcccttttctttgtccaatgcttgagccagccaacccttagaactcatccatactgatgtatgggggccatcacatatagcttccaaagataattacaaatacgataccgtatttgttgatgactttagaagattttcgcggatgtttctcatgacaatcaaatctcagtcatttaagttgttcattcagtttaaaagcttggtagagaaacagtttaatttacctataaaaaaggttcaagttgatggtggggtgagtacagagtttttaaaaagtttctaagaaatcaagggatctgcttttaatactcttgtcctcatactaccataaggttaaggtttagtcgttattaagtgtaatataaacaccacaaattactgatatatgaatagtacagattacacacgcgcataagtttccttttatatatatatataaaattaaatcaccaataaaaaataaatatattgatgtgttaaatttagcatagcattatattttttattttattttt

SEQ ID NO: 233286 - DNA, 1024 bp, Cannabis indica
ttcgttttttgatcgaataaaaggttgcttgaatagtgtcccttttagataaggtgactactttattcaatgaatgatatctttgactcttgtctaaacgaggcactatatgagcttgttggaaaccttggcaaataattgaatatgttttactttggtatttttgcaaacatatttccttacttcttattttctgaatttgtgtatgaatttattagaacaaagcaatttatttctatttattgatatttgtagcgtcaaaataaacaacccacaccccaattctcatctattacatgcctttgcaaatgaactctattgtgtgaagatgtctcctggttagagcatcaattcacacttgcttatgatgaacttaaagttctagaaagcaaatttgatgtgaatttttctatcaagagagaaatgggttcaattcattctcaaccgccttccatctaagtataagaaattttttgtatcttacatgatcagtaattttaactcgtctgacatggataagctggacattaaactgcgtgcttgtgaaaagactttatcacttgcaaggagttctacctccagaatttcggataagggcaataggaaagttgaagatattgaggatgatacctccgacaatgctacttcttcgagttcaactttgagaactagaatcgagattgaagtggcaataaagataattaaagaataattgagcagatgtattcttttatgttctcactgtggagagaagggacacttcaaaactaaatgtcccagacttgtgagccataagaacgaaggtaacacttttgtttttgaatcatgtattttagagaatgaaaagtccatttggattgttgattcttgatctactaaccatgttttgtgttcattgaaactgcttgaaacttgggattagtcaaatccaggggagttgaagctcaaagttgggaatggcaaattagtatcggtcaaagctaagggaaaattttgcctccagttttagaataaatttttgttt

SEQ ID NO: 233287 - DNA, 908 bp, Cannabis indica
ggctggcggttgcttactagaccatcttcgttggtatctaggatctttaaagcgagatattatgtggatggcaattttctcaatgcccaacttgggtctaatccaagtttcatttggtggagtattgtggaagctcaagaccttgttcgtgcaggatcccgttagtgtgttggtaatgggcattcaatttcagttttgaaggatctgtgggttccaaatgagaccaatccttgggtggtttcaactcaccctggtcttgttgatgtcactgtggcaaacgtgcttactatggatgggtcaggatgggatttggagatcattgctgacttgtttgaggctagggaccagtctctcattcgtggtatacctctgtccgacattgctgcatctgaccatctgtttaggtcttttaaaatttcaagcgagtactcagtaaagtcagcatataattccttatagaagcaaaaaagtaactggtttgatgaagaaattgcttctttcttgagtaaactttggaagttgaaacttccctctaaggttagtaatctgttatggcgggcgtgtacacagtgtctgcctactttggttcaactcaaaaccaagagagtagatgttaatctactttgtcccatctgtctggaagaagatgagagtgtactacactgtttggtgatttgccgtgttgtcaaactgtgttggaatcgggttggtattggcacgatggtgactcctgaatctggttttttggactggtgctggggtgtgtttcaacatgctacctcggatcaattatgcttaatggcgactatttgctgggctgtttggggagcccgaaatgacctagtttggaatgggaaagctgttattcctgataacattgttgtgtttgcaaaaaagtatcttgataa

SEQ ID NO: 233288 - DNA, 1096 bp, Cannabis indica
aaaaaaaggagggtagagaatagcattatatcttttactaatgaacaaggggtggtcatagacaatttctctgaggtggtcgatcactatattggtcacttccagcgatacatgggaaccgaatccaggcctacagctagtctcaaaacaggttgtatggagatggggaattgtttaaatcttgagcaacatttgagcttagtcaaaccgtttacatagaaggaaattagaaaagattttttcagtatttcggatgtaaaatcaccagggccagatggttatggagctggtgttttcaagaaaatgtggtcggagctgggtgctaacttcacacatgcagtggagagtttcttcattacaggatccatgccccaagaatttcacgccacaatgctcaccctaatcccgaagactgaaaatccaacaaaggcagtggattacaggcctatagcttgctgcaccaccgtttataaatgtgtttcaaagctgatttgtatgagactatctcaggttcttcctctgattgtcaactagaaccaaggttcttttgtgcaagggagatcaatcgcgcataatgttatgattcttcaagacattttgaagaactacaaaaggaagaacatatccccaaggtgtactcttaaggtggatataagtaaagcttacgatacggtgagctgggaattcttagaagctcttttgaatgcgtacaaaatgccatccaagtttataaagtggatcatgtcttgtctaagagctgccacctattcaatcatgatgaatggaagagttaagggagtttcaaaggcaagaagggtttaaggcaaggtgatccactttcccctcttctgtttgtgttgattatggaatatttgactagacggttgataatggctgctgatcaatcgaaatttaaataccaccctatgtgcaagagtctcaaaataattagtctctgttttgcggatgatttgatgctgtttaggaaggggtccctaagctccttgcaggtgataaaaagtgttttgaatgagtttgaggccgcttcgagtcttgccatcaatgcaaacaaatctcaactctattttggaggggt

SEQ ID NO: 233289 - DNA, 1307 bp, Cannabis indica
taaaagaaataaagtaattaaaaaacttaaaattacttaataattgatttaccttttccgttaatcaatgaattggatttagttcagtcatgaatttttcaatgaacttcattacgtagtatgcacattgtaacccatctgactgttgtggacataccttagttatccatgtaatggtacaagtccgtcggtttgtaattttattgtacacgttcattgaactacacaaaaagtaaagttaattagtgttgactgtggttttagccaatcgacgcagaatctgactaggatcattgcttatgagtgccacgtgtgaaacgataataaatgtaaaggacacacaggattttaaagaggttcgaccccttttgtttaggtaatgacctcctccccttttagttgtattcactcttgagataataccaagtacattataggttaagaccttgtaatctctagctaggcactcttcagtattacaatgggttttgcaaattagaagtatgatgagaaaagagagaggacttataaccatagtgcttctgagtgtgattgcatgtaccagaacgtgaccatgttcgttttcatgtaggttatgaccctttatatagtattagggtttgcaagctacatatagagatattcttagagaataggaaagttacaacatatatttaaaatacagagagaaaaatccttaaagaataggggtgttatttgctgatggtgagtccttatgtttgtgggcagtttgagctaattaatccatagtcataggcatgttgaaagtgagttggaaggcttgtgagtgaaacacaagtgttggtgtgtttttgcacccttagccagccagccttgctgaaggttgcctagtgcatggaagttggcactcctggccggccaactataggtctggccagggctttgctggaaggtgtgtgtgtatcttaattggcttacgtgtaccgtgcatcgtagaatctctaaggctgaggggctccttggcactaatccttgcatgttagtgttgagttttcttctacatactttttgttttttgccacgtggaggagccactttaagtgaacaaaatttggaataacattttctcccaaagtccctatccgaacttctagttaggtgtggactttttgtctgtcttgtgttgtagcttcctttgtcatgcaggtatgcatgcccaggtatttgactctttgactcacatgacctcatggtaattactttattttacaattatcaatgtgggaagtcgtgtgataactgcacattttcccatattgcaactc

SEQ ID NO: 233290 - DNA, 1579 bp, Cannabis indica
aggggcatgtgttatagtgagatttctctcacctagaaactcgagaccagactcttatttagaggacacatgtactcagattttccaatgaaagctgagacgtctgaaagagactcctcgaagtttaaacctcgcccaagatagaatcagcgatatactgcgagtatgacttaagtctgatcgcataactataactcgtattatgcgggagaggagaatggatctaactcgcatatatcaggatatgtgcgagtatcctctctatattcctgcgtaagcatagagatagattctttataatgcgagttggtcaacagccttgataagtcgatatagactcgcatgtccttggttctatcagctcgtcatacgatgtccaaagaggcgactacatgagaacgcagacatcctaaacgcaattaagtgttaggcccgcgagcttaccattagaatatgaacagtcaactcgcatgttagagggcgcatacgttgctgaatttagtaactgctattcatttattgatgtttacgttattcagtttagttattgtaattcaatgtgtaaacggattgacaatgaatgcaatctttgtataactaattagacacttgctttgtatataaaggggtgatccgtcgtgaaatgggacctacgaaaatcttgctacagtggactaagaagacagtgatctgactgaaccactataatcctctgtcttcttgttatttctagttttctattaagcactcatatttaccagttcgagtacttgccattataggttgaatactcgcagttgttcttcaagcaatttcttcttgtcataaatattattacatatatttggtgttgcgaatttttctcgacagcaggttaagattagagtttgtaggatatatataggatatttatgagatacttttagggttgtgaccacagaaagaaattgaaaaggggaggtggtgcgtagcaagtgatactaagagagagaaaagtgagatttcaagtttttgtattttgagagtttatgggctgctctagatcatttctttgattttaaatcctctcatagagcttttagaatgtgattaagatgcctggaatcaaaccgtttgaaatcaccattgtttacgttcaaaaataccgttcttgaaacggacccggatttgaacgtgtttaagttgtttcgaggatcaaaggaggttgtatttgagtttttcggacaatatattaacaccataaacggccgtacaccggagctaaagaagacaactcttttggtacattctttagttgcttctttggacgagattggatcggtttgagtttctgagcattgtggggattgttcctaattggaaggtggcgtcgaaagcaagaaaacgggaagtttggtaactcaccgttgccggagaagacgacctaccgacgaaacatcagtgaagctccgttcaggggtttttgaaggttttatttcagattttttatatacttgacttgttttaggtatttttaggtctactatgaagtttaagaattttcttgcaattatttcatttattatgaattatttggttt

SEQ ID NO: 233291 - DNA, 854 bp, Cannabis indica
cggaggaggtcttcttgactattgtccacaatgtgttttagcagttgtcagttgttctttgatcaattgaggaagtaaccaactcctgaattaatataccaaagatgggggtgatgtcttccctatcttgggtgcaccctaaaattattgttggtgtagtctccattttatcgttggtcttaaccttgaaggtctttgccatcccttctgttgtattcataaaggaagaggccttctttgtccctttggttgtgttgacaacaaaggaggtcttttatttcccctatcatgtagaatagtaaacgaggtctttatcagccccctgaatgttatgccagcaaaggaggtcttcttgctgaaagtcaataatgtgttgtaatatttgcaatcaattatttggtggccaaggagacggtcagtaccaactgctttcgagaacttaagagacaggttatacataggttagatggctcagaggtcattcggtgtgaccttccaacgatactttgtttcgattactatgaaggtggtcatagttatgtttgccacggagcagttttgactatgagtggtgatttgaattttttgatgaatcagatgtgtatcattacacaaaaattatttgtacaatctaatagcattctcccaatggtggagaatttaaatatctatataatttttacaaagtgttgaacaactatttttcaccattggtagctctatttggccatatacatgaaattctttttttttttgttacatcttgacttaaacaactagattatctacactttcactacaaccctgccataaaatggcatttctagttcaaaactagtaaactaaggatgcaa

SEQ ID NO: 233292 - DNA, 1025 bp, Cannabis indica
gaggtgtccatatatgtaactcagtcagaacgcagacgccttaacatgaggctcatttgtcctccttagaaagatagaacgcgcccaaggcctgggagtttgtgtgagaatatgaataggcaactgataccctagaggtcacttacgttgctatatttattaaaatagatttaaattgttcttcatttattctttttcgtttattctcatttaatgttgatattaattgtaaaacggttctataaccgattagctctgtgtaacataaaggacatttgctttgtatataaaggagtgatccaacatcgataaactaaacagaaaattctttgtaacagtggactaagcagaccgtgatctgactaaccactatacatctttgtgttcattatatttttccatttttgttctattgtgtgggtagtctcgttcgaatactcgctgttctaagttgagtactcgttattttttctattaaatatttatcatttttatattatttggtattgtccaaattcctccaacaatattggtgccgtttgtgagaaccatcttagcgattttggaggaaaatcatcatagctaccaactagacgaatggaaacagcaccacgggatcctttaatgttggaaccatgaatgttccactcccgggggatggaacaaatctaactgacacaatcatgggaggtgtgggacgaactaatgtcacccctcaacctattcctagaaactgccggtcatattggggaaacattgacaccaacagcgacagtgggtcacttcccacctaccacgcgggtagtagtctctgaaggcattgtccaacttacaacaccatagtacattgccgtgcaggaacagaagcgggctctgcaaggcgaggtcgatgggagaggccaagtcaggacccgacgtccaccccgggtctctaacccacgttcaggcaatcctaaggtaaccactacagctagatgtcgtactgaacgtcctaataatgctcgtactagtagggaacatgtaac

SEQ ID NO: 233293 - DNA, 699 bp, Cannabis indica
aaatattttggcatatgttttcacgtacgtatgttgattaagaggttgtaataggttgacggtagcaatcttcatttataatgtagaaacaatgtccaaagtccaaatagtctatttcacacacataaaataagaaaagtcacgtgtgtaacaaattatttaaatcctatttttggcgtgaagttttttcgaattttttaaaattttgcatgatatcttaaataactacataaacacgaccatgaaaaaaaaaatggactaaattattatttgctaaatattaaaatagataaagatacataagtgcatcttttatttttttttagaaggtggattatagatttcttatattatttgtgtttatttataatttaataaaaaatataatttaagtctaattttaattattttgattggaatagaaaacaaattaaaattaaaattttaaaattttgaattttatttttaagattataaattatttataattttgtaatatatttttaagtagaataataatgtttacttattatggaaaataattagacaagtactctctaaaataccaaaacacataagcagatctactaaaacattctattagaggaatatcaatttttcccccgaactttgacatgtaccaaatcatgtctcctgaacttttttggccgttaaaaattcctcctgaactattgagat

SEQ ID NO: 233294 - DNA, 530 bp, Cannabis indica
tgtttcccacatctcagaccataccattctcacaagatgacctttagatctgaacagtgcctttttcttgggtactcttcatatcataagggctatctttgtgaaaatgatcaaggcaggatatacatctccaggaatgtcatttttaatgaagaatactatccaggggtcttacactcttctgtccaaaaccaggtacatcctactactactcatactatgcctactgctacttttcacactggttttttcactcctactaatacgggtgttgttggttccatggctccattaaatgaggcacatcaacattatgctcctccaacaaatgccatcaacataattgctcttggagacaacatttctactgtgcaaaatgcacaaggctctcatatcagcaccatgtctcccacaactctcccacctgccccaaataaccaagtcctggccactacacctccaactacagatccttcacctccagcagcaactacagaccccattccttcactaaatattctcccagtctc

SEQ ID NO: 233295 - DNA, 1133 bp, Cannabis indica
acaaaaacaaagaaaaaaaaaaaaaataaattgccattatcatggtctcaaatgacctatgattgtcgcgaccactgggtttaaaaacccataaaacccaattttcagcttcaaaaaatgcatcaaaactcacttaaactcaccccaaacatgcatatatcccaaaatcatttgccacaataattatcaacgtaacagagagttaacctacgaatttcatgcatcaaaatccaacaaaatagaccccctaaattcagatttaacaacacaaaaactaggctccaaacattgagcatgtttcaccaaaatcccaacttcaagagcttaaacacaagaacgaaactcaactataaattcgaagctgcggaaattaattagagaaccaatctaaactcaaaattccactcaaaacacatcataaagcatcttacataaatctttaacacaatcaagcataaagtattaataaattacactaatataaacatgcatgcatctcaagaactttcaaagctcaaagacctatttatccacttcaatttcagcaacaatttcaaattaaaactgtaagaaaactacctccaaatcttccacaattcaagctctaaagaattcgcacaaatcaagttgaacccaagctatttctcaacaaattcacaagttgataaagatggataaagagagagaggggaatcggttttggggctgagaaacaaactgaaaaaaatgcatttactttatttaaaatttcctttttgttgtagataaaataaatggtcaaaaagacaataatgcccctagggccataataaagcataagcatcaagcaagggtaaaaatgtcattctcacataacacccaattcaattaattttcagatatatcacacattaataaaatgccaataaataatcccgaaaatgaatttcagccctgaacccggttcggcgcaaaattcctaactgtgactataccgcgccgacttgtcagaaaacacctgagaaaggaaacaacaagtacactatataataatatactccaaaagtacgtaattaaattaaattcactgtccaaaagtacactataacatttcatatacaagattaattcacataaaataaattatataataa

SEQ ID NO: 233296 - DNA, 966 bp, Cannabis indica
aaatacattagatttcgaatttagtcatttatatttaataaaaattgaaaattaattttaattaattttggaccaacttaaattaagtaattttcatcatatttattgaaaattaatactaagatggaaaataatttaattttcatcatatttttttaaaatttatatttagagtcatctaaattagtaagtttaattaaataaatatattaaaataaatataatataaaaatacatattttaaaataatgagctttattttaaggatatttgatctctattgtttattttacatagttcttattttaatgagattcttccctgatagatgttcattaattagaaatttcaagtcgtggaatcttgaaagataagtattattgtaagtcttttattcttagtaacgatctccccaatagtagtgactaagagtatgggatacaaagtatgaaacaatggtagaagctcataagatagaattacctcgactctcgcgtaaacaggataacaccgacaatttcagagagcaatctcattgtttctagaacacaaagacaattcatataattatgggattgattcaaagaataaaggcaacacattttagttttctattagttacattgtaattatagaattaatgtagtttcttattttactcattataggcgaaagggaaaccattcctcatgtattaagtccttatgaatagtggcctaatattactattaaggggatcgagaaaattgcgtcaaaaatacatttaagagaggaaagagggatctaagagagaaagttacacagagatcaattgtaagagctttcgagaggaagaacactttgttccttatctcaagtcaatacaaatacaaagggagtaggctatcaccacacttacagagccgaacctctttaaaatttggtgttaactttattttatcaattttgttttcttttatttatctt

SEQ ID NO: 233297 - DNA, 3694 bp, Cannabis indica
tgcaatgtcggtatttctactgcaatcaaaaacctgcaggcatcttgagcaaatgatggccaaatactggtggcaattgaattcaaagaagtctcgaggtgttagttgggtcagttggtcacgtttgtgcaagcacaagagtgctgaaggcttgggttttcgtattcttcgtgattacaatatgtcattattgggtaaataaggctgacgtttgctgaaaaataaaaactcacatgttggtcgcctctttaaagcaaggtactacccacgaggatcttttctgaatgctacgctgggtaataacccaagttatatatggaggagtatttttgagatgcaaactttgatcaaagagggaacccaggttcgtattggtaatggaccaaacactagtattttgggagctccatggctgtcaaatgctctatctatatgtaatatcaactcaccctgggttgagtacttacacagttcaaaatttgatgaaagtgactcaaaaagagtgggatgaagagattattcgggatatgttcgacaatagggattaagatattattttaagcatacctttaagcaactcgattgaagaagatacatggtattagagaagagatactactggtttttacactgtgaaaagtgcctaccagtacctccaagagttgaaaggggcgtggagtgtggacatggaggatatggtgtggaaaactctgtggaagattaaagccccaccgaaagtcctacaccttatgtggaaggcattaaccaattgtctacctactcgtacccagctttattccaagcatatacatgtcaagttatcttgccctttttaccatatagaagaagagacgattgttcatgtgttgctgcactgtcaattcagcaaatcttgctggaatcggtttggtttggctagtgtttctgcacacagtagcaatttcttcttaaggtttaaagatttggttgacaagaatacaccaaaacttatggaggaggctgttatgctttgttggtcaatatggcaggccaaaaatggagttatttggaaccaaaaaagttgttctacggccgatgtaatgttcacagtgaggttaactttagctcaatggaaacacgctcactcaagaaaatttgagccactgctggttccctcaggaacttatgacagtggcgagcgttggacaaaacctactacacatatgctaaagataaacgttgatggagccattttttaagggtgctaatggtaaatatatattctttgaacatgttttgctggtgctacactgctactgctgacgaccatagctattggaggagaagctggttggagagggctgaaccgccatcgacggtggcgaaagatctagagaggagaaataaggtatgagatctgaagcccaaaatcgcacttcactaggaaaaataaaaatagaagaagagaataatcaattgaaatttcgattttatattatatagttttattttttcaaacagagagttcgggacttatattgttaaaatcttaaatatcttctattattaatattattttaattagaagaagtcaatccatcaatttaaacgaatagtttaaaataatataaatttctgttaaaaaaataatataaattaattaggaatattttgttaaagttaacggagaaaataaaacaacatcgttaaaccaagaattgtcattagataaacacttttaatatataaagatataaagatttggttaaaaaaaatactatatttaacatatctacaattttgtttttcatttttacccttgtaaataaatagcccaaattaaaatgtcatattatttagggataattacataaggcatcatgttttgtaaaataattacatttttacgttcaaagaatgttttttttacatttttacggtttttcaaaaaaataacacgaaaataacataaaatcaacaagaaaactacataaaagtaacatgaaaataacatcaaaataacaacaaaaaataacatacatataacaaaaaattaacaagtttataacataaaaagaccatattttctgtaaataaaatgaaaataatcatataaatgtttaaaattcagtcaaatcgtatttttttttgtttttttgtgaaataattcctattatttatcaagtttaatgttgtagggtttcatgaagcagacccaaaccaaaccaatagaccctagcttaaacctaaactctttctttcttctcataacccataacctctctttgtctcagttactcaagtctccctgtcccctttttgattgggtttcctctctcactaactcatcagcaggacaggacttccgtttagatacgggcataggccgtcgagttctcgaacttgggctcattaccatatgcgcttcaatcgatcatttcttcactactcacaggtatgaatttgaggcgctcctaatgaggattggttccagaacattgagtctctgaatcgttgtattttttttttcatggtttctgattgttgtttttatatgtaataaaattgttcggcttttctctcggtttgggtttgtggattctatgttgtggatgggaaacgaggggtgatttctttttcactcttcatattttgtggtttctctccttcgatttctgttcactcttatttatttgttgaatagtattggtttctcaatccagtgttctatcccaatgtcacgatataatattgcttcattcatttcaggaatatactttgtattacgaatggttctttctccatctgattagttaatttgaatatgatatattctaaatttcaaagagtgtcttttaaattatatactgtaatttaatttataatggtatgttttgtgtttatagtgttttatattttttcctttccacccatttagttaattttgttttggttatatactctgattttgttatattctctaataaatgtataagtaatgaaactaacttttttttgctcttcaaacagttttatgctttaaacttcgtatgagaatatcaaactcacgagaagaagaatagttattgattttgaaatatgcttgcactttttatatatatctcatatattgtaatcatatttttagtgattaaagtatctgtataaaggcaattagacactttcgcttatttcgaatttcagatttctacaatttgagaatggttctcacaagttcatggatatgttgtaagttgtgtagtttttgaaagatgccttgtgctgtggatgcctattggttgggaatgggtgcaactattcattgtgaatgtgtgcaacggttaagataatatagactattgctttttttgaacaataatatagactattgttaaagttgactattctaagtctttcattgtgtatattatgttaaatcacaagaatctgttaaaagcacaacaaaataaggtcaggtagacatttatttaatagctaagataagatatttttgtctgtgcctgagttggttttgaatattggttttttatttttgtttctaatggttttgagtggtttcacgctttaatggctaacaaacatgacaaccttacttagcttatcgttcgtttttaactttaaaagcacctagaatttatacacttattgtggcgaagctgttgggagaacggatcactgatttgtgcaatttgga

SEQ ID NO: 233298 - DNA, 712 bp, Cannabis indica
tggtgcacgttagaggaactcttactagcgtgcgccgttaaccggtacggcaccaagaactgggactccatcgccatggaaaatctccaaccgaaccgcctctgtgtatcggagtccagacaactgtaaagacaggtttgatgaactcaaacgacgtttcatttcgcgaaacgacgatgatgaatcgacgatggttgatgaactgaagaagattcgtgtcgaggagctccgccgcgaggttcggcgacgcgacgtttcgatcgtgtaaatctctttgttcttgtttgagatctgagtcgggagttttggttttttggttaagatctaagtcgtgttttttttgaatgccggtaaataacaggtcgttggagttgaaggtgaagagattggaggaagagagagagaagagcttgaaagaagaaaacaaagataagatcaatcttgaagaaaacgaacgtagattgaactcaccggagaagaagaagacgaagaagacgacgacgatgaagaagaagatcaatcgtgccgtgaaatcgaattccggccaagattccgattcttgcgaccgcgagaatcgatcgtacaacgagtctaattccacctctcaaaatcgacgaaacggcgtcgtaaaagccgaaacgaaacccgaacccgatagaagaaacgattcggatcctccgcgacccgagtccgaacccggaaaagtcgttaa

SEQ ID NO: 233299 - DNA, 1292 bp, Cannabis indica
tatttatatgagacatgcatatataatatatattatgtgtatataatatatatcatgcatggatattaaaatttatatatatgttatgtatgtgtgagattatataacatatatagttgtataataattaatatattacataacacatgagatactatattaattagcgtaagattattatttgagagttataattttatgtatgggagttgtatattaattttatattaatatatgatgagttatatagtatgataataatgtcaatagtaatataatattatttattactattgatgtggagattattgtcatctatattgtgaacaaaagagaatttagaattcattttctaatagtgattttgagaaaagaaattgtgagtacttgtgagaagttacattctttgagaattataagtgataattatctcattttatgagataagaaaagtgaactatatgagttacatttatgagatttgtcttgtcatagtaagaacaaatagatcaaaagtggatccaaacttgtgaaatgagttataaattgaaagagcaattgtagactcaaataaagtgaatcaaggtggattcaaaaattgtgaaatgattacaagattggagacacaaatttgaatcttaaataatcaaagtagtgaacaaaatcaatgagaattttgtcaacttttatataattttgggctaatctcaatgaagagataatattaaaattatggctaaaaataatcacattattttgtaagtagtaatgtgagtttgatgttttaatttcttaagaaaactaaaaatgtcaaatggtatttttcaaagtgacctaaaaaagttatttaattaaaagaaagaaaaaagtacacaaaaatggtatgttgagataataatttatattaagattaaaagaaatggagagaattcattttaaagtaaatttaaaatttatcttcatggtagaaatgtgggagtgagccacaaatttaatcaaagtgtattgagacattattgattaatttatttgattttgaataaaaattgtaaataagtttgactatgtgcatatgtgaaaatattgacatatttagtcacatattgacatatttagtgcctaaaactaaaatgtgtatatttaagacatgtttggtgtcttcaaagaaagagtaacttagacatatatatttggtgtttagagttaatagtgtagtgtagacatgcttggtgtctaaatgttggaatttattttaccaggatcttagatctactcacaagtatgttatttaa

SEQ ID NO: 233300 - DNA, 2007 bp, Cannabis indica
cttggccatggtatatgaccgtatctagaataatcacaaattaaagtaacatagtattcataacttcctcgagcttgaatattaataggtctgcacacatcagtgtgtacatgctcaagttgttctttggctctattgtcttttgtagaaagatttcttttcgccatcttgcctttaagacaagactcgcatactaaaagagttccaaattttagttctctcaaaggaccatcctttgttaatcgatttattctatcttggccaatatgacctaaacgtaaatgtaatgaccgcatttataatagggaaatttgactttttatgcttacatttggttaaaaaatttcccctaaacacataataattaatatttgtaggatatgacaacttttatgatatccctaaaataccccccatttacatcaccccatttacataatcggaccccattcattggaccccacatcggacacaataagacccatcggaccaatcggacccccccccacttggaccctgtatcggaccaatcggacccacccatccgacccttcatcggacgtacatctcctacctcgcaaactcacagtttcattcgaccatatcgaaccctatcagacctacatcggaccccattagaccttgctgaaaatcacagatttgagattctaaaacctaaatctatctctaaatctaacaaaatctatctttaacactaaaattacaaacaaaatcaataaaaaaaaaataaaaaacagtggtggtgcttcagtggtggtgcgccgtgggtatcagggtttggcggtggttctccttcgtgcaattgtcggtcggaacggtgggtctcctccgtgccattgtgatggtggaatggtgggtgggtgtgggtcggaatggtgatggtgatgtgggcagattagggttgcgatgtggagtcgggcaaagaggcagagagaggttagagggaaggagagagaaacagtttgggattttgagaggggtatttttgagatttatgtaaaatggtcatattttaacaattacccatactttttgttttcctaaccaattatgccttaaaatatgcataaaaaatcaaatttccctttataatatggattagtaaaggtaattagcactaataatttatatttttatagttatttgtgaattaattaaattgtgggtcccattattagaaatgagcattagagttataatttctcaatttcggagattttattaaactctaggagtattatttgtattatatatatgaattatgctatttttataatttttgctcggcgacaatagaaaatgtaatggatggctattttaatcacatgggtgagcctagaaccttattcttagtgggatatttattggagaaaaatagaatactgagtttggacggggttatggtttttgaccattttattcctataccttaaattgcctaaatttaagcttacgaggtatttttgtcattttaggaggcttaatggctgcctaagggaatggcagctggccatttagattgttttcagccaagtaatatttaattgattaattttttatttggaaaataaagagaaataagaagaaaaaaaatagagaactcatcctcctttctctctctccttgttcgaccaacccaaaaccaaagaaaacccaacaacttcatcctttttttctggaaaattcaacaaggattccagaacccttaatcatgtgtttttgaagttttatttttggttaattatgcatataggagatttagggactgttaggatttggtttatgtttggtttgaattttaagcttaatttgagttagtttggttgttttattgtctgtttggaggtttggtagcatggatgcacaagtttgagtttgaaaactcaagcttggttcatccatgacatatttggagttgtatgtgttttcgtgggttctattgatttagaaatgattatgtaagctcattataggtgttctggaaag

SEQ ID NO: 233301 - DNA, 846 bp, Cannabis indica
acaaaaaaattgcgagctgtacggacagtatgcattgcatactgcccgtgcgctcgcatcaggttgcttgaccgagggacgtcgggaggcgcatgcagcctattccgcacgcggacgcctgggtttcagacaaaatcttgtctgcgcgcgtgctgtccgagggatggccctcatgcgcgcgcggctagttgcaccaccctgatatttttcaaaacttcaaaaaatcataactaattcaaattaaattgaaattgagtaatgtaaaaaaagaaattgcttaatcaattaccatggctctgataaaaataataataagatgaaggagaactggaaaaggaaacaacggacttgttgtgatgagtatttataataaggaagtagtcctcgtctaacaatctggatcgtctagcgatgtgggacccaaagaggtgggaggtgattaaacggcgtcgtagctgggaaggtacgcgttggtgataaaggaatgaggttgggtctgggttggggaggggtggcgagaaagaaaaagtaagaggagaaggctgtagacttattaaatgatgcatttgtcgtcacctaaaccagacgacttgtgtgtggttcgcgtattgggttttatttttatgcttgaatacttcacatttcacaacgctctttctctgccatttttttttctcttaatttgtaataaatgactatactcattattaggcaatgtttggtttgcgtgttacgggaaggcgtaaaactttcgcatgctaaattactgctttaggcctgaatcggagttgatgtaaaattagtcaagaccatctactctatattattatatttgactaatttttt

SEQ ID NO: 233302 - DNA, 1547 bp, Cannabis indica
attttctaaacaactccaaaactatctaatcttagttctaatttttctaagttttctttaaaacattctagagtgttttagtttctcttacaaattaatttcttagaacattgtaaaacattctaacatattctagatttaataatgacttttataacagcacatgcatactcatcactttaaaccaaaagccatgtgcaagggtaagaaagaagacaattaatcaaaagtggaagctacaacaaatatgtttccaaataagaaaagaaaagaaaaagttattacatgtgaatatatagaaaccaaaccatccctcctacaacaaaaacccaaatcaaacttattaaaaaaaaaaatgtaaatgtagttatagctctcactcactcaagtgtattagacatttagttttgtttattaattttctaaaccatgaaatgatcacttcatcaattaatggcttctttctctttatcactttcttctgtttattccaaagcagaggatgcagcaataggaagcataggcactctgctgtgttgctcagtggtatcatcatcatttttagtcccaaacgttgttgtttgattaccttctttttctggcttgtacttgtaccaaacggcagcccaaaggtagaggaagaaattaaggcaactaagtatagccaagaaccaataaaagaagtgtaacttgctggagttaagatcataaccacataaccattgttgtttactaggtgtaactctttttgtcacagcatttataacattaacaaatatggtactcaagaagtaaccaaacgacaacgtgagccacgtaaacgacgtggaaagagatttcatactagctggggcttctttatagaaaaattcaagtaacccaactaaagtaaacatgtcagctattccaaatatgccatactgaaacgacaaccaaaatatgcttattgggttgaatgggtccttatgggcttggtttcgtctcttcatctcaacaagcccagctacggccatggacactgcagatagcacaagcccaactcctaccctttggagctgtgttatgcctgtaggaatgcctgtgatttttcgagcaaaaggaacgaagatgagctcgtagatgggtaggagaatggacatgaagagtaatgggattatgggtactgatggggctggaatttcttttgagccgatgtggcggtccatgaataaggctccttgttctactgagaatgtttgtagttgagctaagcaagtgttcattaggatggtgctggctaaaatgggtagcattcttgttaggattttgacttcttccacttgtgttatggtgcaaactctccatggttgtggatctgacatgtttattagtatggctgctttgtctagacacctggggtttgaatttcatttatgttaaaacatatatatttatatcaatataatttatattataaatttattaagggtaaatactttttttttataacaaataaagaataatcatggatttatggatattaaatagtcagcccaatattttggtgg

SEQ ID NO: 233303 - DNA, 743 bp, Cannabis indica
attatttttaaatgagttttatttagggcataaaacccaacatcaacttcttattgtttgatgcagaccaaatcattgggctcgattggtctgtgtcttcattgggagaattggtcatagaatgctttcttgagtgcctcacgggaatcgatagatcccgcgagagcttgagatacaacttctgtgctgcttctgatagcgtggttagaaagactcgacaacgagaattgtctcagatgtcttctaggttagtttctacttcaacattgtggatgtgagagagagggtcttctttgccaatgtacggatgccacactagaaatttgaattttgaggggatatctaaagccttgattcaatcatagagaggagaacaccgctctcgatctaatccatactctattggctatggagtagtgatacccttaaccaaagcggtaagggtatcaaatttggtcctacacactatggtgatgtgcgtatcagttggccacttcttgttgatgtcattatgcaggatcttttgtcttccaagtcgatcaaaatcattgatcgacctaggccttgtggttgttgcctagtcatgaggccttgttggcaactgtggggatctatcccgtatgatgatagaattgtgtcttgagtgtttgctgcatgagcagctgctcgaagtattatactgactattcccttcaaaatagtcttccatagagtgacatgtgtggagggagttggaccgattg

SEQ ID NO: 233304 - DNA, 1022 bp, Cannabis indica
aatttctcataaaatcaagaattctgttatataggcacactttatatagaatagatataaaaggtatgagctttgacttatttttaatatttggataactattatattaatatctttttttaataaaaaatatattttttaaagtgtttggatattattaagaaaagatttttttgtaagtaaattaagaattatgtaaattatttttattttaaaaaagacttttcaaaagtgttttggaaaaaactacaaattctaactgcttctaaaataatttttaaattaatataaaactttttattttttatccagatactactagaacaatatatatatatatttttaattttaaaagctaagccaaacaacaccaatataaaaatgtaaaatataacataatataatataattaaatttaataataaactatttatttattcttttaaaagaagaaactaattattattaaaatttacattaatttagattggcataatttcttttttttttctttttttttttgtatctcttatgtagtaaaaataaagtttaaatgttattgagtttgagaatgaacatgagaggtgatgaaagtgagttttctttatgaatggaagccatcggtatgtatttattgggcatttatcaactaagtgtaggaagaatataggggttgagaagccaattacaaggaagatttgagttcctaaagctaaggtggatgagaaggtgatacaagaggaagaacaacctggtcctaataaggttaagaataaagttactgatatttttagacagttaaacattctgctaagaacaacgtctgtttagtgcaattagtgttcttaattcttttggagctttgattgttaatttcatttttgacatatttaattgacaaaaatatttcattattaattgtattttcggctggtatgtattaatatggtttccttatttgtgtgtatctaaacttggaaggaaagttgtctagctttcctatttttggaaaaaaggtaaaa

SEQ ID NO: 233305 - DNA, 1687 bp, Cannabis indica
aatgtttagagttattctttccatcaaaacacgtatttttcttcaaaaattaaaattaaaattactttaaggaattttttttgttgagaattttaaggagttgttctcatgtaattacaatattttaaattattattttaattgtattaataattttttctattatattttaagaacattttaaagaagaaccgcgcgaagagcgagtatgttacctagttaaataataaaaaagtaaccacattctttgagtaatgacaatatcgaatcctaaaaataacagacaacaacaaacaattataaccaagaaattaaaatactgatttaaacaataatacatgttgggtctggactctggtggcccaaaatgtttaggcctaaaggtgaccaaatacaccaaagtgtgaactttgattctaaacgtgacaaactcttactagttactagtcaagctctcattggtatcataaccgagaaggaacttataacatatatataacataaatatatatatgatgaagactgttctagcgagagaccaatcagaatgtcaaccatggttttatttttatctttgtggaagtttcatgcctatatattattcagtatacagaactatagatcgagactaattaataatatcaaaaacatgtctgaaaacttgtcataactccaataagctgtggtattattacaaaaatatctacatcatataaatagcataataataaatttttacctcattataactttgtcagctggctaagcaataatatttccaacactttcttcaatacaagttaccttgaagtaggcctccatagaaatgcattaggttctcttacaaaatcaacaccaaccttcatagcaaattgtccaagaggaacaccaagaactgaatcttgtggatcatctgaaatgaaatgaaatatccaacaacaacaatattcccagaaccagtctaatccaaaaggttgcacttttggcctcgaattttaatatcaccctataatcatccaaatattactatagtttggaaataataaatcaacttagaaatatataaataaatgataataatactaaaatcttacctgagtaggatgactatgtgtgttggactgctctctgctcgagttagaatgagactaagcatcacaaacaaaagtttagatacaataaattttttccactaattacttgagtagtatagctaataaaatacttgaatgtatataatagttaaaatcaaaatactagagacaaaacaaaacaaaatgattctataaacctacataaatactccacaaaccttgaaaaaacaatttaataatttactttagaatttatgaaagatgtaatgccctaatgctaaggcacgctacagtgattttttttcaattgaaatgctgtctttgctaatcaaagaatttttttcgaaaatcgtgtcaaattaaaacctttaatattaactatgaaactttataaactttacaaaaatatttacaagtgctaggatcccgttgataaactttttacaaatatttaaaatacaaaagtcaggtcgaatagcgactacaaaatgataatcccagatgtcccaagaccgaacactccaggtcgcgccgccatgacatgtacaacctcatcctagctcaagctcactcctgttaagctttcgcctttc

SEQ ID NO: 233306 - DNA, 2584 bp, Cannabis indica
  modified_base (2514)..(2514): a, c, t, g, unknown or other
attcggaaagaagattttgacagtcatggacaaacagagccccaaatgtagacggaagaaatatgttattgtggacagcttgaactaccatgagacaatcggtttcaacttcaacagagctccatcttttagttttatccaactaagggcttccttaattccaattagctcaacaatctcgggagcaacactaccgatcttacttgaagtaacagcttcaataatatctcccaaagtgtcacgggctaagtaaccaaaaccaaaagagttgtaagcttcaaagacagttccatcaacatttatctttatcgtattcctaaccggtttagtccaatgctcttcctctttacctaactcaaaagtagatataagaggatcaaaacattttgttgagcactttgccattgataaagattagatcttgctgagagaaccacattgaaagctgtcgaacttttctgattccagagtaatttattacgagcattccatattgcccaagccaccattaaagcttcttcaatttgccctgtgttgttaatgctcatagcatgttgaaaccaatcatggaacaatatatgagaggttggaatgaagttgacagaggacaaatgccaacaggacctggcataagaacaatcgaccaagatgtgatgaattgtttcatctgcaacgttgcagaaagtacaggtcttagagataggcacatgtttagtgttgagttgaaatttagtggctaaagttccagttagagctctccatccaaactgcagaactttcggctaaacatgaattttccaaaatgctgaccaaaaaccagtaggcaaaccattaggaaaatcagtaggtaaaccaataggcaaaccaggagcaatttcatgatcatgaattcctctataagcacttttaactgtgtaaatcccagtcttttccttactccaagtctaacaatccttctggacagtttgaggaagaggaatgctaagaatcaagtttctgtccctatcatcaaacatgtcctctaaaatctccttattccattgatgcctgcctacactcattaaagaggaaaccttctgattcataaggccagggtgaacagtacgaacataaggatcagcattgtcagggagccatgggtcttccaagatggaggtttcagatcctcttgcaatgcttttcctcacaccagcaataaggagctgcttagtttcaaagatacttctccacacataactggggttatttccaagagaagctgacaagaaagaaccagaagaaaaatatcttgtcttaaatactttgctgaccaaagcattatcagcaacaaataacctccatgcttgttttccaaggagtgcaaggttgtaatcccttaagtctttaaatccaagtcctcctttacttttatgcttgcacaactttttccaactcctcaagaaacaccacggttgttgttggatgatctccaccagcagttactcatagcactctctaaggatttgcaagtgttcaaaggaaagagaaacactgacatagcatgattaggtagagcttgagccacaattttgagtaagagttcttttccagcttttgacaagaatttgccttcccaactttggattcttttacacaacttgtctttgagaaaaccaaacactgccttcttgctcctactgatgacgcatgctagcccctaagtaaaggctagtattatcttgcctccacaatacccattctttgacaaatatgtatacggtcaacttgttgagtgtttacactaaagaacacagaagatttcgagaaatttaccgtgtgtcctgaagctctttcaaagtcctttagtaagataagtaccttggcagagtcattttcattagctcgacaaaaaacataactatcgtccgcaaacaacacgtgtgatatgaaaggaacaccattagcaactctaatgcctttaatctggtgtgtaatctcataacttttaattagtgatgagaaaacttcagcacaaattaaaaacaagtaagaggacaaagggtcaccttgtctaatgccccttgatggaatgataggtccaatattccaccgactatgaataaccttatactccacagaagtaatacattgaagcacaagataaacccacttgggatcgaaccccattttaagcaaaaccgattcaagaaacggccattcgactctatcatatgccttgttgaaatcaagcttcaaggccatataaccttctttgcctcgtctttcgcgcttcaggtaatgcacgacttcatgagaaatcagaatgttgtctgtcatatatctggctgggacaaaagcactctgagtatctgatatcagatggggaagcaccactttaaaccgattagataacactttcgatatgattttgtatagaacattgcataatgaaataggtctcaaatcccccatctactcgggctttctttttaggataagacagtatgagtgctgttaaccagtggaattgtaccngtaaaaaagagaaatttccttaacgaagtagagcaaacatcaatgcttcactatgtgccaaaaatctctg

SEQ ID NO: 233307 - DNA, 2528 bp, Cannabis indica
agagtttttctagtaatatgttcatatgaattaaaatagaatcatttctgttagacagtcatgttatttccaattgaagatttagcaatgctacaagttttaccttattttaactgttaaattttcagaaatacaagttaatatggatgagtttatataaacgtttgttattctttcttggaattaaggtggcttttggtttgatggaatggaatgttaagaaaacatttttcattcctttctttgattgcatgttaaagtattggaatgtctagaatgacactagagaggaaataccattccaatacctgaaaaaatctaataatttttttatacattttaaattttattttatttttatgtttttattcctttcaaggccaactgactcttatcacctactttataattgatgacaatccaataacggattatatgtgttgtgaagttcaattggaaagagtgttaaaaatttactataccaggccatcttctataggatttcaagcttggtttttggtagggtaaatgtttagttaatatttttctatccgagtacgctgttatagtttagatacttatagcaagttttgtatagtgttttaaaaactctactttaaaataaacataaacaattttaaaagatttatagtctttgaaatacaatttcttaaaacttattggaagaaattagagtaaaaactgtttggaaagctatttagttggatttagtgttacttaatttttttaaaggaatgaaatatttattaatagtcaactgtataaagcagagtcaagaactcatagcataccaagggaagagctaatctagtgagatcatgaactataaactatagtgttggtagacttgttacaatgataaaatccgtaaacattaaaattactacatagggataaaacatcagccaaaaggggtgttttatgtctaaggaaggcaagctaatagggttaattggtgcaattgagctgccatggaagaaagcaggaaaggttttcatgagtcgatgagagagggagatagaaaattaaacctaggtcaatttgataccagttgagaaattgagagtggttggaggtaacgaaatgggaaagaaataaattttattctattattttgtttggttgcattttgaagtattagaatgtcatttaaatagaacgatttttccaaaagatcatttcaatgcaagataattataaattttttttttatgcatttttagtttgattttatttctattattttcatttttatgtttttattcattccaactaataagttggcgtttctcattaaagaattagtgtttatttacatttcagtaactaaatgatttttttttgaagaaactaacaaactctgctatttgttaactgccaaacataatcagttaagaggctaactaatcttgtgaaaaccaattaaaaacttattgactgttagtcaaaaatatctcactctaatatattcccaatacaagcatattctactttgacgttgttgaagcataggatcaaaccgtataagacaacaatagattcaatagcaggaggagaaaccaatgcttgaacgggatttgctatggacaccaagcaaactcgaaagtggtcgtgaaccactgccccacaacccacccgacggtgaaccacaaccaaacctgcatcaacattcattttaagacgtcccaagagcttagccaagaacaccctcatcattaatcgttgctcttgaacaagcttattccggcaatactaaatttgccaaagcaagatcaacatagaggcaagttcaacatttatacactcacaatgaaacatgtaaaaatcaatgttatcgtaaaagaataataatgtaccaaacgaggccttgaatataatcgaattgaggctagaacaacccaaagtacatgaaatgtagtctcaaggctgcattacacatcaaacaactaccattagacttagacagagagaaagagagagtcagagagagtaaggtgtcatgatgggttgaggagctcaagtattgagtgttgaagagtcattgtgtcttagatcgttctttgtgattaagaatcattgtgtcttagatcgttctttgtgattctgtacattaattggtgtttgtaattagttgattcacagtaaagaaacttcttagtggaaaactagagtaggactcaaattgagatccaaaccaaaataaatttattgtgttttctctcttatttttctgatttttattgatttaagtttctattgattttggccaacttatttgcaatgtgtttgatcattgttcttgtttgagttggggttgtttaatcacaacaaaagggaatactacttttatatatatctattctatataaagtgtgcctatataactgaaattcttttaatttttatttaataaaataataaaatattatttatatataataaaataataataaaacaaatctcattaatatttgaactgatatttaggtgacttttaatttttattt

SEQ ID NO: 233308 - DNA, 1644 bp, Cannabis indica
tatttcgggtcgaactgggttcgcgcctgaaatgcaaattggattgaaatatttggcattttatttattggtgttaatctaaaatttatttggatttaaatatgtatgtaaagacttgattacccttgtgtgagtaagatggggttaagtgaacctaagggcaaaatggtcattttgaccattgagctatgtttgataaaagtaatatttgaaaaagaaatggaattttcttgtttgttcttgcttcagccgacctccccctttccctcttttccaaacctattttcttttacaactttgatcttgatggaaaattggtgtaatttggagctagctcttggagcttgggatttgtgattattcttgctaagctttgaggtagtaattagagtttccaattgaatttttcttgctgaattttatagttgaaaagcatgttaagtgatgaagttcttgagtttgcatgtatgaggagttgtcttgatcttgggagatttatatgtgttaattccatgatattgttgtgagtttattgttgattattggatgagattgttgagggtttttctaagttaaggtttatgtgttaattggtgatatgctgctggaaattaatttgagttggttaggagctcaaatccttgagcttgagttcttgttgattaaagcatgattttgtgttattatgcaatctgaattttcagagtttagtaaggattttgatgtttgagcatgtattttaaactctctgtatgattattaaagacctatttgatggtttggaagtttggtggtgatttgggaaggtttagttgagttttgggggctgtttttcgtgttttgctgctggttttttgggttttgaacctaggtgtcgcggcatggtatttagcatgtcgcggcgcgcccttttctttctgggcagatccttatgcaaacttcaaatagccataactttatgatctggactccgatttgggagttctatataccgttggaaaagaatttttcgagctctatgtgaatatctgaattttaaatgccatatgaatattttatgaatttgaaatcaggggttaaccctatttgtgaaaatcccagaatttgtgactaggattaccgacacctggtcaggagcatccggggatttggaatctctactatcgcgagacatcaggtaagacagtagtatgcacgtagagttaagcgtagtggtgctcatattgtatgttgtgattgtgattaattcagaattgggattagggttattatcctaaaatgagcggttatttagtctagggttattaccctagtagtttaaaaaaatgttgaatgttatgccatgttgaatatattggaataaagagttatgtgtataaggcataattaagctaaattcggtaaaccagtaccttgagtttaattttaatgcgatcttgggttttcacactagaacattatgaaggtaagaaagcgttaatgcatggtaatgttattaatccagtgaaaatatgagttagggttattaccctaagattttatatgatgtggtaaatattgaatacatgtgggtatgttaagaattatgtgtataagacataactaggttagaccttgtatatatcaccatgataaaccaccgaa

SEQ ID NO: 233309 - DNA, 969 bp, Cannabis indica
tttttgaaaaagaaaaacatatcttttacttttgttttttaattttgaaacaaaaaataaaagtgtattttgtaaatttaattttttatttttatttgatttaggtttggggtttatttggagtctagggttcgtgttcctggtctggggtctagtgtctaggttctgggtcggggtccaaggcttgggtcggggtctggggttggggtccgaggatggggccaaagccaggccccgggtctagggtcgaggtccaggctgctgggtcggggtaaggattcgggtctggggtttgtgttgacgttcggggtcagagctagttcaaggctgcggctaggattcgagtttggggttggggttcgagttcagtgttcgggctggggttcggggcttgggtctggagatggggtcgggttctacgtgcgggtccgtggtaggggccagagtttgggtttggagtccgatgttctagtctggattcagggtctaagtttaagttaggattcgagtccaggtcgagattaatagatctatatgtaaacaatccaacctcataattatatctcactttcgacaataaataaaagtttcaaaatgatgctaaaaaaagaattaataagaagattgaaccaatcaattattgaattggcttctcaacaggttcttctatatattcacgtggcattatttatatccattaatatattttttattttttatttagtatataatgattatctatatatatattatggtcggtaagagtaatcaattaaaagaaataaatggtgtagttggtatggtatgaatatgattaaccagttttaaactatttttttatattaaaaaaaatatcatgataatattgcaatgatgatcaactacttaaagagaataagtacgtgtgttgtgtttatgcatgcatgcatgcttttgcttttgcttaatcaataatattgtactacgtag

SEQ ID NO: 233310 - DNA, 1111 bp, Cannabis indica
aatattaattaattactaaacaatattaagtttttctacaaatactaaatattttgtagaataaaataataaaaatttatatgtaattattatattatattcaaagaaaccatagatatataaatatatagtataattactagactcgcttacatgggcaaacctacatgcagattaagtgggggtggtcgccccatgtaaaatttgactcggttctaagttatttagggcttaaatttaagtaacttttggagcctttatataaatattaacttgtattgtttaatttattggtaaatctatgtttaaagtttaagctggtcacaaacttaaaattccttatcttaactttactttttgtattatttttgggatttaaagtaaaattaatttaaaatataattattattttatgttttatatagtcaattctataatttttattaaatattaaagtccacataactaaggataaatattgttattaagtactataatatctttagtaccattatgaggtgattttttataaataatttttggttttcaataattattattaaaagtaaaataagtatgattcgataagaaatttcccttaacattttactataaaaataaataatcctcctacttaaattttatttttagcttggttcctgctcacttacacgccctataagtagcctcttatctcattataattaatatagttgaagaaacaaataaaaaacgacccacaaaaatggccaacttgatcattgatgtgtcatgtgtgtatgttttgaaatgatatatatcagataatattattaaaaattagcaacttacatcaataattaagtaagttaaaacaattaattaaagataatagatacatcaaataactaatacagtattattgcattaaaaaaatgaaatacatgcagataattattggaacttgaacactatttgatgttatgccacttgtgagtagtgattgttaatattttaataagttataataagtgtgagttgtgatgtcactatcgaaattcgaaacagtattaactattaagtgttcgccctataaaaaaatacagtgggcatgcatcacttttgttcttat

SEQ ID NO: 233311 - DNA, 1192 bp, Cannabis indica
aatatcaaccatataatagcgtgttgtaaataatttatgatattatataatagttattaaattaaaatatataaaactcgatatttaattacattaaaatagtatgacacctcacactggtgatgcacaccactagtaataccttctagtatttctcaaaaccaaaaaaaatctacaatcaagatattttattttataataaatgtagaagaatttgaaatatgttttttctaaaaattctagaagaatttaatacatgtcttaagtgatataaattcaaaatcgcgcgcactatatgacaaagatctttgtatgaaacaaaaacatgtaagtaaattattagttaaaaaacacgtatgattgtttgtgtaatataaattcataaattatacgttgtgatagacacttggcgattttttttttttttgttattaagaaatagtaaatgtatatagtttgttcattagtagagaagccctaaagtacttcataaaagtacttcatatgtatcaataattatagatatatgatcatgtaagtaagttattagttaaaaaacacgtatgattatctatgtaatatataaattcgtaaatatacattgcgatagactcttgaagagtttttgattatattataaaagaacaaatttttatttcttttttatattgagaaatattaaatgtatatagtttgttcattagtagagaagtcctaaagtactccatatgcattaataagtatagatatatgattatttgatatagaaattaagatcatacaataagaatagaacaaatatatgatcttggagtatcatcattgtcacaaataaaaatctatattatatgtaatgtgttatgatcatattacttaaaattttaaactttggtatgaacaacattgcatatacacatgcataaatgatcaataagttggataaatactgatgttccaggaacctctcatccataatttagaagctcagacatactctgaaagagttatagaaaacatatgatcatagataatatacggtgatattttaaaagcgataataataactttgtgagatatattatcaccaaaataattatagatcatatgtgcatgagggagagacatattcatgttgcactcttttttccttagctcagaatttttctcattgggttttcctgacaaggttttt

SEQ ID NO: 233312 - DNA, 782 bp, Cannabis indica
agtgaataaaaaattgaaaaatgggaaaaatagataaaggtaggaagaagaaataatagggcgccacgtcacctactctaataacaacattataaatatatatagatattgatttataggtggtaattattttagaatactataagttttaagtttgatttcttttaatttagtatcatggtaattattatagaatactataagtttttggtttgatttcttttaattaataggtattaatttagtgttaattattggttacatactaattaatttttaaaaagaaattagaaaaataggtattagaaaaaataagaaggtcaagcatgccacacaactttttaaaaccttcatttatatatattgattgatgattgatattgatgtttaaataattaattattattattataataagtttttttttattattagattagataaataataaaattgtgaactaataacaacatagacaggataaatttaaaaaagtaatgggcattaagtaataataatatgtgcacatatctttttacaccaaattttataatatttgagtaaaattattattttttaaaaagaaaatttgagcaagattattattacaaacaaaacacaaaatgggttcaaaaatgggaatatacttatttggtaccctgtattttattaaaataaagctttggtaccttctaatatcaaaaatgcttattaagtaccctttatttgtaaaaaataataaaaaaaggtaccttgcatataattttggtcaatattttttt

SEQ ID NO: 233313 - DNA, 713 bp, Cannabis indica
agaaaacaatgtttaaacagtcgattttacacgcgtataaaataaactagtcacgcgtggaacacactgcttgaatgcaattttcagcgtgttaaacttttctgaatttcttaaaattttgcaggatgtcttaaataactataatttacatgattataagaaaaaatttgactaaaaatttatttcagatactaaaatagatagagatgtatcggtatatcccttttaagggagtgcattatagaatttcccaaaattaattacaatttacaaccctacaaaatattattgttcaccataataattcaacaaagccagcggtaataaaacactccaccgtatatttgtaattaaaatatataattgtcgccacctcacgtatatatgtatttttttaaaaaaaatatataagattattttatttatttatttatgggttcgtttgatacgctataatagtattatattaaattgtattttatataatatttttatgtaaaattatatatgatattgactgggtgactaaatatataatattttaatataaattaaaatttaacgtaatatagatatatatttcaatttaatattatagaatacttagtcctatattatttgtcttgtacggcaaatattagtagagttattttctaagtagcataatcataataacattatatgatgacaaattattaagtgaaaataaataa

SEQ ID NO: 233314 - DNA, 656 bp, Cannabis indica
tacgaagttggctattttttagcgtcaacaaattaaatttaaataaatatttatcttttaaactaattaattaattcaaaaacaaacttagcggatctcatcctataggataggttccattgttattgtgtagaacatctaagtagagcaccaccttgtcctaataacaaacaaaaatggtgtctccattcgtcttgtccaaacaatgacatttatccatattatatttaaatttaaaatttaaaataaattatttaccacaaaataaataattaacattttacaacttcaaaataaatatttttttcttctccactttattttgtatcatctatacccttgactgtgttaaacagtgactatatggggaccatggacctataatactaagctttaaaaaattagattctttattgagtctcattgatcaaataatcatatttattaatggaaagtttacaataatatacatttttttacatctaatttacaataataacgttactactattactgacgtgtcaagtcaaccaaatttgacattttttttttgacattttctagtattttttaattattttcttgcatttttaaaaataactttttggttactaatagtgttgaaaagaaacaaattagttacctttatataaaaa

SEQ ID NO: 233315 - DNA, 975 bp, Cannabis indica
tcatgctcctcttctgattgagagtacataaggatgtcgtcgataaatacaataacacaaatatcgagaaaatccttgaatatcatattcatcagatccatgaaaactaagggagcattggtcagttcataagacataactacaaattcataatgtcaatacctagtgcggaaagtcgtctttgggatgtcctcctctcggattctcaactaatgatagctcgatcggagatcaatctttgaaaagaccgtcttcctttgaagttgatcaaaaagatcgtcaatcctaggtaaatgatatttattctagattgttaacttattcaattcctgatagtaaatgcacattcgcaaaagacgcatctttcttctttacaaacagtaccggagctccccagggtgacactaggccgcgaaaatcctatgtcaagcaacccctggagttgaattttcaattctttaagttctgctagagccattttgtaaaagcgtcttaggttttgctccaggtgccaaataaataacacaatcaatttttctctgaggtggtaaacccgaaagtttatcaggaaaaacatctagaaattcccgaaccaccttgattccttttggcagaacagagtcaggctgagtggtatctaataccatggccagaaaccctagacatccctctcgtaacaattccctgactgttagtactgaaattacaaggatccgagatccctgaaccgatccgacaaaaacaaacggttctttgccttttggttggaaggtcaccatcttccttttacaatcattattggctgagtacttgaacaagatatccattcccagtataatatcaaaatccactaaattcatttctattaaatcaacactcaactctctatcctctattctgatcggtataaatgttacgaaaattgtaaatagtacgcaagtgcacgtaatcaagtagtaaactcacacaggtgag

SEQ ID NO: 233316 - DNA, 933 bp, Cannabis indica
gacatatcacatcggtacgcctagagtatgactagcgtatcgagtataggctgatattatagtcgatagtaccatactttctgacagtatcacatcggtacaactagagtatgactagtgtaccgagtatatgctgttactatgtcaaaagtatcgtcgtacaaacgttctagactcagtaccatgcgggtcacggggatatggttatgattgggggtatgggtgttcgatcataatccaggttattgctatgttattgtttatgcttcttttactgagtctgttgactcacagtgctaattctatgtgtagttaagggcaaagctaaagttgaggagccatgagagcaagcatgtgaagattgtacatgtcggggcggttaggcttggagcgtacgatctttggacatcagggcttttattgtttagttgctaggcgacaaatcttttgtatatgactagtaaacttttgtaaatgcattttgtaaacgggatactggaattttataaatgtattacttttatgtttttaattaaataagcaaattttaattattcacgatttttaataacctcgttgattagcaatgagctgcacagtacgttaaaaatcagactaacacgcctatattagttagagtgttacagcatagcacttatccaaggtgcaagtaaactacgttgtagcttatcatattagttaaaaccctgtgttctgataaatctaggaatacatttaatcacacaatcttgattactttccactgtgttgacaacagaataaacaagaatatcagtgtgataaagatttggatgaatttatcaatcaaataagtaaataaatgatcacatgaactaaataacacattaaacaagtaatgaaattaaatatgtttctttattgataattgaatagaaaagattacattaaaat

SEQ ID NO: 233317 - DNA, 1258 bp, Cannabis indica
taaaataatttccaacaaacccatcatatgtgtgccacaagaagcctctttcaaaaattttccagcaacgtttttccaacacatgtggtgcttcctactggtgcaaacataccagtaaaagggatcggtacagtccatctaaacaagcatattacacttcaaaatgtactctttgttcccactttcaatatcaacttattttctcttactgccttcattgaaaacagccttaataaggttgttttctctaatgattcttgctctatacaggctccttctccgagcatggtgattgggacagctaaagggcttgggaaactctgtgcaattcaacaagagcacagccccatacttcagcccaattgttgtctttctttacataataatgtagatcaatggcattaacgccttggtcacccttcaatgtatatttccaatacattcaataaaagaattaagtctagtttccccatttcagaaaatcaattttgccatatttgccatcttgcaaaacaaaagaaattaccatttacctcaaaccataattttgctgaaaatgcctttgacttacttcatttggacatttggggtccatttcatataattagtatagaaggctatcggtatttcctcacaattgttgatgatgcatctcgatttacttggacttttatgcttaaaactaaagctgaagcacaaactatctttccaacattttataatatgatctgcacacaatacaattccaaaattaaagcaattcgatccgataatgctaaagaacttgcaatgtccgctttttatgcctccaaaggcataattcattaccactcatgtgttgaacgtcctcaacaaaactctgttgttgaacgcaaacaccaacatctccttaacattgcacgcgctttatgttttcaatctcatttgccccttgcttattggggatatttaattgctactgcaacttacctcatgaaccgaactccttcggtcctcctaaaaggcagtacctcctttgaaaaacttcacttaaaaccaccaaattatgaccatctccgagtatttggatgcttagcatatgcctccacactcacctccactaggcataaattttcaccaagaagccgtgcatccgtgttcattggatacccacatggcatgaaggcttacacccttcttgacatccaaacgaaacaaatctaccattcaagagatgtcatctttcatgaaaacgtattccctttcttggtcaaggttc

SEQ ID NO: 233318 - DNA, 1583 bp, Cannabis indica
tcacccttccaggaccaacggttttcaacataggtagagctcaagggaattccaaggattaaatgagcatctcgggggttaaacatgtcatgtacaagagaatgatcccaagaagtatcatgaatatccaaaagagaactcaccatgtgattttcgaggcctatagtggcagaggtgacatacggatttgcaggatcggggagccaaggatgtttcaaaatattggttgtaatcccatttccaatagttctttgacagccaagctttaccaaattttgagcactccatatacttcgccaaacgaaactggggttgttgccaaggtctgcagaaagaaaatctgattgaggataatacttagctttcaaaacacggttggctagagatgttggagagacaagtaaccgccatccttgtttggccaacatagcaagattgaaatcatgtaagtggcgaaatcccatgccacccgaatgtttgtgagtagccatacgatcccatgacatccaaatgataccttgacctttcgaactagatgttttccaccagaaattagccatgatcttctcgatctcttgacaagtttccaaaggaataagaaagacgctcatggcataagttggaagagattgaatgacagatttaagaagaactttctttccagctcgagataggaattttccattccagctgttaaggcgattgataatcttgttttttagaaaaccaagaataacagttttcttccttccaataatatttggtaatcccaaatagagagagccatcagtagcttctgtcatgccaagaatattgcgtatttgatttcgggcatttgcttcattgttgggactgaagaaaatagaggactttgatacattcaccttctgaccagatgctaattcgaaataatgaagcatttgtttgatgttggcagctgtgttaggattcgcttggcagaagaggtagctgtcgtcagcaaacaacatgtgggttatggaaggagcacctttagcaacacgacacccttgaatgacatggttagcttcacactttctgattaaggaagaaaagccttcagcacaaataatgaacaagtaagtcgataaaggatcaccttggcgaattcctcgggaaggagttatcggcccagcaagtgaccatcatgaaaaatatagtaacgaacagaagttacacatttcatgataaggctgatccatttaccagcaaaacccatacgatgcatgaccacaaacaaatagtcccattccactcgatcataagccttgctcatatctagtttcatagccatgaaacctttttttcccttggttttccgcttgagatactgcatactttcaaaggcaatcattatgttatctgagataagtctgcatggaataaacgcactctgagtaggagagataatatcatcaatcaaaactctcattctattagcaagaaccttcgaaaggaccttgtaggatacattgcagagagctataggacgcaggtcactcatattggagaaattcttcttttttggtatcaacactagatgagtgtcattgagtcctgttggc

SEQ ID NO: 233319 - DNA, 1861 bp, Cannabis indica
acctgaaacccgtgaacctgaaacctggtcaacccgcccaatgttaagccctcccggatggatgacacctggacttccaagacccaaaatcaactcacgggcccatttgttagatctaaacaaaggaatgggctagcccataagcgaagtcagactgcgactctgggtcagctataaccatgtctcgataaagtcagatatctttggtcctgaaaggatgactctcgttagagaggcagagactcagaaaaacacaactggatacccttaggggtattcctgaaggagtagtcgaagaggtatccggatgcagtcctacgtggcacccctttgttaccagatcccacacaatcaggtagtttatcccttgtgttaaacttgggaaaggcgcacagcgcaaaaacaacatacattttgtctaacgtccactactctgacatttgttgtacgggatcgtggcacatggccacctgtcaatatcaaacagtactatgttgtacatttgacggtcacccctcaattgggcctcatatacccagcccaaagtcaatattataatgtattttactccatttatgagcttattttcatgtacaaaaccctaatcggtatgggttcacctgagaacctagttttagcctataagataggatgttatcccttcatacaaagagttacatattttggctagaaactctacaaaaatttggcaagcactcttgtgcaaaatactccatagcctaaaagattaataatatttactcgtggactaagacgcattaatgctccaacctcataaaaaattattttcttctttatttatttaaaaaaattccttagcttaatctattattaatttaatttttaaaaatctctataaatattttaatgcttttattgacagctgaggaaagtattatacattgttatcatctaaaacattagttacaactagaaacttggtattcaagccaaacgctcatcaagatcgtgacgatgctactgatgacgacctaaactgtcccctttgatggacactcagacgggcgtcgcaggggatggtgaagcgtgagaagtagctacttgtctaccttgaaaaggccaacaccaaaaaaaatacgttgattagactcccatcaacccagatgaccaagaaggctaagatgagggcccaaaggatgactacaacaaaaaccctaataaagattatgaggagtattatgaggaagacccagaggtggtgagattaaggcaagtagttgcagaccaacagaggaagatggcgaagtaagaagaagcaacatgccagatacaagctactctcttacagttgcagaacatggcagcaaaagggaaccttaacgtcgaaaacccacaagtgggaaagtttagccatcctagggttggaccctctaataccaaaaaaacgacaaggggaaggccaaaatggcatagccccggaagaagaaatatccaccaaggcttgcataagacgctcctgaggacaacaaaaataaagtcaacccactcgtgcagaaagaaagggtcgtccatgcccaagggctataccttttaatcgactccgcaaaccagagtttagtggaacgataggcaccgtgcttaggtaccggagcctaacgtttggggaaggaaaaaaccaccccaatattttctattaactagagcatctaagtggaatacctagatcccaaagatagcatgtcaatgaccaaggctcttggattttcccattaacactcaaatctcgggcatttgaagtattcatccgatttaaaagtttagttgaaaagcaattcaacttaccaatgaaggctgttcaagctgatgaatgaggtgaata

SEQ ID NO: 233320 - DNA, 1250 bp, Cannabis indica
acgacccactaacgaaaggcttacccgtatgtgtatttttagaacatgttgctcgaatgggattgttaggagcctagcttgtcgagctcagtgggagttttattattatgtatcagacatgctagtatcttgtatggaatgttatgatttgtatttttaaacatgcataatgatattgtagtcacttctagttattgttgatatatgtatgcatatatgtattatttattgaagtgacaagtacaaaaggagatgaatgcgcttagtctcaattctgttgtacctcaaatacatgtttggtttgattgttaatgattgttaatggataaatgtttttaagatcaattcatacataatatatgtatcctgtcgatatgatattatgtacgtcttaattggttaccttatatgtgatagacaaagttatggtggttgataatattgtcaaagtgggagaatattagaattattattgtggactaatataatcataagcttaataccataaacacaatcattaactatgtgctcaatatttgttcactaccataatgggatggttaataatcatacattatgttagaggcacatgagagcacccttttaaaactataattggcccattaaattatagtataccattattgaaccacttaagcccaattagtatataaccccttagggttataagggtatgagatatatacatatatatatgtcttatgtgaagaagtggttttgaaagggttaatggtaatgagtgaaagaggggatagctccacatagtgttctctccaatatcactttgagtttgtatttgttctcatattgaagattcttggatgctctaatatagctcacatggatggatcatcaatgggaggtgtgtatggttatctttgttttgggatgctctaaaaaaatataaatcttggttaatgattatgagtaatgaagattagcatttaatgtgtttggatatctcataatctgtacataaattaacagtttattattattattattgttattattattattattattattattattattattattattattattattattattttagttgataataattttggttatgtgatcttagtttaattgtttaatttttttattgtaagttttgttagggtgttcacggattggttggtctggattttcatatttttgtaaccaattagtataagagttttttgaatattgaaaaccaaaccagaccaataaat

SEQ ID NO: 233321 - DNA, 930 bp, Cannabis indica
  modified_base (26)..(26): a, c, t, g, unknown or other
gatctcctcccccttgtgcccggtcncgtttgcagcgaaaacgagtcgcaccaacacttgttcagtcactgcagttttactcgtaggctgatctgtgagattactaaatggtgtggccattttgattggccaagtgacttcaacggatggttttctgaggctgctaacacattgcagaaaaaaatcatcaactctgttattttggctacaatttacacggtttgggtaaatagaaacaagtgtctttttgatctgagttgtaggacagctagcagtttgagtaaagagattaaggcttgtgtaaaaactagatgtttaattgggtgtaataggggaaaagggaagcttgaaagctacatccataatgtaatttccaattggtattaggcagcagtgtttcggctgctgctgtgctgagtttgttgtgtgtttttcttgcttgtttgaataaagaatctccttcttgttcaaaaaaaaaaaaaaagctcaaacttgcacaaaacttaatccaaccatcaataccagctgctagaacctaaaaccaactcaaatgaacccaaaaattcaaaatctaaacactactaatcctaacagcccctatatcacaaattcactattttaaactaactcaaaacttgaaaatacacatactcaagggttttagggtttaccttaattctccttgaaatcttggtagaaatcacatacttcagcaagaaatccctggtcctagctggttcgaagtgagagaggtgaaggaaagactgttcttcaatatttttaattttcctttgttttttcctattttcttcaaatgtgagaaatgcatttcctatgcattgattcagccaacaacgagggcagctatcccaccctcacacagccacacaatcctaaaaaaggaaaagactaaaatgcccctaatgtaaa

SEQ ID NO: 233322 - DNA, 839 bp, Cannabis indica
tttcccttcttatcattctttgagaaattctcattgtgagaccttttaccacaagtttgttatggttatagatgcagatgaggctggtgtggataaaaatttaatcaggatggtgttactctagccaaaattgtccacccttcttacttcttcttcaagtttaatgaaatcatctacccgatctcaaaactcacccattgaacccataatgagtctagttatgtccttctagagctcacctttattttctattcctcctagcactgtgatcagacgtccttatttagttaataccttaactttagttgccactttcacgaattgattgatataatccttcaacagctcacccgacacctgtttcacctcaaccaagaggaggaaattgaatttagagttttgaggcaaagatattccaggaatcaaactttctaggagttagcttgaagtacaacttttgggtgacttctactaacattgctgagaaaattctacacctgacctccccttttactccatacaagtccgtctatatcttaaaatatttgatatgagataacagatcatccttcttagtgtacagcttccaagttggcattttcaacttaggtacaaggtctagggcattgacccgttcagaaaatggcgaacctcaagttccgtcgagttctaattcagtaagttttggactggtcaaggtatgtatcaagcttttaagcgtatccagttgggcttgcactcccttctcaacctatgctacctattttccagcctttgtaactagcttattggttggagctacaatgggctgaatatttcctttattatttaagacgaag

SEQ ID NO: 233323 - DNA, 1354 bp, Cannabis indica
caaggtgccttcttagttctttgatttcatcaatattttatagttttttcttgaggtacaatttgttagcatgggattttttcaaatagatcccaactaacttttcgaataagccatcagcatcagatacctctcgaagaacttcattcccaatcctttacaataatacactatgagccttgatctgaatttctttctttttcttttggtcttcaatagctgcaagagcctttgtatctagaggcttatacaaactttggtgtgccaacatagctttcatcttgagtctccacaaccttaaatcattcccagcaataaacttatccattttaaacttgatcattgacattcttggcttctttgaactttgattgagtagttcatgatctcgtcaagctaacctcggctctgataccatttgttgtgaatgaacattccttgatcaagatcaataatagagaattaaacaaactaaacaagaattgaataaccaaagctatgaataaaaagaaaaggaagaagaacaccagaatttgagtagactgaactatgaaacaatgtgtttcatgatgatcaaacctactatgaacaatgaagaagcttttattgttgaacttttagtacaaaaccagagagaaatcaatggatcgagcaccctaaactagcctaactaggattacatattcatctctcatgatcagggaagctatttcaagaattgacaatccctttaacatccttccaagaaatctcatgtctgtaactatggcttaatattctctctgattctctttctataaaataatgatgcaagtcctctctcaacaaaagagagctaatagctatctataattaggacatgcaggttgtaactaatagagttagttagagcacttgctaatgtggcaaagtccaatatcctttagtgtcattaattataacaatatatgtgttgtaatattaggttgtaactaacagagttagttagagcacttgctaatgtggcaaagtccaatatcttttagtgtctttattaattataacaatatatgtgttgtaatatttatataattaatctcttatattatccttgtattaggtttttaattctttatttatctttagtatattatgtatatgattataggagttattccatgattattatacaacaattcttatatggtacaaatttaattaagtttgtataaatatttgaatctaatggaatgaagtaaaaaaaggctggacaattttaagatgccattatattttccaagtggattaagagaagtgaaaagtcttttcaaaaaaaaaaaaaaagagaagtgaaaagtgtgattgaagaagaagg

SEQ ID NO: 233324 - DNA, 1487 bp, Cannabis indica
gggcataaaacccaacactattctcactgggcaaagggtcgaaaaaacttatctaagagtatatactcagagatatcattgtaagagctctaagaggggaatcacagcattctttgttcttaagtcaatacaaatcaaggggagtaggctattaccgaactgctcgggacaaaacctctataaaaactctgtgtctttattcattttattatattacatctatattatatcacttgtcgcttacaattaagactcattgtcgttggccaaaagcgaggtcaacaattactttttttgtttgttaaaactgaaaaaaaagtctttacatttatagaatactattcattgttctaaacatattttgttaattgttagcatttcaattttattttttatatgaagatatgtgtaaatattaatagtataggtttgaaatcaataaattatattaattttgtttttaaaaaaattgtgatatattttaaagaaattaatgtatgatatattttaaaggatagagtagagaactatacctgtagttgccaaaatgcacagatagtcttaaaatattatttctatattttctctcttattcacataatttttgtcatcttcttttaaaaaaaaatatgacaacagttaacaactctaaaaggtgtttactatgatcctacatcatatatgaattaatgattttttaggtaaaaactaattttttctaataaaataattaaaaaaagaaaaacaaatttatgactattatctatatttttttttgaaacaaagattgtaatttattaatgcaaatcagctattaaaatagcttcgaaaccaatagggacaaactccctactgggaagacggtcaggacatgaaccagaagaacgagctaatcaattagccacttggttcccagaccgtttaacaaactgaactaaaatatgaaacatcgaaagaaatcgtataagactaatacaatatgaaataattaaaccaagaggagaaagaattcgcctactattattaatggcgttcaccaacactagacagttagtctccatacacaccacaacagggacctagccttcaaccgaaccaccatcaccccaagttcgtttgatctaacttaatgcttccttcattgacattgcttcaaccaccacagggtcgacatcaccatttattttcacggcagcagcagtaagaagtacaccagcagagtctcgagcaatccaccccaggccgtggctcttttccctagaaaaaatggctgcatcgcaattaacctttaactcacccaaagacagtttactccataactcagatttagccgagacttggctaggagatgccgagacacctccatttttcaactgagcaactttccatagttcaaggtatgtaattgcagcagagacaactctttcaacagaagcaatcttcttattccaaagcaagtcatttctagctccccaaacaccccataa

SEQ ID NO: 233325 - DNA, 941 bp, Cannabis indica
tagggtgataacactaatcccagttcctaattatccacatatatcatttttaatataggtgccaccgtgcatactctacgtgctaactactatcttacctgatgtcctgtaaacgtggagattctaaatccccggatgctctgaccaagtgtcggtaatcctagtcacaattttgggattcacaagtacagggttaatccctaaatccactttcagacaatataaacttggcattcaaaatacagataatcaaaaagagctcggaacgagctttccaatgatataaagaatgtcccaaatggagtcctgagtaaaagttatggcgaaaataaaaaccaaaaaataataaactgccattgacatggtcgcgaccagacatatgatggtcgcgactactgggtttaaaaacccataaaatctagtttcagcttcgaaaaatacatcataactcacccaaactcaccccaaacatccatttaatctcaaaatcattttccacattatataactaacataacagagggttaaaacacaaatttcatgcatcaaatcagatttaacaacatccaaactaagctccaaacctagagcaaaattcacatacccacacataaagaagctacacaaggaagtcactaaaatgaatcaaaattcagcatgcttttccaaccaaccaacccaaatttaacaactagatattcccaaattcacaatccaaagcatacacaaagtaacccctttaattcacaacacaaccatggccacaactccataatcaatctaaaactcataaacatgcaatttcaagaatataacccatgatttcatatactcactatgaattacaacaataaactcaatatccaaatggtagaaacactaccttaaatccttccaaagatcaagcacaaaactccacaacaccaagcttgaatccaagc

SEQ ID NO: 233326 - DNA, 1523 bp, Cannabis indica
tttttttttgaaaaaaagatacttgttattctaaactagaaaagagtttcgtttacaacaacagagtaaataggaggagagatattctccaaccaaaaacaagcctcatccacccctaacacatgtttagccaacccatgagtaggcatattgacatcacgtttgacatgagaaccacatacatttggggaaaaaaataaaagactaacaacatcaacaattaaatcattaaaagatgaaattgaaatgaagggagcccttaaagcattagagaccaagagagcatcagtttccacacaatttgttggcagttggtgttgcaaagccatgtttaagccaaaaaatagtgctttagcttccatttcatgtggcaagtagttgcccttcatcgacattattcattccgcactactgcacccaagccaattgtgtttgttgatgcttggacagccgcatcgacattaagtttcagtcgcccagcagtaggtggtttccaacgtgtgtgagatgcagcagtaattgatgaatgtgaggaagaagcaacaaccaaaggagcagtggaagatcttcgttcaacagctggtttgacgtgctgctatttatgattagcagcttgaaaattctggagcagagtaacagcagtaaaactagtaacagctgctggttttgcaattttgccatgaactgctttatttctttcagtccaaatagaccaaaacatttgctccctttcagaggtagaatgtattgttgaaaggaaatgtaagtaatctcctttcttcatggaggagctagcttgccaatcggattgtacattcatggatctccaaacactcttagcatatttgcaaccaaagaggacgtgaccaactattttccaggcttgtcgacagacagagcatgttgaatcagtaattatcttccttcggacaagggctgtggcaaccgaaagagcatcatgaattacacgccaggcaaaaatttttatttttggagggagttgaagcgaccaaaagaacttccaccaagaggttgctaatgtagaactcgaactaagggtagagtcttcaagtgatgcagccaagtgataaccagattgtacggtgtagtaacccgatgagtgatgatgccaaataagggagtcatcgctgctgaagcagcttagtgggatagttaaaattctgtcaacatctagtgatgaaaaaacttgctgcaacatgtcaatatcccattgccgttcctctgttataaagtttccaacaacacagtttgatggacccgagtagtggatagggagaaaattagtgtcgctaggaatccaaggatcgacaccgcatttaactgttcttccctcaacgattttccatctcagtccttcaattaggagttctcgaccccaatgaatgccttgccaagtcaatgaaggtaaatggccaacatgagcttccaagaaagtgttgttattacgaaaatatctgcacttcagcaattgtccaagcaaggaatcgggcttctccacaaga

SEQ ID NO: 233327 - DNA, 1295 bp, Cannabis indica
agatgaaagattttacgtggtttagacgttgaatatttctaatccacgagtgagtatattggtcttataggcgtttaaatatattacaagtggtgtttacaatgaaatcctaactctgattccctaaatttctcttgaagaagatgaaagcttagagaatttttagtagagcttcggctatgtaatttttcgacccccctttatgaagaaataaaggggcttatataggctaaagtgcaggtatgagcatacccatgactcgccttgggttttttgcaagaagcccacctactattggggtaaaaaacataaaaatactcactattgggtccctacgaaggctctttctcgtgggacgaagggttcgtacagctgggaccgtgctggtgtagggcacgtgtcgggcgaacagaagggtgtattcagaggatgtacgcacactaccatgttctgacacggggaacaaggcttgatcctgtgtcaaaaaactataaccataacaaaagtcatccgacttttacttcatgacaagctttcagttttccttgtgcaattgacatcgaccttaaacccttcatatgtctcccaggtgtctcccctctaagtttagttgatttggtcttctctaggtcctagagggatgacagggctttcgggtcccaaatgataatctgccttgtggtaaatttttgggccttacccggatctagacctctccagggtttgtttactctttccgtcactttctacattaatgggacttaattggtaattacatagattgtcaccttccaccttttgtgatgtgtccttcatttgaaaaatatttatccccaaacttttgagactcttgagtggtggaagcttgcagcctccttctggattattagggtacacttgggacacgtggacgaatcttaagaatgtagaagcatctcattcatccgacacttggaagttgagagatcaaaaaatttcatggtaaacaattggtagtccacgcgtgtcacacattctttggatctgtgaatagtatgcgcctataggaagcacgtttattgcaagaaacctcaaatggtggtagagttatgatgtgacgactctttaatgtgtagggagcccgacgcaaatgatgattattaaatgccttgattctgccaaggagcattacatatagtcttctcaactccccaatcgtcggatcactttgtgctttttagctgatttgatctaggcctttgattttaaatcacatggacttatttaaccattataaataggcacgaaacccccac

SEQ ID NO: 233328 - DNA, 1205 bp, Cannabis indica
gttggtctgaccgaggaacttaaggaaatttccctcacaacaatgaacccgaccaaggttgtcaagattggtataaacctgacaaagggattaagcacatctcttatggcttgccttaggaaaaataaagaaatttttcttggtcgcatgaggacatgaatggaattgacaccaaggttatctatcattctctcaacattgacaaagtgaatttcaagcctgtacaacaaaaaatgtagactctttaacaaatagcatgccaaggctctcaaggaaaaagttgagagattgcaagaaaaaaacttcattagggaagctttttactcagtcacggtatccaaccctgtcctggtgtctacactgaatggaaagtggagaacatgtgtcgacttcactaacataaataaggctttccctaaagactatttctctcttcctcaaattggttaactagtggatgctacatctagccataaaatcctcacattcatagatgcttactcgggagataaccaaattagaatgtacatgcctaatgaagagcacactagcttctaaatagatatactgctacaaagtgatgccctttggtttcaagaatactgatgcatatatcagaggctagtcaaccgcatgttccatgaattaatcaggaataatatggaagtctacgttgataaaatgctggttaaatctaagaaatctgaaaaccacatcaacaatttcaaagaatgcttcaacatcctatagattataggatgaagcttaacaccctaaaatgtgctttttgtgtccaatgagaaaagattctcaaattcattgttaattaccaagggattgaaccaaatccaaaaaaagataaaggcattggaagacatgaagtcatcttcgtggataaaagacgtgcaaagccttaccaaatgaatcgttatcttcaaattcaccaacaagtgtgttcctttattcaatctactaagaggaagaaacaaagggtttgaatggaccagtgagtgggagcaagccttacaggctctcaagcatcatttggccaaacctctaatcctttcaaaaccaatagatggtgaagaattattcatctatttggcaatcaccgagcatgcggtcactgctactctagtgcattgagatgaaggaacaatttgttcgatgtattacttgagtaagcatctccttggggtcgagtc

SEQ ID NO: 233329 - DNA, 1347 bp, Cannabis indica
ttttaataaacatattatttattaataatttttaaaatattaataataaacgcaaggataagatattataaaataatattaaaaacattaattacattaatatttttatggtaattagcttaatcattaatgatttatattattttttttttttgaaagggaattcattaaacaacaacactaaacaggattaggcaaatcaagcaaaatagcttgattagcacaagagggattaaccccaatccacatggcactaactttgtgaaccaaagcataattggctaaacatgagcaactttattggcctcacgaaatacaaaagagataccaatcacactatcatgagacaacaacaatctaatctgatctagcaaacaatcaacatcacggcagccatctcctttttttggattaattgaatagcttccaaacagttcgattctatgctaaaatgcattatatgtctctgtagcccagcttgtatccctttcaaaatagccatcagctccaattgtaacggcgagtattcccgtggtatagcaatcgaagaagcatagatcacctccccttgctcaccacggatgacacacccagccccgagtacccagcccccttcttaacaccagcatccacattaatcttcacttccccatgcctcggcaccttccaaaccccctgctccctgcgcatggcctcttggggacaacattttcctccctgaaaattagccagcaacttataactctattccaccatctctgccggttgtggtacaaaaccaccatgaatacaagcatttcgggtattccacaagttccaagtaataaccagaaacatttcaaactagtccttactcatcacagttgacaaccgcattaaaaatgcaagttcatcctcctgcccatgtcgcttgacttcttgttgaaagtcacaaagtttccaacataccttacttttcttgcattcccatagagcatgaaagattgtttcagaaatatggagagaacacctcgaacacccatcggtagtagagacctgacgttaagccaacacggtagaagtaggaagccaaccatgagccaatttccacacaaacactttgatttttggagggatttttaagcgccacaatttccgccaccattggacagcaagatggtcatccgattgttgcctttctgtcttcaattcacatgccatgcgataaccactcttgaccgagtactcaccattcttactatagtgccaaaggattttatcttcaatatctcaccccgagtttggaagtgaaagaatcatctcagcatcatcttgattaaacaccgcactaataaattgttcatccca

SEQ ID NO: 233330 - DNA, 872 bp, Cannabis indica
tgttcaaaaaagtgaataagtatatatataaaaaaaaagagaaaggaaccttcagagtcataatcattgagcactgtagtattctcgagattgctatcaacaccaacaatcactccaatatccctcctcgaagtaatgggttgcaaagacatgtggatagaagagtcggctataggctatagtaaagttcccatgcgaaggatttccccggtcaatgggaacaacaggagcatcaggtccatcgatcgtacttatggcagttgagttatgctcaggagggtacaatcccactaacttgagcgtctccgcagttacaatcgttgaggcatgcttttcagctgctggcatggctatcaaagctattgcgtgttgtatcatctccttggttgggactggtctggaatatgtacccatatggttaaaagcacggtgggtagtgtccatgggggttgtaaaaaagtaggatgaccgaggcttgtctccgcgatttgtgttacaaataccagaaacatacgattgaccctgttctcgattcatgaagtagaagtattctgaatggttcatagaggggcaagtccgaaaggaaaggaggtagtgaatttcgtgaggagaaggccttccccatctcttctgatgatatattatgaacaaagcagataaagccggtacccttgaggagcaatttggaccggggaaatgtcaaagtagttctccacatctcgaaagtaatcatggagtggcaaggtcgctccaacctcgatgtattttgtccaggcacatgaatcatctatggcagagccatcattttggcctttcttcgctgggactaccttcaccccctcaccaagagcgtacagagagaggtaactttg

SEQ ID NO: 233331 - DNA, 593 bp, Cannabis indica
cttcaaaatcctcaggtaaaatttgtatttgtgtttttattttcgttttcagagaaattggcttttataaactaccatatctctctccctaggtccgttttcaatgatctaggtacctttttgaagataatttaatgatctattttttttcatgaagagactcttcctttattctgattattttgatgtcaaaaaattcatgttttcatgcgggctgtcgaattaaagtttttcaaatttccttccaatattgcctcagtaaaagtgcgatatctctctcgatatttattattttccagagtttctggtaccgttggaaagataattcaataatacatattttctttgaagaaaattttagttattacctatcaaaagtcggtatcttcactcggttaggatatctcgttttaagttttgtttcagaaataatgtctttagtaaaaattcattatctctctcaattttggtccattttaaaagatctttatctagttttaaagattaagaaaatagctacattttgtatgaagaaagtgttgtcagaattggggtgtaactatttttaaaacttttatttttgggctgtattc

SEQ ID NO: 233332 - DNA, 1528 bp, Cannabis indica
tgatattatttatgcttttcttactgagtctgttgactcacagtagatatttctatatgtaggtaagggcaatgctaaagttgagcacccgtgagagcgagcagatgacgattgtcaatatcggggcagttaggcctggagcgtacgatcgtaagggacatcaaggcttttgctgacagtcgctaggcaacaaaacttacgtatatgtgtatagcaaacttttataaatgtcttttgtaaacggtatcccgggattttatatatgtaatactttaattttctaattaaataatcaaattttaattattcacgatttttaataacctcattgattatcaacgagctgcacagtacgtttaaaataacgctaacaagcctatgctagtttgggtgttacaatttggtatcagagctgccagtttgtcttccgaagattttcacgacatgtacaatcatcatcagtagtcaaatcgttttcacgattcagttagcttttattgctttagtagtttattttaatagtataatttaaaaaaaagcctattaggaagcatgttagtagcccgatagtggaataggtcatgttaatttccaaataagcggcattagcacgttattcttgattgcgatctgaccagactagctcttggttacgtgggctgttttagtagtgtggacgccaggcgaaacaccaggagtcagggtaactcggtcggattcaatggcggtcagggagtttggattcccctaaatattcatgcccgatgtagaggccttagaagcatggcacgtggacaaggtgatattaacccgccacaggctgcccaagctgcccatgattgggaaaactggcttgcagtgatgcaagccaggatcaatgagcaagatgaagagatttgatggttgagacagcagggtgcttctacagttcttgctccagaaataccagtggcacatgcccctactatgcaagccgaacctgtagttgcagtgaaccgaatggaacccctgtatgaaaggttccgtaagcaagcacctctagttttcctaggaggtctcgatgtcatgaaatccgatcaatggctaatagtgattacccgaatcttgagctttaggggcgacatcggtaatgataaggtggcttgtgccactttccaatttcaagaagacgctctagatttgtgggacatggtttctctgacccaagatgttactatgatgacctggaaaagttccaggagtttttcgacgtgaggtgttacaatgaggcaattcgaagcgcaaaagaaataattcatccaattgactcagaaagaaaacatgagtgttacagaatacatgactcaatttgatcgtttggcgaggttggcctctggaattgtgcaaccgatttcagtagaaagagaagtacctagatgggttaaatttgaagatcaaacatgacctaatgatcactactgacgacagtaccacctactgttgaaatggtggataaggcactgcgagctgagggcgtagtggagtgcac

SEQ ID NO: 233333 - DNA, 1187 bp, Cannabis indica
gtcatcatactctatgttattagtcatttgcatgctgctatcatctgcatgacatactttgcccattcatcacgtatttcattgatttctttgttagtgtaagaggatgatatgttccttttaaactgcaacaaacgaaacaaatcattaatttaataagtcataataaaagtacttaaaaactttaatatttgtgaaaataattagtgtctttaatatgaacttatactaatatccaaagctcttgttcatgtatatatattgaatgcttgaatccatctattttttattagttaacataggagtgtatgaaaaccaatataaaagtgaatcataaattaaagccccttaaatcctttccaatatgaacttacaatatttgaagatggtttttgtcctttaaccaccaaaaattcgacttcttcggctttcagaagtgtctggtgtgcaacatactgtatacatcacatcattatatgctttctctcaagatagactatacagaggaagaatacagcagtagagtaacattataaggagaaaaagatccgaagcaatagcatctcatttaagatttcaggagtgtttgaacttgaaggtggggtaaagaggttaatcttgttataatgattagtttttatcatggtatgagaaaatgaatgcatctgtattgtatttatgacgagtaaaaagaaaagtcagcattatgtttttgtagcttatattaagcactctctccagtttatcgagcaagttaaagagctcattgtcaagaatcgagcaagttaagagtaacaacaatggaacgataacgataatttacaaatggatcaaaaataaagttccaaaaaaaatcttacttcacatagatgtttaacagataaacttggccgacagcaaaggtgagactgctgcaaacttggtgtactctgtttgtccaaagaaataagcacgagatgtacatctaactgcacagtaataatactttttattaaggttgaaattagtaagggaaagcagtattagcagtattagcaagggaaatccccattttcaaaaacaccacaatcaaaaaatcaaaactcaaaaatggcgacgattaccagaaaagaaatggatcggatcaaaggtccatggagtcccaaagaagacgattccctacaaaaactggtggagaaacacggtcc

SEQ ID NO: 233334 - DNA, 683 bp, Cannabis indica
gcacaagtgtagccgtggttcttaagccaacttagagcctctcttatacccatgatttcagccaactcatgggagactttgccaattttcacaccagcaaaagccgagatcagctccccaccagagttcctcaccacacaaccaaacccgtgtttaaactcacgatcgaatatagccgcatctacgttaagcttgatgcctgttatcggttttttccaaagctctgaaccatcaccatctttgaagggtgacagtaaaggaatgtttcctttaccttgagctttaacatattgatcaagacttgagaacgcaaaagcaactacatcacttacacttcgaacacggtccttccaaattagatcgtttctagccgaccataaggcccagcacagcatgacaattcggcctaacttgtcattatccttactatgggcattaaaattcaaccattacagcagtgaagtgttgtttcaactagcatctgcaacagcagcttcttcccaacacgaccctgcaaattggcaagtcacaaggaggtgcaattctgtttcaacatagattccacacatggggcaaatgttctcagtcaaaacctttttaatgcagagatttacccttgtggctagaaaattagaggccgccctccataacaaatatttcgccttgggaggcaccttgagaga

SEQ ID NO: 233335 - DNA, 1487 bp, Cannabis indica
tgcttgactttgaaggattgggtaaagtaccttcccctgatcaaattctcttacaacaatagctatcaggcaacaatcgggctggccccttataaacttttatgtggaaggaaataaagatcacctattcactgggatgaagtggataaagtcagagcacgaatgctcgcggctcaaagcaaacagaagagttatgctgacccaaagtgacaggacattgatttttagatcggggacatgatatttcttgggatatcgtcgatgaaaggcattaaacgcttttgtaataaaggagagcatagcccgaggttcattggaccttttgaaatcgttgaaaagatacggcaagtagcgtacaggttgaatatgccccaagcgctggcagctgtacatgatgtgttccacgtttcaatgctttgaaagtatgtctcacatgcgtcccatattctgagttatgaagcattgtaactccagccagaattatcatacgaggaacaaccggtgcaagtacttgatagaagggagaaagtcttgagaaatcagacgtttgcactagtaacagtattatggaggaacagtaaagtggaagaggcaacctgggaactcgagacgaatatgcaagagaaatattcggagttgctcaggtaaatttcggtatgaaatttcgataaggagggggtaattgtaataccctaagattaagaaataaattagcaaaaccctaactagttaattttgtattattgtggaattatattactatataatttaatatatgagaatttatatgagatatgatatgttaagacccagttggtaagccaggggcatttcagtaattttgacccgagaagggtaaaatagtgaaattaatttatgaacgtgcttatagaattatattattatatggtatgcctttgttgtctttttcagctgtgttctgacaagttggcgcggtatagtcacaattgggcatttcgggccaaactgggttcgaggccgaaatacaattctgggataaattattggcatttgaattatgtgtgattaatctgaaatttatttgagtataattgtgtgtggaatgtcatatatgcccttaaatgtttattggtatgctttatggccctaggggcaaagtggtcattttgacctttgaattatattcaataaaagaaaggaattttgagcaaatgggaattgatttttctggttctttctccacaaaacctcccccttccctctctctctaagccacttggtattttgtttaaaattggtgatttgcttggtgtttaagcttgaaattggagggtgttaaagcttgatcttggttggaacttgaggtatagtttctcttgctgatttttagttgaatttatcgatggaaattatctgtagaaaagcaagaaattgtgtggtatttccttgaaatgcatgtaacttgaatttatgttaatcttattgaatttgggcttgattgtttg

SEQ ID NO: 233336 - DNA, 835 bp, Cannabis indica
tattgtccatagataattttaattaattgtcctttcctttgtgaaaaaaaattaaaatgggtttgcaataaaatatgtacttccagatgaattctagttaacatacacatatatacccctcaagtaattttaaagaaaactttgtaattactttaacaaactttaactttattaataataagaatttacatattacagagataaataaaacatttacattttaactttattggtaataaggtcgcaaatgttcactattctagttgttctttattaaagagccgttgaactgagctaatttataaaccccgattgccacaactgcttcaataacatagggaccttcccagtttggattaaacactccgcagatagatctcgtgtgttttcaaatactcaccttaacacaaaatctccaacattaaggattcttttcttaactcttttgttaaagtatcttgtgattcgatgttgatagactacattaattatttgcgactcattacgtccttcttcaagtaagtcagaggaaaggttcaagagctcttagttttctacttgattatagaatttacgtctatgtgtcgcaatattaacttctaccggtagcattacctccgagccaaatgctaagagaatggagtgtgccctgtagtagttttctctgttgctctgtgagcccaaagtacttgtggaagttcatctacccatcttcatttagcagcttccatcttctttttaataatatcttttaaggttttgttaacatcttttacttgtccattttcttagggtcttcaaaccaacgacaagctcgtaataattttattccttt

SEQ ID NO: 233337 - DNA, 1239 bp, Cannabis indica
aaaaagaacaaagtttgggaatatgtagacgtacctcatgattattgtccaataggatgtaagtgggtgtacaagaagaaaagaggtgctagtggcaaagtggaaacttttaaagatagactggtcgctaagggttatacccaaagagaatgtgtggactatgaggaaacttttactccggtctccatgctcaaattcattgtaaatcttctctcaatagctactgctttcgattatgaaatttggcaaatggatgtcaagacaactttccttaacataattcttcaagaaaccatctatatggagaaaccagaaggttatgttctttcaaggcaggaaaagaaagtttgcaagctcaataggtccatttatggacttaagtaagcttctcgctcatggaataaaaggtttgatgaaataatcaagacctattgctttcaccaaaatgatgatgaaccttgtgtttaccaagtcaaggataatcaagttgtagtattcctggtccttttgttgattacattttgattattcgtaacaatgtcaagaaaatgactaacatcaaggaatggcttgatactcaattcgaaatgaaggatttgggttaagctgcttatgttcctggtattcaagtcattagaaactagaagaatggatcccttgctctctcatacaacttacattgataaggtgttagagagattctaaatgtcaaatactaaaggggcagtgatactttttagatttgatatcttcctatctaaggaatagtctcctactgatctccaagagatagaggaatgagaagggttccttatgctttagcagttggaagtgtaatgtatgcaatgttatgcactagaagtgacatttgctatgcagtacgaattgtgagcaggtatcagacaaatataggagaggaacattggactgcagttaagcatattccgaagtacttgaacagtacaaggcattatgtgttagtctacaagggtggtactttaaatcctgtagactataccaactcagatttccaggcttgtcttgatgacacaaagtctacatctgggatggtgtttactcttcaaggtggagcagttctttggagaagttctaaatgttcgatatttattttaccaggatctttgatctacgcacaagtatgttgtttaacatcctaaatatgaactttctaaaacgataataaacactaataaagtaaagaaaaccttacattggttg

SEQ ID NO: 233338 - DNA, 565 bp, Cannabis indica
ataatatgttagacaaaaaaataatttttaataattgaaaattacattttgatgtttcttgttttctagtttcttaaaactcaatttttaaaaaatttggccaaacaactcctattagtttttaaaagttgtatcctattttaaaaactgaaaacagattttaagttatgaagctaaacaaccccttagcctttttctataattaccatcttgtgagaaataaaaactcgaagtagacgtagctccattaccatcgcgacatgagagtgaactactataaattgtgtgtctctattttttcacttaaactcattattcatctcgtgaatctagtgagcttgtgttggccacttttcagggtcaatattttggtactttcattgggagtcacaatttgagatccccaactacagtttgaattctctctaggaactttgttttgaaaggaattcaagcaagtaattattcatgaacatgcaaagccacactaccactgctggtagccatgtcactactcaacaagcaacagccattgggattctccataaggaagcgaactatgagc

SEQ ID NO: 233339 - DNA, 1145 bp, Cannabis indica
tcttcatcactatccaacattgaatgagatcctccttctgtagaagaaggaaccccaatcattaatggtgaagtcacactttcccaagatcccatctcaccactcaacaagagtatggtcacaaacactagacaaaatttaatgatctatgaaaactcaaaacatatatatgctatgatatccaacgatcatactacgcgtcatataaaaacattacatccatgctacgcatcatgcttttattaaaattttagtggacgtattatgcatcaagctcatacaaaatcctacgatcataccacacccactatgcttatcaaaaaattctctttgcttctatactaaaattctatggtcatattatgcaagtcatggataagtttaaaacacaaaaaattcactatttattacaaatttaaatcaaaacatacaaacactacacatctaagattatgaataatatattattccatgaacaccaaaaatatcaagaacaccaagaataaaataatattctaaatagtgaaggaaagactagaaatacttaccaacaagagaaacttcttagcctttcaccacacaaagctctcctccacaccacttgaaaatgaaagaagatgaaaatgaaagaagacaaatgagaaataacaattagtggtcttacttatatagtacaattataaaggaggaaaaataagtatttcaatgaagcaatatattttctaaacccacaatcagccttatacacgggttgcaatagttttacaattgatgaatgtatatatgtacacactcatgtgatcttgcaccaactaaaaaataactacaaatataaattgtctacatcaacagaagtcactccaagtgaaatgcaaaaagaaaaggcattacattacctaatattggtactatgagcataatatatatatgtggaatggtcaactcaaaactagtgtaatagacacactcccacatatacacacatatatatatatgtagtacttatttagacgttgtaatatataaacgcttaaataaaaacaaaaagtagtacttatttagaccaccacatattcctacggtgatattttccaatcactaaaatatattatttattcacagttcacatcaagtttaagacatga

SEQ ID NO: 233340 - DNA, 901 bp, Cannabis indica
tcgttccatatcttaatatgcacgacttggttgtatgatgtgggttcaaagagtgtcgtaactgcaagaataaaagccctgtaagaatcagaaagtttatggtaagataagaatttatcaagtgagtgaggtgtagaggatctgtcatgaaggacagaatgacactcgtaatctcgaaggtatccaggaggctttgacactctgctggtgcgtctcagatgcttaggagaagtagcagcagtagtgatttcaatggctgttggtgaagtatttggtggaacattctcggggcattgatccacatttattggagtaaaaagacatgaatcaggtgcgctgatggtgattgaaggaattgttgctggtgtgtctgaattgacagcatcaggaatgtgtggttgcattgttgctggtgcggattgttgtattgttgctggtgtgttgggacagtgttcctgcattgttttattagtacttgaaatgctattacctactgtagggaaatgttggacaggtgttagagtaacactagatgaaggtaaaaccatatgagaaaaaggatctatggtgttagtgtcagtatttaatttgtgaaaaggataaacactttcatggaaaataacatttcgtgaaaaaaatatttgttttgagtttatgtcatatagtttataccctttaattccttggggatagcctatgaacacgcacggtctagcccttggctcaaacttggttctatgagctgtaagagtagaagcaaatacaagacaaccgaaacttctcaagttagtgtaatcaggcatttcattaaagagcaattcataaggagttttatttccaagatttggtgtgggagttcggttaatgagaaaaccgaagtcaacaaacaatctgtccaaaa

SEQ ID NO: 233341 - DNA, 648 bp, Cannabis indica
tctctttattaagaagtttcttacagagaatattttttgtgtgttctttttcgttcgatccccttcttaattttactcaggggtatttatagagattggtggaataagaagaggagtgacttgtctttaagagccaactatgggcaagcacaagttcccaaaagatacaaaatagggcatgcactacctacacagtaggcagcgtagatgttaggtgagattagccttcatcctttcttgattgatgtgattcttcatgatggagccgtcactagttcctttgattatcgtgtaatcgcccgaaatcaggtttatgatctctgacacaccatcttatgggcgttcctagacattttctccatgctgcattaaatgcgaaatgactatttaactcaaaccttttggcttggaagcgccttcttgtgtcttgactcccggaggggaaggtatatcttttgctcatgtttgggagctaacgtcatgaaccatacttgttgcttctttagtctaacttccaactcatctccgagtgacgtgcctattttgtccacatgtcacacacaacaacagccacatatattgagaataaactggggcaatagttacttatatatattctaaaatatacataaatatacttaaattgga

SEQ ID NO: 233342 - DNA, 1702 bp, Cannabis indica
tggacaatctgaaactgtttaagtaatttcaagtcaaaatagcaagtcagtagaactattatagaaggataatatggggattttactcattttttcttcttatgtctgccctttttttaaaattcaccgttgcttaatcgtatggcatatcatgaaagtttactattttttggtatttttctttgatcatagtatttttgaaacttgttacaaacctaaaaatatacgatttatcttctaatttgagttatttataattttgttttctcattacaatttgagattttatgtcttaacactaaaaccgtatctatctttaatcgagtgctataaaaatgttgaacatgcatttttttgtcacatctttataaaattgaattttaatggtgccccttaaattatttgttaaatttgacaaaaaaaaaaagattatgctatatttagtttttttttttaattattatttattgtcatttaatcttattatgagaatgaactaaaattattatatttttattgtcagttttggtaatatggtaaacataaaatgtaaagttttgtaatagttgatgaaagttttttttttaatatttgctacaaattatggttagtgaattaaaatctgaagtttatactggtttatgaaattttaagaccatctccacctacaaaacatacttgttacaaaatgtaaaactgtaaagttagctcaaaaaatgactaattaattactaatgtcactttatataaaaataattattaaaattaataattaaattgttaaaaaccttttaattagcagaaatcataaatcagtgacaaatgtgtaaataaaacaataaaagatgtataaaagtacagtaaaaaagagtagtacttaggagcatgcaaaatatgtataatgctatattgttgtgtgttaaatttgacacaaattttaacgagtaaaaattgacacaacttttgtgtaatagaacacaaagcagagagaggaatgaagaaaaccaaaagagaaaaaaaattatgaacggctaaattttattaattgccaaaagagatgtttgaccaaagcaaaaataacaagcaaagcagaaaaactaagtaacaaactggtagttgacaattacaatattaactaactaacatcttttatatcttccctcaaactaaatgacgtaaaaactatttttagtttggattttagataaacaaatcgatcagtggttaaagacttagctaggatatcagttgcttgatctatagcaggaacataacaaactgagacttgttttgccatgatttgatcttcgacgaagtgcaaatcaatctctatgtgtttggacctggcatgaaacacaaggttggctgcaagtgcagttgcactttggttgtcaacccaaattacaggacattgaactaagagaacctgaagttcagcaagcagagactgaactcacttaagttcaactgcagtattttccagtgcacgaaactcactttctgtgcttgagcgagcaactacatgctgcttttttaactgaccaacttatcaaatttcctcctagaagcaccaagaatcctcctgtggagcgtcaatcattcagacagctcgcccaatctgcatcagagtaggcaagaagagttgttgcagcaactggtttgagacaaatgccttctttgatggtgccttttagatatctaa

SEQ ID NO: 233343 - DNA, 591 bp, Cannabis indica
taaaataatttccaacagatgcccacctcaaaatcaaaccaagcaattcaaggaaataacttttaaaataaaagagtctagaaattgcaatagaagaatggtggagattggagaggaaggtctgctctcctcacttttggtagtttggttctttggtctcgttcaaaagaaagagagaaaatagggcaaaatgtgatagtgtattgggagtttctttaatcttctatatatattttttctttttatactttttcaaaaaacaaaaaatacaaaaagttaaggaataattttatgtcccgcgtgtcctatatgagtgtagtgggatttaggggtttttatttttaaaagaactagtggcgtctcacgtgcttcgcatgtgtgtgctcctaaaaatatttaagcacaactagttcaaaaaataattattactttatctccaaaatttatgatactaccaaattgtatattctaaaatgtacatcataatgataaaattttgtgaactcttttatttacaaaaatatagtacttttgttagctttagttgttttttatcatttcacaattgacgtgtcgttgtaaattaattac

SEQ ID NO: 233344 - DNA, 1153 bp, Cannabis indica
aaccttagtggtgagtgaagacagtctttgactcttgttgactttgcttgttgggcctgaaagaaaatgcatattgtgagtttacataataacactttctttattgacgcatataagggagaagtttagaaaatgactacttttgtattttgtattaattatatctttgaaggtgttagggagctgcagattcttaatagtggtattagagaaaattatttcgcaaataaagatacaaattaatacatttaagaagcaagtctgcaagacatcaaaaatcaaaaacaagaggaatttgatcttcaagaacatgaagatggcaatcaagaggaggaatcaaatgttggagattcggagaacattccattaaaagatcctatagaaatttctaacactaaatctgatttaattcctatcaaatacaatatgagtagtcttaaaactcacattgataaatttgatggatcaggtgactatagaatatggaggaggaagataaggtctctacttgcacaacaaaagttgttaagagtccttgaagaacccattgaatggcctaaaggaagggaaatttgatttttatgcatttattatattaaaattatttttctacacctaagttagcccatattggtagtttaggctaacattttataaaacccaattctacccctccgacttcaaacatctaaccctctcttcctccctcatctctctcgctctctgaactcacccaaggacttgacccacaacccaccactcacaaccttggtcccttctctccacaaccaccacgaccacagacccaacgacccacggatccaatgaccaccgcggacccagcaacctatagacctaacgacttctccctcaaccacggcttcaccatcgacaatattatcaaagaaataaattatatgattaatgtttattatatgtgagaatagatttagggctgaaaatggccagatctaagttttgggcaaaaaactggtttctttaccagacccgatggtggtttgatgccttcttgttgttaaaataagtaaaggttgaagacgaatgtctgatggtagtccgaaggtgggccgatggtggtccgatgccttcctgacgagcttaatgaatgaagcttaacatctataaatgtaga

SEQ ID NO: 233345 - DNA, 3806 bp, Cannabis indica
tggcctagccacctcgagtattgtgccccatttcctctgccctagcgacatccatatgcatgcatggatgatgttgacaacccatgcacgtgaagaacccgattgggttcaagggtctcagacggagactcttgtggtagttggactgcctgctctaaccaccgaaacttttatcgctgtttgaaactataaacatagaagaggaagaagacccgacttcgggtctggcccaattagtccaccttgtcttcctggtccgtgtcgtgcgtgagcaagaatttccttgagagtacattttatttaagaatcaacggagacctttgacatgtgtagccgatgctgaagaatttccttgagattacattttatttaagttaataaattaaactaaatgtttcaagtagccgtcttagctcagccggtagagcgcgtggcttttaaccacgtggtcgtgggttcgattcccacagacggcgaaaatgtttttttttaattttaagtttcctatttttattctcaagtgtttgttttgtcattaagtgttccaagcttttaggttcgtatgttaaatgttcatgcgcttcacgtctccacctccccaacacttgcaaattcttaatttatatatccaaactctttaatgaaagatatttcatgtgaagaagaaaagaaaaaccacagcaatacgtcaaattaaatgacccttcaaaacattaacaataaattcttataatttttatcaaaaaaaaaaacaaaattcttaacaatatttattgattccaacggttcatctaatctagtgaatgaatatacaatttttcattttcatatttccctccttttcttaggttcccttccattccacctacctttaatggttcccacgattctaccacctcacctctaccacctccttttatcttaataataataataataacaagaaatgccctctttatttaactcagcaacttctcttcaaaatagtaaacactttcttctttatgttaaaacagaacaatgaaatttgaggagcttctgatgcaaagaagtgaggatcagcagcataggagacttgctcttgaagaagaggttaattatttcctgtcattttccattgggatttttttgtttaaaccaaaaacaaaaacaaagaacattcattctttgaattagtctctaagaatagcagaacaagtttgacatgaaaaaagaactagacataggcattaattgtgattactttacaggttaagacattgcaagcagaactagaaggagaggaaacactaagaaatgttttgcattatgccctcaatggacctttgctttcaaatccaagtttttccacttatctaccacctcaggtatatgtaactatatatctatctatatattatttgaagatggaaactgtctttaacagattgagaaattttgtatgatatcaaatgtagattcaggtgctactttccgagatagtaatggtggaggaagagatttatttgttggagagaaaagttgatgagataactatgcagctttaccaagagagagcacaaggcagtggattggatttaaggcatcaaaagagagtgtggcaacagaatcatttgttgtccgaagccaaaattgggtcagtgcttgatgacaaccgatcaagatcacacaactatgaagttttgagaaaagaaagagtgaatggggatagaagagcatcattgagttctgcatcagatactcggtcttcattttccaacagtaataaactccttgctcgtctataacagaacactttttctttgttttttttttattatgtttaagagattttttgtgtttgagcaggagaaattgctgaattaacaaggaaagatagtgggagaaggagaagaagggggaaagtagagaatgcaagttacattatgaaaccaaatgaactctcagaagagttgctcaagtgtctaataagcatttttgttgagttaaaccaaacatctgtggatagagaaggatcaccaattgttccaaaactaactctttcttgtatgaactcaaaagggttcataggaaagacctcattcaactgcaaaccacctgcatttcttttcaattacaactcctcattctctgacccttatggcatattgccagatttggatataagagatgtaggtccttacaagaactttattcaaatcacgagctcatctttagatgtcacacgcttttcggaatgtttgactggatttagaaaactgaggtttgtcttacaagtttctgaaagtagcaaattaagagaatttgaatatttgtctaaaactagttgtgttcttattcatttgtcttcaaaattcagggttttgatgcataaactgtgtggtgtagacctgaaattcttggcctacaaacagaagctagcgttttggatcaatgtttataatgcctgcataatgcatgtactgtaagacagaaacaataaaaaagcaacagagttagttgggttttaatagtaaagatagtaattaataactactttttctgtctttaaattttcaggcatttctagaacatgggctgcctacctcacaagaaaagcttctgcaactaatgaataaggtaatgttacttatattttcactctctatgaaacataatcatcatgctgactataatagttgtttcatttataaaacaggctacactaaatgtaggtggtataatattaaatgctttagccattgagcattttattctccggtatccttccaaatcaaaacatgtaagttttcaagtcatatattcctcctacttgactaaacaacaataatattcttttgactctttcaaagacaaaacttgtaaagaatttttcaaacttaatcagaagggccctgcttatgaaaaggaagtgttgttgcgaaatgcctatggcttggggtaccctgagcctaatgtgacatttgctctatgccgaggcacttggtcctcaccagctgtaagagtttatacaccagataacatagtgaacgaaatggagagagcaaaagtggagtatttggaagcttcagtaggaattacaagcaggaaaaagattattgtgccaaagcttcttgaatggtacatgtctgattttgcagatgatatggagtcgttattggaatggatttatagtcaattgccacgttgtgggtcgttgaaaagattgatgatggaatgtctgaatggagaaacaaagtctcccattaacaagatggttgaagttcaaccttatgagtctgagtttcgttatatgttaccatcttaataaccaaatatgatgattatatatttgttgtaacaaatgtcgattcgatgccttgtaattaaatcccaaaaatggaaagaattaatttaggagccaatgcaagtaagtgatgtgacgcataattctcaacattaaactaaattttttttctttttataattttttttaatatgacagctttcaatgtcattggagcaatttacacttggaaattattttattcgagaacaaaatctaaattagtctaaaggaatattagatacgtataggtatgtggctatagagtttcacattttgttaatatgtaaaaatataataccaatatttagaaatttttacactaaatatctaaattgacacttattttacatttataccgatgttcgataatttttacatttatataaggaaaattttcatatatatacgtaatttacaatctattaacgtaaatgacgttaattaatctaatgcactcctaataacgtgacacgtcatc

SEQ ID NO: 233346 - DNA, 869 bp, Cannabis indica
ttatacttatttttttaatttttgtccccttcttatattcttaaaaaatgtacttataaaatatatttaaatgttaagacaaaaaattttaaataaaaaattatattaaattttaaattttttggaaaaattatacataattaaaaaaaatgtaaaaataaagtaaaattaaaaaatataaaaataaaataaaactaactattaatattaaataaaagtaatgtgaattttttttttaaataagtattaaaagtgatttataaaaattaatttaacttaattatttttaatattaaggtgcacttataattttatgaagtacaaataaaattttgttaaaatttaattttatacattttatttttaaaataattatatgattgctagttcctttctcgaaaaggaaaagtaaaagaaaatattaagtgatagggttgttcattgaaattggaaaattacagtttaaattcagatcgcgacaatctgaactactgtagactgtaatcggggaaactgtttttagtagtctggctgatcgtttaccgcgtaatgattcgattgcggttcgtaataaatagttaacggttaaaccggaccggaccgtttataataaataattaatttatatttatatattatatatgactatatgtataattttaaacttttttgtgtgtcaagttttttattacatgaattttaaatttttatgttatgtttgacttttgagaatgtttttatattgttatttatatgttatagatctattacttatcatgttaaatatatattttgaaaaaataaaattaaaaatttagtaaaaaataatgaataattataaaattccacttaaatcgtggtttcgaacc

SEQ ID NO: 233347 - DNA, 2728 bp, Cannabis indica
gaaaacagaacatcttccaacgaaggacgaattcgatcaatcaagaacggtagcaacattagtctctgagcatctaacaaagaacaaaacataaccgaaactcgaacagcttcaactattgttgacaattccgaaatggactctataaatccattgaaacaatcaacataaacttttgtctcatcaaatgaccactcaataagctctgttgtataatccatagtttccccatttaacataacaaaacttgttgcacattgtgaaatcaaagaaaacacaacttttgcaagttgtgttatgtaaatttcgttacaaaaatagtttgaacacttcaaagtatggatttcattttcaatttgttgatgataatatctcaacatcaaatcattagcatgatgattctctcccaatctacatagccttaaaagtgccttgtggagttccaatacagtgattctcgggttttcggccaagagagacaattgcacactcaaagctactttcctctcagaaattatagagtcattttcaggattttgttgctctaattctataatttcaatggcttcatcaaactttctttctataattaaaatgtctaatgtttctgatatgttgtttatgtgatcttccaatggttcattagacacataataatctagttcaacttcaagtaaaggttctattacttctgagactaaaacctttgaacatgttacatctaatacttgtttaattaaccttttttgaatcgaaatattgtttttcagttcattcagctcagttcccaaatgctttgcttcttcaaatattctgtccatattatatattttggaaaaaattattatttaaggttttcaaatgggaaaaattatagagccaagatttttgttattattacctgatgaaaactgagtaatttgaaaaaatgtttttgttgaattcttcatctgaagccaattttaactccaatagttctgaacaaagatgtttaatcccctgaaatatgcaaatataacaaattgtaaataattgttcttattacatgctgaaatatatcatttattttaaaaaattacgatgatatttgttatagttacaatattattacggtaaaattaaaaaaaaaaaaaaatcgaatagcttacaatgttgaaaaataaatttaaatttttttcgatcataaatttaaactgtgtgattattatggtcgcataatgtaaattcaaagcagtatcatacttttccagtcatggaggcaagattgggttcatcatcaccgtcgtaatcgccgtcgcttgagatggaggagacatcggaatcggtggcggtggaatggtctctgaagcgaaatcgagaagaagaggtggaggtggttgctaattccatgaataattaattataggaaaacacaacaggatcaattaaaattttcccgagaaacaaacagaagcagaggaaaaataatatgtatgtaagtatgtatttaaggcctcgttttcatctcccatgcatataatttggaataataataataataataataataataacataggttgcatcgtataattaagtttatctagaaggaataatgaaccggccattggcaatggcaaccaagtcaatcgatcgccattattactattttcatagttattatctttcttcttcatcttcatatatatctggtccgacctcataaaccctatttggctttcttcttcttcttcttcttttctctctatgcatatggccatggcttttctctctctctctctcttttgtttttgctgtaaatattaattactggatttaatttcatcataattatattattaaattaaaataattaattaagtaaattttaatatttaatcattatatttaaattgggagaacagattcaactttaaaaaaatgatcagatttaaaatttgttgtacatattctttactagttgtatgtttttgctaagaaattttaataccaattatatggcattattatgttatcaatttggaatgaacaattttgtcattgcattacaaaaaaaaaaaaaatcagatttaataagagtttttttaattagactagtactcaatttttatttaaatttaaatttgggtttattttgatttctctttttcaactgagggttaatttcgtttttgaatgcatatctaagaattctaaaaaaatttgttactcaaagtaaaaaaaattctaaattaaatatctagtaagtaattaatattttaatataaactagctagataattcttcataaaacgtattattattattataatttaaagaaaaacttataatatatattggtatatattcttttttaaaaaaaaaaacaaattgtatcatgatttttttaaatattaatataaatagataatttttcataaaaacatattaatatttttttttacgtgacatactattattatttaaataaacatataataaatttacaaaaaaaaaaaaattaataataataatcgattttttttttctaaaataaatatttgatattctaataataatagatctttttagaaaatatttcgaattcaaataaagttttaaattttttctctatatatacaacactacatacacactccaaatcattgagcttcaaacttttttttttatttatattccttatatagtaatcacaaagctactgctcgaagtattcaagttactagta

SEQ ID NO: 233348 - DNA, 644 bp, Cannabis indica
atataaaatcttatgtatgtatcaagctaaatataatatgctgagaccaaatctttcatactcgaactttattttttagtttgaagtataaatatatcatttaatttgtatttacacatgactctcatggagaaaaagctaattagataactaaactagctatatataaataataacttataataatgtgtttattattaaaacatgagaggatcaatgtcctaagaaataatttaatttaagtacaaatggacaagaaaggcttcagaattaatgaagattattaattattaggctacgcaagaagtatattgttaaaaggatcagtcactaaggttgagagtgtacaaagagcacaatttaaattacactatcacaattaagctttagacttttttaagcaactttaaacagtatctaatttattaaaatgaaactaattgattgaaatttatatttaaaaaagtttgtaaaattttattataaatcatgtaacttacttcgtttttgatacttaaatgtgtttttttttttttcaaaagaaaaatctatttcacacaaaaatactttttttttttatatatataattgaattttcaaatatctttaacagtataatagcatgtggacctagaacattattg

SEQ ID NO: 233349 - DNA, 1391 bp, Cannabis indica
aaaaataaaaaccttagtcgagtgatcttgtttatgttttcaaatcatcaaagtatgatgatcgtgagttggtagcgcaaatctcttcaaaatccccaacaacttaatatttcatcgcaagggtaactccaaacccacccaaggcaagcaacgaacatcaacaataataaacataaagaaaaacggcatgcatgagagcagagattaaaacactagtacaaaaactcaaaataaaatcaataatcaaaccctaaataacggcccctagatacaataacaagtagttgtcaattcaaaaacaatgacagaacacaatcagagatggttaataaggataatcctaaaaagtacacacaactcatatgaaatttctcatatacaagtttggggatataaatggatactagaaagcccaaggtacaaacacacgcatacacacgaagtaatccacaacaatttttttaactttcccaaccatacaaatttttactaaaatcattatataatatgtcacacataacaaactgctttacttaatatattttaaaaatgttagaaaataacaaaaccatttcactatctccctggatagttcaaacaaatttttatttatttatgtattttttgaaaaggatgaaacaaaattattaattttaccaattccagtaaactaatagtttttttgcttcccagaacaaaaacaaacccaatacacacctaaatagaaaacagcatcaagtatcacaatcttctttttcttcttcttttttttagaaacactaactagtacaatcttcacaaacatctctacagcaatagacaattctctcataactctgaatcttaaaaaataaaccttgctcgtaagaataaataacaaggatgtcaatccgaacgaaattcatatgttattatttatttatgtcttttgggcagcaaaatcaccatgttagttgatatcacattttaatgcataggatttacaaataacccaaaaattagtgaaatccctaaaatcgccatcatcaatacttccacctaatccttctattgcctcagattgaacacataaattaaaatccatataaattaacataatcaaattaagctccataaattaatatcaactcttaccaaataagcctatttgtaggtgtgactgagggaggagttgtgcattgtcgtctgtgaccgagggaggacctacgccatcgtcgactcgtctgggagtgagggaggtaacaaaatgacaacgagagaaagaggagaaacgaattgagagagaaagaaaaaatctggaatggaaaaataatcatatacaaaataatcacattttcaaatagaaaaacaacaaaaatagaaaaatgatctggaatggaaaaaaaaaaaaa

SEQ ID NO: 233350 - DNA, 822 bp, Cannabis indica
attattactgccaaaaattaactataagtatatatttacaatcgaaagttaaacttaattatttatatcgcaaattactcattataatattatcattatgtgtttttttttttaaaatatacttaatttatttatttattgtcaatttgcttatgaaaatgctatttgtattattgtaaaaaatatccttttacaataggggaaggttttatttataggcaagttctactcatggaccaaattagcaaagaattatatagttagttaaatttgtttaaccttttaatgagataatttacaattgattaataagattaatcttaatgttcggcctaattacaaaggtttaattgggatggtatgtgaaattaatgtgacttgttctttgttgatgttacaaatgcaaggcgcagaaacaagccaccatttttgttattggaaaggaatatgtcaaagtagtgagtgtgcgtatccccatgcttattttaatttcgtaaatgttgcacattttgtaaagagaaatgctaaaaagtaccagtggtgtcaagcaccctcttacatgtcaatatcgctattggtctaatttagtatcgggtcccatatagtttaatataataatttttaaggagtatcactagccaatcgcaaggcaacacttcttaagggtgttaggcaccactgatgaccaataacaatactcttttataaaagtctcatctttacttaatttacaggaaggacatgctatagtatccttccaatttaagcaagtgtatcaagcacgtttcacgtcgacgtgttgagtaaacatccggagccaac

SEQ ID NO: 233351 - DNA, 2101 bp, Cannabis indica
attcatcgaaattggcattgtcgttagaataatcactgaaaaaatcaccaagaaattggtttcttcatcaagaaaccaattaatttcttggtgatttttccggcgactatgccaattccaacgactttttcaaacttttttgtcggtgtcgaaaagtcgccagagtagttgccgatctcggaaaagtcgtcggaaaaatcaccaagaaagtggtttcttcatcaagaaactagtttcttagtgatttttctggttattttttggcgacattgccaattccaacgacttttttggcgtcggcagtaactctggcaatttttctgcatcgacagctactccggcgatttttccgatgtcggcagcaaactccggtgacttttttggtcatcagtgacaaataaaactgtctaaacaaataaaaatattaaatataggatttgaaaacctaatttacatatatatgacatatcaaataacataaaaatacctaaaaacaaaaaataccatataaattggtcaaatctcatagtgaatgtgatttcctcttatagattgtttgaacactactttcgataatttatattgttaacgcagattttcgttaaccaaaattagagcttaacagtgataattttacacagaaaaataaaagcaataaaataaaaaagtatgaaactcaagacatttttaatgtggttttgcagttaaaattcttcatagtccacgagtcaatcttattagatttctgatagtttttttcagggccacttttcttatgattttttcgtcccacttttttgatctcacttgcctctatttataatcacatagtagccggttaattatagaattgacggatgtttttacaacgattatcccctgaaatcataggatctgattacatatcgcattaagtaaatgcggttatttcttgaatttcacacaactgtgaatatctcacttttactgggtcaaaatgaacgtgttaaatatgttgtaaaccatatcgtaatggaatgtctcgctgggaatagagtagagtcaatctttatagcgagctggagtttttcgtatttcttactaaggttgataatgcaaatcccgtcgcctttactctgaatctgacaaccgcagtttatgatggcgagatgatctttttcacgtgcatgtcttcctatggcgatgtggacaccttgctatcacttgctttggctcacccgtctattatacttagtttgctaagtgttttcattgtcattatatctcctccacgtaacgaggttagtgcctcgttttgtacacctgaagttacaaggttttttattgaggcacaaggcaacattttgtatatttttgtctcgaataagactatttagtcagacgagttgtaaatatactctgttaattatgcctttaacgagttattctatctcaagtgtaattatgattacgtgtctaagttcttattcttcccagcttaacacgtgtcttcctctgatgtgctagtcgaatttcaggtaacaattgccccttaaaaagttattttttaataaaaagtgctttttaatgattataaagggtatttttgtcatgatcccttttgaaaaaacgcatgtcctctgatttgggcagttgtgcggttggtacatcagcattaaatgacaatcttttccacttctacttttaattttgtctgtaggatcaaacattttcatgatccaacaaaatcgatatcaatagtataaagtaagaaataagaaccacctttgcattatttcctccattttagaaagtctgagaaattcttatgcttcttcgccaagaatcaacatcgagtttgttcgagaatttgtatgccctccctgtccttgacattttttatgcgagtttcctccaattttatcttctcaaagcgatccttgctacattcaaagatttgcagaacgaacaaccattcattgccccaaaccctaactgcaaacagtaagttgctttcctcctttacatgcttattacattgtatttaactactgcttaatttgtttgtatcgttaccatctcatttggttttagtagtttttagggttgaactgtatttggg

SEQ ID NO: 233352 - DNA, 1016 bp, Cannabis indica
ataatcgtgtacgttgtagttattagattatgtgttaattaattaaaaaatctcatttctaaaataaatttgatagaactcaaatgtaacttttgtaaaataataagaattttgcagcaaattatttttctgtatgtaatatatttctccaaaaaaaataaacttctaaaagataggtcagctaatgtttggcgttagagacatttacaactcgttctttgcttagccaaattacatcccacaacttaagtcgataacaataatgttcaatattaccataagataaccacttgaggctagcctcaagtggtcataggagggtgcgtgtgtgttggaggtcctcggttcgagtctcatgttatacatgattgtaatatatgaacgtttaaatcaaaaaaaaaaaatatattaccataagataacactttacaagccgttaacgattttttataataattatcaaattaaaatatattaaacataatattaaaacaaggaaaagactatgtaagattaatgtcataccaaatgatgattgtttgctatgcagaaatgacaaagagaaattggaccatctttttttctgctgcaatattgtagcaggttgttggcagcagctcaaagaatggctgcaatggcaaatctgctcaagtacacttcaacaaatagtgagatggctgcaacgacacaaagcaaacaacttcaagacgagagtgtatgctgctgttgtggcagttttagcatacaatatttggcaagcccgaaatggagttttttgggaaggaaatagtgtgcaaactgctcaaatagtaagtaaaacaaaaatatacatcttgtatagaattaaaagtgtttggcctaagaaagttagtgccaaaaacaggtcatggtttgaaaagttggaaagaaacacacataaccatatttgttgatgtatagattattttcaagtctcgattgagatactattaagctgtaaatggatgtttggagtaatgataatctcgctgattcat

SEQ ID NO: 233353 - DNA, 800 bp, Cannabis indica
ccaaaatgatagagctcgttcctatctttttaaaatatgttaaatcatctcatttggagtctgaacgcgaaagttatgcatgatttactgagcaaggtcgaagcagtaaaaaagcgacgaaaaatggcatgtggcgctatagcgccgattctagaaaatatgatttttgcactgaaatgaagccttgaggaaatccggatggcgctatagcgccgtacgtgtatttttaaatttaaattctaattctaaatggattctttctatctttttgggactatataaagaatgatgtaattcgacttttgggacgactggggagaaaaaaacaagcaactttgagattataaaacacattgaagacatggagagaagagatttcaaacaatcatcatcaactatcatcattagagtcattttcttcttcttcttctttattcttttgtttaattatttaattatgaacatgcttattgtggttattatgtttgtgattatgaactaaaaactttttctaaagtgttgatgaaactatcttaaagtatgaattaagttttagattattctcatatttgttcttgctatttgcttgtccaattttgtgttaattatcatcttgttaatgttttatcaccattaattagtatagagattttaggttttacatttgagagaggtaatctaaaattagacttagaattgcatgacataagaaaagtgtgagattgagagattccactaattttataagtttcatttatagagaatcatattgttttattattgcttaattgattaacatt

SEQ ID NO: 233354 - DNA, 1055 bp, Cannabis indica
ggttctaattactgagtctaacctaattatgccttgaacgcataattctttactcaacatatatagcatggcataatatttaaaatcatttatcactagggcaataaccgtaggccttataaccgctcactttagggttatgaccctaatcccagttcacatttaatcaccattataatatcaaacatgagtgccaccacgcataactctacatgctaactactatcttacccgatgtcccatatacgtggagattccaaatccctaggtgctcctgaccaagtgccagtaatcctagtcataatttctgagattcacaaatagggtaatccctaaatccacttccacataattaaaaaattggcattcaaatttagataaacatatagagctcgaaacgagctttgtaacgatattcaaaacgcccaaatcgaagtccggatcacaaagttatgaacaatcgaatatggcattcgactctgcccagaagcacaaggcgggttgcagcactccccaagtgggtcgcggcacctgggttgaaaaacccaagattttctaagggtgggtcgcggcgctcattgagttgggccgcggcgcctaggttccaaacccagaaattccattttcagtaacacgaaatcatgccaaattcacaccaaattcaacctaaacatgcttacacttcaaattcatttttcacagattacaactatcataacagagaattaaaacacataaatcaagctcttctcaacacctatatatgcattttaaggtcaaatcaacaacaatccagaataagctctaaagttgagctaaaattcaacataatttctattcaaaatcttgaacctcaaaactaaactctcatgcttgaatacaaccatatacagaaccaataatccaaattcaagtacaatcacaacccaagaatcacatttacaacataccaagagcaatccacaccaatttaatttacaatcatgcatacacatacaccattcaacaacttctcactcacatgcatccaaaagcattcatcaaacataacatgc

SEQ ID NO: 233355 - DNA, 1486 bp, Cannabis indica
ttttaactgtcactaacttaaaatggaagagagacgaaaaaaaaattgaaagtatgaagttgtaacaataaatttcatgaaaaaatagtgtagtaatacaaaaagataaatcatgttgtcaaagctaagtaaaaataagaaatttcataatacaaaaatatgttgaggagttgatattttttggcatattggaattaggttaatattgtgttatttttctcttgttttgtatttttttttattttatagttggtttcatgttgtttcttaagttgttttagagttgttttttttagtctatcttagttgttttaaagttattttttttttagtaaaaaaatataaaaataaacaaaaaaaaaagggtattttagtgagattcccatataatattgactttttggcctggtaggtttggcccaattaagaggtaaccttcattcgtacaatatattattacttgaggttgacaggtggccatgcatgaccaatcatgtattgtactgaccagaggagtgggacgttggacaaaaggtagttaccttttgtgttgtgcttatttcacaagcttgtcccttaattttttgggattttgtatcagccctaggaggttgacttccacgacatcctttggactacccgtccagagtgcccatggggcatctgtttatgtcttatcgaacacattgtaatttggtcgaatcagctctttaggtttgtcggtccgggttttccttcagtcaagtcttaaccgaatttgtactatctgttatgtggccgtaccgttatccattttggccctgccttaaaattgacatggggtcattgagcgtacatgtacgcgtcacttgttcggaaatgcgaataatatatagaaatatcaaactattcaatttcaatcaaaaaaattaattaagaaagaaatatttgagttttcatacttaatttagctacttaatccaatatatatctcttttaacactacatcaaaaaatatatattttatgttatcctaatttttgcactatcacgtggcaccagactggatggcacgtgtcttatattcctcaacttgggcggatagttttactcctagtagcccgtaaaaataaatatgaagatccaagttagacgtacatagcaggatgtccaagcaaagtcattggtggacatctgaccagctcgatcgcttgatcaactcgcatgcaccaaccagtaaatgtgggttgacaattccaatagtgatcgacgttatctccaaacttgcatgtcacgaagcaatcctaatttttgtaggattaattcgtaccttcaaagaataaagacaattagcttggatttgctcaatttcttcttgtaattatggaaagggatattggcggctaaaccacctgaactttacggtttgtaacacttaaccacaaaaactgaatttttggcggctaaactacctaaaccctggttccgttttgctctgcacacctcc

SEQ ID NO: 233356 - DNA, 1202 bp, Cannabis indica
tgacttgatagagaattgaaatattttacatcacttagtctatttttgggttctaaaaaagctggtcactagttcttaaagatgttactgttctacgaaaatgtgagactcaaaactacccagttttcaagtaaatcaccttgtgagaaatgtgaaaatatgaagttgtgaatttgactattcttacttcatggatctcagttattgttgaaaactagacaaatggtcgagaccgtgtcaaatcaaataagcataatccaggacaccaggacatttgtcagcctgggccctaggtgttcatttcgaagcttttgagatatcctcttggaacttccaaggttcttgagcttgaggatgatgtctcctacctcgtttttgaccaagacatttgtcagagaagcataatccagcaaaccaggacatttgttagcctgggccctaggtgttcatttcgaagctttcaagatatcctcttggaacttccaagattcttgagcttgaggatgaggtctcttacctcgtttttgaccatttcagagacaatgcacaaagcaaaattgacatttgaatgatcgaaactagtgcaccaggttgattattaacttgggcgctaggcctaacactaggtcaacctaggcactgtgcttagtttcgtagcccctagaattgtggttttctccctgaatttgcttatatctttgttatttctgatgacgattaaaaaaaaaatactcggataactttttttgggaaactagttggaaatagcccaggttgacaatatgtcaacctggggttgggcccagtgccatgtgtcaacctgggtgctgggtccagttttaggccacctggaagttctgtttggtcctcaaaatagttaactcttaatctttgctgaaaatagtgaatatgctcggaagacttctcaaaaactcctcgaaattggcctagttgtcaacctgggcgctgggccttgttctggcaccgaggatgggttatttatttcccaaaagcacttgttttctcatttttatgaagatggagaagatgcacgagtcaagcttttgatttgatgcttggaagtgttgggttttgtgccctaaaataaaacccaattcaatataatcaaatttactagttaataaagattagaaataacattttatattgcatggttcacatgatttatttcatgattaagt

SEQ ID NO: 233357 - DNA, 934 bp, Cannabis indica
tttttctcttctaacttcgaaatcctgtagtctgctttatattgaaattcgagccttagtgattgagtgcatgcccacccatagccagtcagtcctcaatcatagtgtgtaagactatgaagaatccaaacgactgaaggagtgtcgggctcagatcttgattatactctacgacaaaaaggaacaagggttagagatctaagtggaaggagttatttaattccattgcaaccaatgtaaggtttctcatactttatatgtgcttaagatttattgttttagaaattcatatttaggttgttaaaaaaatacttgttattagatctatgtcctggtaaaatatattccaacaactagcctcagaaccatggtaatgatttactttcaagaaatatgaatttaaaacgatgtatgtatgatttggatttgaatcatattaatctatgtgtttattgatgattatttgatgtttacaaaaattttacgtaaaataattagaatttcgttctaggattatttttcttggataattaggaaaatattaagcaattcacttttttacagaacttaattttaattttatttgaattagttataaaattttgaaaattgggaaaaaatcaagaggtgtgacaccccatccacgcgcggataccctttttcactcggggtgcacgtggtttggacagcaagttgtccgtgccccccgggaatttttttgtctaaacagggggccatgcgcgcgtaaagaggctgcgggttttctcggtcaggtgtaccatcccacgagcggggatggtatggtgcataccatccgcaccaaatgtaatttttcaatttttcttgattttttcaaggaattaatttcgaatttttttgtataatctgcatttagatttttattttttaaatctcaaatctaattatgagagta

SEQ ID NO: 233358 - DNA, 1703 bp, Cannabis indica
gtttaattaagtatatgttgcaataaattggcatgattcttttcatctcaattagtatctcaaatttagttagttttttttttctctttctaaagcaactttttttccattaaagtatgcatgtagatgacgattttaatataagttttttatttgggtaacgtaggctggcattctagcatccctcttcatttgtaacatccaatctctaattagttagattaatatagaaaaatagattaatggaatgtcaactcctagtatttagcatttctcctgttttatatatccattaaaaaaaaagtaaacaaacatacatagaagacttagtagtgggtatcagatctattcacgttactgttattggaaatgtattagcatgtaatttgtatggacttaaagaatttgattatttctaaaaaaatgaatttgaatctttttttttttgataaaaggcgtttatatcatagatgcataattagttagacctcgcggtcattacaaaacagggtttccgggacagagtcaaccggaagaggcccaaaggtctgatgggagaacgcccacctagccacattatgagcggcaaaattacaagatctactaataaaggaaaaacaacaactactaaaagagtgggatgacttagaacaaaaggagatgtaattatcaattgcccaacgagactctttcccattgatggcgttgataaccacactcgagtcactctccactattacatacttgtagccaagatccagagcaactgacaccgccaaggagcaggccgccgcttcaccacacaaagcgtccgagaaattctctcgagcagtatgaacacaaattactctgctaagatggtcccttgccacaaccgctatgcacatgctgtccaaacccaccttgacatcacaattcagcttaatccaatcctgaggaggaggggaccaagtttcctttaaagctgggggagggctatggagcaaggaatcatacatatcagagaattggcgtttactttaagctcggtcagaaaaacaaaatccggtgagcgcgaccagagcagggacttcagttcccgaactgtagaggtctgccctaaccctctacagttccaggttaagcctctcatggctcctgtggaggagattcatcattctcctccacaggggtatgagagtaagcagacccacttgacacagcatcatcgatcataaacgaaccaaccagagggttcttcaagataccagaccggctcggggaattgcagctatcctcagaaggatcctcaacgacaatatcagcatcattttcatcacgcttcgggtcccagggaaaatcacgcacaacaccgggatacttgcggtgaattttatgaggcctagagcaaagagaagccgaggattcaaattttctttttttgaaaggagtcgtcctctcattgacttccgaagaaaccggaactccaatatcacctccgatcctcctaatttcataaaggtcaagcttcccaaaatgtctaagatcatgcatcaaatcctcttgagccttgaaaaattgagccaaagccacctcctcatttgggggaaccattgactcacggttagaactagcaaagtgagaagagagtccatcccgagcaatgaccacttggtcttcaagagtcggcccaaacggggttaattaattattacaagctgtct

SEQ ID NO: 233359 - DNA, 1282 bp, Cannabis indica
aatctaatgcaacttgtgttattaataatgattaaaatacaatcatcacaaaaaaaagaggtattttatcagcgtaattttgcgatggcaaaagtttactaaaagcatcgacaaacttttgccgatgagtaatttttccagcaaaagttgccaacgataattggtcggaaaaatcctttttgtcgacgaacaatgatatttcgcttgtgaaagtcacatgaatttgccagtaaaacactggttgccgacattgacttgacgactaagcctcaacaagaaagttttgttggcaagaaaagtcagcggcaaaaccctttcccgcatattatcttattcacaagaaagttttgtcggcatatgtaatttcgcatgtaaaacattttttttcataaattatttaaaataattttaccgacgctatataatgtgccagcaacataatttttttatattttcttttattaaatttatttaattaaatgaaatataaatgtaatgtgaatttaaatttaaattaaaaataaaaataaaatttcataaataataatacactaacataatctcgaccgcatattataattatactaaattcaagtaaacattatataaataattaaaaaatggttgtcatagtttatagaatatactaaaatttacactaaaaatactaaaataacactacaaatcaactacatcatcatcatcatcatcatcattttggatgcaaggggagacctatgatgaatatccagtgacaagaggacgtattggtggactcagaggcatcttgtgcatgttgaaggcaggaacgatgtcagacaaatacttgaactgctcttggaacgtatttaggtactgattttgagtctgtatcatttgttgatgataatattacgttcttcttgctcttccacccttcacttcaatgcctcatatttcttgacgctaacactaaccttcccagagggaccttctctgggagtctccccattaacacctaccctaagtctaggcaaagagccaatgcctctcaggtggcgcgatcgctcacaaagcacatgtgtcatatgatgagtactgagcgtaggtacgggctcacctaattaggtgatgcgatttttcataggtacgggcgtcagtggttataatgagtaccgagcgtagatagaggctcacctatttaggtgatgcaattcacttggcgacgtgtagatacaacatcagtgatatgaaaattgctaggttatagcatagaatgaaaccgttgtaggatttcctcctg

SEQ ID NO: 233360 - DNA, 742 bp, Cannabis indica
aaacccaacaagaatgtcttaagagttaagtataaataagtgagacacaaaaatttataatagttcactccctgtatcgtaataatattagagctacgtctacttcgagttttatttctcatgagatggattgtacaaaaatagctaagtcttgaaactctaattccttgagagagaaactagagagagatgctctaaccttatgggtacttttttgaacttaaaaaatgagcttgtggagctctccttttataaggaaggaggtcctattaaaataataataaaatattccagaaaatatggaaatatacatttaggctatttttgaccgttgataatgatctaatggtaaaatttactttggaggtctgttgtcaatttttggagcttgagttgcatccgcgagacccacttcaggtaagttgtagcttaaatttgtaactctcttgaggaagaaatttggagttgataactttaaaattgtgattggagtgtgagacaagactaatagagcattgaaatatcttcgaaaagcaagttgaattgcatcaatcgggtcaatattgagtgacttatggtcattttactgaaggttgttctactcccaacgcccaagttgacatccaacgcctaggttgacaagtgatgtcaacctggacgctgggctaggggaaaatagtgtgtgggaggtgcttactgaagcctaagtgatgtttttgttggaagttattttaccaggatc

SEQ ID NO: 233361 - DNA, 703 bp, Cannabis indica
atataattactgaaatgagatctcaatcatttatatctatcgacccaatctcaaagaaaattatcgtttcatttctaaatacttatagaaactatagattattaatttaattgaaccaaaggttctttacaaaattaaaataagattataacttatctaaatatgtacctgaaattctaaaagtatctctagattataattaaaacaagacactgtagaacactctttcactataaaacttcggttatctttttaataacacgtaccaaacattttaataatgaatatattatattgttctaatctataaacatgtaaaataaaattattcagtaagctaaaataatattatttcattctccattgaaataagaaacacaatttattttattacatatatcttatgattgtctacatagcagtactgtagatgctcttacattggagcatacacagtacatacaaacaaactatttttatatatataatcaatgtatgtatattataaggactaattaataagagaaaaagatctatttaagatcattaatgacgatgcggtggaagaggtgggatgctttgttcatttctaaaaagattattgaaatcaaccagggttttcacttttactagcctgtcaaaatttttaccaaagatttctcaccccaaatacatgcttctgtgtaattattttgactcttgg

SEQ ID NO: 233362 - DNA, 757 bp, Cannabis indica
taataagggtattttgggtaaagtgggaagtttatagaattgttttgacaaataattaagagggtttcttttgaaatagggatttttttcaagtatattaaatgaaatttccctttaaaaacccgcatgtctcatcgtatgatggaaccaccgatccggtcttgcatttgaacaacttcaacacaataatgcgagctagtaatgtgacaaacaatttacattgtattttgtttcccaccttgttagctggagcaacaagcagctggttcaacaagtttactcaccattccataacttcatgggaacagttgtccaaacagttccaggcttcaaggggtagacgacccgaggtagcctcgctaaccaatataaagcaacaacccggcgaaacacttaaggcatacttaagtcgttttggtacgattgttgcaagggttagaaatctggatgctaatacacaacttacagcccttcaggcagggatttctactgatccatcaactgctgggggcaaactgtgggacgacttacagggtcgtccagtaaagaacatcactgagttcaatgaaagggctcaggtgttcgtccgaaaagaggaagcttgaaaagagatgaatctattgaaaacaggctcgggaggcaaacccagcaatgtttcaacaagttctgtctctactagagttgataactcaggggcctctagctcaaaaagaaaagaaaattttaaggaatcgtcaacggataaaaagaaatagaa

SEQ ID NO: 233363 - DNA, 1598 bp, Cannabis indica
attagggaacacttcaacgagatttgacatagtagatggagtttctaaccataatcttttacatgagaaagaatttcccaaatagtttgataagaaggtaattattgccctacaaactttgaacacaatctttctaaattttcaaattgatgtttgcatattttactatatgcagatatatgagctaaatcgtctcgggtctttagagcatggtaatgaactgctagctctagcatatgggtctgatcttgtggtttcctcttatccagcgtgtatcatgaacggggttcaatttgttacactcgaaagagatgaaaaacgcttaactcaaaatagcagtttgtctgttaaagggacataaggttttgactattacggtgaacttttagaattttacttcagtcttttagtggtgcttattcagttgtattgtttaaagcataatagttcaacacagatcccaaaaggaagaaaataattaccaaaaaataacatcactagcataaatgtgagtagtgtatggtacaagataagccatatattttggctattgttgatgatttggttagaggtcaaaattggaaggttgtccaagatgtaaatcatcgccaactttgggacaaggttgcagatgccaccgatgacatcgatgatgttgacattgatattgtacatgatgcagactcatcaaatttttcattatttgtggatttaggagtgttgaatgtccaacaaactaatcatcccccaacaattattgatgtccctcaaagtttacctacagttgtaaatgatgatgatgttgatgatgaagatgaagatgaagaaatcttagatgcagaggatgacatacttgttgataatgcttttgatgattcaaatgatgtgtccccacccccacaaatagactcaaatttgattagtgatgatgatagtgactattgtatttagtaaatttgaaattaaattgtattttgaatatttattttaccaatagattgtgtattgtttaaatataatttttattatatttatggtttacttgttaataaaatagtgtattttttagtataatgtcggcagatgttgctagataccatggaggtgatggtgggggtgaggacccaccagatcctactaggatcccctccgagtgtggtggtggtggcggcggtaagttttcttcagatgcttctgaagatgaaaatgagatttttgatgtttcggcgaagaggaaatgtggttgtaatgtcctgaataaattagaggaccggaagaaaaaaatcttcagtgccactacctcttttgtgtgatgtccgtgctggtaaaatcgttggagttgagagtggcagtttttctcatatgattaggatagagattagaatccatgtcccaggacattacggtagttgggagaaagtcccaagaatgtttcatgatgcagtcttcaacagagttcgagtaaaaaattatattgaatttttaagtttttttactcacgattattatgttactaaattagttttaatttccagtattattattgttggaattatttcaccaggatctagatttactaccaagtatgtttgattaac

SEQ ID NO: 233364 - DNA, 636 bp, Cannabis indica
taacatctgtaccaacacgcatattacgcattataagaaagtcatagcaactcataatcaacaacttcattctcataataggcaggtcttcactcaatacgtaatcacataactaattaattgatttataagacaatcatattgtaatgcttcataaagcatccttaccactcgttatccacaagctgcgtatgtcactactactgcctaataaagaaaccgataaataagaaatctatttgcgatttcaaggagtaattactcatttcattacggggctgcgtgtgtcttttcctcgatcataatcgagtcataaatgataataatcattacctcgatcataatcgagtcataaacaataataagttttccacatcactacctcgatcattcactaaaatatcctagtctaggctctggaaaacaccccgaacaaaaccagtttcgaggctaaaaaccagagtttttcccctgttggcaaaaccggttaaccggtttcacatcacctgaaaaactagttaaccggtttctcaaatgatagaatcgggaactctggtttttcacaccaaaaccaccaaatctctccaaatctgctcaaacttctcagaacagttatataccacaaaaatagtatat

SEQ ID NO: 233365 - DNA, 1771 bp, Cannabis indica
tgttgaaggagttaaagagcctaaaccatatataatcatagtgaacgcgacacaagaaaatgcagtgttttgacgtgtcagtgtatctggtctttagatattggttagaatcatgcgtgacacacctattgtagctaggggccccttcttatacacacactatgtgatgtcctatttatttttttgaagcgggagcaattatttttttttttggtagccgtcatcttaggatattatctgatgttactggtttccagagaaaaaaaaggaagaaagaagaaagtataaacatgtagactaggatcagaaatttgtaaatcaagttgtattttttgtgtttttggaaaaagagacagaggtcacttgtctaaattttagctattcataaacataactaaaactcagataaagtaacaagtaaataaatgcacacattagcaagaattacagctgcctatgatttcttaagtataagactccattcactggtcaaatcttgaaaagaaaattcttggccgaatgttgtaaatcaagctgtattgaaaaactattatgattgagacttgtcgcagctttctaagataaaatgcttaaaaatttacaaatttctcagacctgaaatttgtttcaattacttttgaaaattgctgcaggaagaggaagaagcagttcatatacttgctagaagtgatccaaaggagattctgttgtattaccaacaattctatgaaaggaatattaaagaaggagaatatactaaaaaaccgtgaggcttgcttttttagtcaatacacatccggatctagctgtgggtttatcactattttttataaaataattttgctgttctttttcaacattttaagggaggagatggccaagatttgtcagattgctacagtactctatgaggtgctgaagacagtggtacctccacatcagatagatgcccaggttatgatatttcattggtcttggttttgtaggttcacatcttaaaacagtttttgtgaaaggcactcaggaaatatatgattaactatttatgaacttccgtttcatcacagacaaaaaaaatttccgaggatgttgatagcaagcgggatcagtatgcacattataacattctcccattgtatgctgttggggttaaaccagccattatggaacttccagaggtaatgtaaccactgttgtaagtttgatttttctggatagttctaaaagaaaaattctcttagttactgtaattttcattttcaccggaaattgtatagatcaaagcagctcttcgggctctaagtaatgtggggagtcttccaaagcctagaattcaacgtacacctactggacctgatgacaatgttcctacagagagggttcagcctgttaatgatatacttgactggctttctgctatattcgggtttcaggcaagctgttcaatgaatgctttaagtttgattttcatcatcccttaaatgttaaatgcctcttatttatgctcctgtcataccatgctgtggtaactgcctaacactaaatgtcactcgctggaagctcttgaagatggagaattctactttttgttgccatcttctctttcccgtttaagctcattctttcctgtggtttgacactataaattggactagaatggatagaaatagaaaccacaaaatccatatatatgctttttgtttcttatgttttccttgtgattgagttgccatcaaatgttcaatattttgatttttaaggtttttttttt

SEQ ID NO: 233366 - DNA, 623 bp, Cannabis indica
tttattttatttttatttgtaatttgtattaattctagggaagtactacacataaaatagagtaggtttttttggaccgattcatggtgaaagtggccaacagccgaacacaaatatgaatttttaacaatgtgaaaagtgataaaatattactaattatggagaattagttacgtagtgacaaatggccgtcatgagtcatggactctatgtccattaatccctcattaagcctaggataaaacaactaataaaaagaataaatttattctcatcaggttaaagcataattgctttatccgagtgctctaacctatcactttgatttgactactcaatgaattaaataagctagttaggactagtttggtacgccgtaatgtatattatactatattgtgttggattgtcttgtattgtattagtattatttaatacaatacaatgtttagtattgacttgtgctaattgattgtgtaaagttattatatatttttaatacactcgatcccaaaaccaactacgggtctgggttcggatggggtcccgagtccgcggttcgggttcggattcgggaccccgggtccaagtccgggtccggagtctgggtcgtcgggtccgaa

SEQ ID NO: 233367 - DNA, 1455 bp, Cannabis indica
gtgagaatgaagtagatgatagcataatcttgagcttgaaggctatgtagtatgatctcgcatgggaaaggtgtagacagctccaagcagaggatgttgttgttaagggtaaggtaagtaagtgctataattttaggcaagttggttagtttattataggtatcaacaatgtcattcttggtgttataaagagttgataatgtaaacaatgctaaagaagtgatcataggattgttttattgtactgttttttaattcagaaatgttgttgaaaataatgtactcagctgaaccaatggaagattaggtagaagtttcactatactctttttagtttttctaataatatttcatatattaagactttttttaatacttttttcttctattttaagatcgcacattcactttaatttatgttacataatatttgctttaaaatctgtaaaacttatgacttgttcctccaaattttctataagtaaatattaagtattatttagttatgacttatatatacccaaatttatttgaataaccaattataatagcacaaatattactttaataaaacgaatcattcgtatgatcatactttcacgtacaatctaaataagaaaaaaataaaaaaacataaactttacctaaaactaatatttacgtgcctcagcacgtaactcctacctagtatatatatatatatagataattttacattcatataatcttgaacatatatatactttcatattcacatttatatatttatatatatattatatatacatattcatatatgcatatatatatatattttttttatatatatgtttatatattatactcattcatttattgatttcattccatatattgattataatttattataatttattgtatatatttatgatatttttatatggtttaatatgtgtatacaagtatatatacatgaaagttttatttttaggtcagttgctcgtatttgcatctttacattcataagacaatgtagatagattttgtgcatcaaaacaattttgaacactataaaacttgattttttttttctttctaaaaatacacgtttggactccaatttttttttgtgaatttaaagtttcattttgatgtgttttcgatgcatgcaattcatatgaatgtcttaatttttgtatttaaatttatttagaatttatttgggttgttttggtcatcggaattgaaaattctaatcaggtttcagatcgggtccactgtgaccccctgtagaaaaacgagtcaaagtgacccggttggaggttgaaggtggatccatctaaattttttttatgtattaattacaatgataaaattgtttatttcattattttaaaaaaattcatatttaggatgttagattataaaactataatcaaatatacatattaataaatttagatcctggtaaaa

SEQ ID NO: 233368 - DNA, 580 bp, Cannabis indica
catctctcctccaaccactcccttaccattcttagaatcgcctacatgtttctctgcaacccaagacaaactaccacccttgccagaaatgcaagaggtataggtcgagcgtgtagtaagccacagtccgaacagaggatagggactgcctttgtcgttgatcaccgtaaccggagacgcaaggctacactcacggggttggtgacccaacatcccacacaagtaacaaaatatatccagcttctcatatttgagttgtatccacttattctcaccatttgtagttttgaagaaacaaccactacagaggggcctgttagcgtccaactcaacttgagcccgaatccattgtttccaagtgagaggcttggcttcatcaagattaatgaataaaactctacccgccaaggctcccaaaacattagcattaagtctcgagtagtaatcttgaggcagaaagtggatttggacccaaaagcggatcgagttaaaggacaattccttgactctgaacccagtcgaccacgatagaagcaccagcatatcgcctttgacgcaccaggaccttgctccaaaaccc

SEQ ID NO: 233369 - DNA, 1407 bp, Cannabis indica
ttgacgtcatatgtcaacttgagcgttgggatgccaacctggatgctagatgtcaacttggatgcttgatgtcaaccttggcactgggtatcagccaaggcgttgggtgtcaactagggcactgggtcatgactcactcactcaatattgatctgattcacgcgaataaactttaattttgaagctaattcaacgctctatcaagtcttgtctcacacttcaattaaaattctgaagttatcggccccaaaattctctcctgagggagttatgaaaataagcgccagcttacccagagcgggtcctaccattgagacctaggctccaaaaattgatgatcaacatctgaaggaaacttcaacgtaagatcatcatttacaatcaaaaatagctaacctatattttttcattattttattcctattttcaagggtctgtttcagctataaaagaagagctctcttagtttgttattcatatttagaaaactatccacaatgttagattttattttgtacttatttatcatgcttttatgataataaattcgtatttttgtgtcatgcctttgtaattttcgtgttgtgtcgtgtttatgcacatattttttgtagcctctttaacatctctttatctataaagaattctcgatgtaaaaaatacatagttaaaatggatgatgtttgaatagaaaaaaaaatagtagattcaataatcaattttatttctataagggctaaaataattatttgacttgctgaccaccattttataatcgtgtagggtggaggtttcaattgtttttttatcttgtccaaaatttaaatgtattcaaattgactcaacaatttttgtttatatttaatataggggcagattataccatgtacaatcttgattcttcttagtatataattcaatacatgaattagttggttctataatattagcaacatactatttatcaggaaaaattttaccgtataccaattttaacttagtccatttcatttttaccgttcttttcatattatttcatttataatcacttttataaattatgtacctacttttcccttagcttaatgaaaaaaataaaaacaattacttctccaaagtctaaatatgattatcacctccgctcctcctcttgcgaaaattacattctgatatcatataaaaaaattattgcaaaatatggaagctttctactgatggaatatagtgactgttaaaataaaaacaaattattgatatgtataaactaaatatgcattaatttgaactaaaagttgaaaaaaagttttaagtttagcaaggtgactctataatatacctcaactttcatcaaaatacatgttcctgtagacaagcatgttaggttttatgccctaaataaaactcttt

SEQ ID NO: 233370 - DNA, 885 bp, Cannabis indica
taaaataaatttccaacacatggtgggagacttggatggaccttcttcgtcttcctctgcctcggcctcttcctcctccttcctggcgttctcgcaaaaagccaaagtttcctcttccttctcctccaagaagcttctgtccatgttgggattcgccatccaggctcgatataaagtatggaggccaaccttgttgcaccgttttatagtttcggcttctttccctgcgagttcggcatccttctcagcgagcttcttctcaaattcatcagcctgggtcttgttggtcttctcggcttcttcaagatctttcttcaacttctcggcctcctgtttgagatgactgatttcctgttgggcatcgtcccgttgcttaatcacaaccccgcattgagctaataattttttgacctcgccttccaggtatctaagtcgctccaagagtcgtcgattagaggtaaaagaaagaaaaaaaagcttggaaaattacgagcaaatgaatatgaggaacaaagaaaaaaaataataacaatatgatcgacttaccataagagtatagtccaggttcctcgcaagcgtctcttcgggactcgcaagattgattagatcccaatctgggggaaggagagcattgagttttccccagtagggaatcctaaatgcctgggcaaattcggaaccagcttctcccgctgcggccgacaatgtttcaatggcctggctcgaggaagtagaggcctgagctgtctcaggcggaggtgcgttgtgttgggttttatgccttaaataaaactctatttcaatgcaatcaagattattcaatatcaataaaataacagaagtattttcattcatttgtgtatgttttggttcatcttatcaatt

SEQ ID NO: 233371 - DNA, 1267 bp, Cannabis indica
ggtttggttccgggtctgggcatgggtctaggttggggtcgggtaatgagtcttcctccaagtttgggtacgggtttttcggatcccaatctaggtctaggtttgattcctgggtctgggtcccaggttcgtgtctgggtctacatctgggttcggctccaggtccagtgttttgatcctggtctgggtctgggtcagtattcgggtcttggtttgatctcgaatcccaatttaggtcaggggctttgtttgatttcgagatcgagtcctgattttgggttcaagtcttagtcctagtttgggtcgaggactgggtccgaggccgagttctcgggttgggttctggtgtaattcgggtccccgcccaggtcgaggtactagtcacagtctcggtcctgttccagggtcctagccacactctgattcaagtttttgtttcgggtccaaggtcttggtctgggtccaggtattggtccagcttcgagtttttgttcgagtcccagatcaagacatcgactatgggtcttgtccaaggcccggttctcggatcctgggacaagatctggatcctaatcatgggtcccaatcgagtttaaattcatgccccaggtcccgctctgggtatgggtctaggtgtgggaccgagactggggtccagttttgggtctcaatcccagttttgggtcccgagtcctgttcaatgttcgagtctgagatcaggtcagggttccggtgccgagtcccggtttaggttcacgttcaggttttggacccaatcccggggtgggtctatgtccgagtccaggtccaggtccggttacagttttgggtctgggtccaagtcctggtcctgggtcccgatccgcttctagtttcggttccagtttcaagtaacatggtatggcttcgggtcgagttttggttcgagtctaggttcgggtcctgatttgggtctggggtgaggttcaggtctgatttttggtctcggttagggtccgaggatgggtttggtttcgatttcgggttcgggtttaggtcccggtaccgttccaagatcccggtctggttccagttcaagtctcaattttggttcccgtgtgtgggccctggtctttgtatgtgtccgggtcctagtttgagttggagtttgagtttgggttctggtctaggtcctagatccagacattgactacgggttgggtccaagcatcgagtcccgaatcccaggtccctagtgttgggttttgtgccctaaataaaacccttt

SEQ ID NO: 233372 - DNA, 3285 bp, Cannabis indica
agtactgcaagaggtaacatgtcgttattagtgtatatagagctcgtttggtacgccttaacttgtataaatgtattgtattgtattgtattagtattatttaatccgggtccaggttcgggtcccgagtccgagtctgggtccgggtccgagtgggggtacgggttgaggtttggggttggggtctgggtccggggtctgggatcgggtccgagtcaaggtcgggtccgggtcggggttcgggtccggggtcggggtttgggtctggggtccggggtcggggtctaggtttggggttcgagtcggggtccgggttcgggtcaggattgaagattggtgttgatcccgaatcttttgtaaatattatagtacaagctaatacagaccatttgttatgtattaaataatacaacatatattgtattaaaaattttggtcgtaataattaataaaatatattgttttatccaaacataatgttatttattatttaatacactacgacccttatacggcatgctaaataagtccataaattaataatattaagtcttaataaataatataagaaactgctaactaataacaacaagttatatcagtatagttatattgtacatatattgtctaatagaaatggtcatatactctaccttgtctccaaatagcttcgcccatatatatatgtagattctccattgaccattttaagagctatatatgtttatgaaaaccgatcgaaacccttgtcttttaataatgattccaaacaagatcacattatacttacataatttgcctattaaaaaaattgtcatagaatagatatgtagtgtgtgtatatatagggatgtaattcgattcaaatcttcattattaagtttataaggactattatatttttatatgttgttcttagaattaaaatgcatcacggcatacatcacaacatcaccaatatattatttatatataaataaatacaaattttatatatagtttttttagggtttgcttgaaatttgccaactacttagctttcagtctttcatttctaaaaagaacattaattatatggagggacaaggaactaggggtggcgatttgtgtaattcgcaatattcgtattgtgtcgagaccattgtataacgtatatgctcaacctgaacacgattcgtttaatcatcgtgttagaaaatgaaactcgaacacgatccgtttataaacgtgttgacacgacacgacatgtgtaactcgtttataagtatatttttttttaaacatgtcaaccaataacatgtttataacatattcaacacgtttatgatctgttaataaagtacttaaataacttaaatatataggtcattaatagtcaattttgtgttagccgtatcaactcgaacatgacacgtataatataatctcaatttatttaatgcaaacccaaatccactaattctcataccaattttaaatggtgttattatatttgacacattttgttggacctatgagagatggaaaggggccttaagccaacccaaaattttcaaaagaaaacaattacatattgtacatgttattattataaagaaaacaataattttaaatttggctccctcataattcattttgtttacattttggcccattccaaacccaagttctcactccatgtgtccattgttataagagaattattagacggtctctatagtcccaaagaaatattaaaaaataataataagaaaataatatttgtttacaatattcccatttattggtcaaatatcacacgtacgtaatgggtttgaaatcaaatttgactcacaatttcattgtgtccatttgtattgtaataatcttgagcctttatttagtgtggggcataatcttttttggctatgcaaaaagtcaagtcaaaaaagtactctataaattatatatatgaatacaatgaatatccaataataattaacattaataaaactatagcaacaaaataatatgtaataatctttagcaaaaaaacaataaaagtaacatatttatatgcatgtaataatgtgaaagttgtatcggtttaactttataacatgatcaatcttattcattaatagtcataatatatatagttaagataaaatgaatttgtagacatatgaatatataatattctatatctattgagagaataattaatttaaattgattgaacatatacaaaagaagattgagattatgtatttttagtcattgattcatgcatgcaacttaaatgaacaatcattagtggggtatatatagatcatccattaatatatagctcaataggtgaaaaaaattcaccaaaagtaaaattagataactgaattaatttttaccatttcacatgagaatattttattaatgagcatgactttaatatatataataaatacattcactataatataatataatataatataatataatggaatatattctaatataagaaatttcagtaatacatggggtatattagtagaccctttatttatttcagtattcacaaaaaaaaaattagtttaatttattttcatgatcgcgtacgttttacttatttaaaaccaaatgtaattttttaaaaaattttgaagagattaccgttctaaaaataaaatatatttttatagttattttttaaaattaaaatttttcttatttttttaataattaatgttatgtgaactattaaaaattcaccacatgtacaacttgtgtactatattatgtctaccgtgacatttaaaatatatagttttttgaatggaagagataaatagctagattttagtagttttactactaaaaaaaatcaattaagtgattactttttaaaaaatataaagtataaataattttacctctaaaatttctaaattaaactaatactgcacacattaaggggaatgaattttttttttcaatgattaataagaggaagtaaattaaacattataataatgaaaaacgttgtaaataatttggtatataataatactaatgatgactttgttcaatgaatccaatcaatgtagccaggagcagacttataatggatcaagaaactgaaaaaaatggaagtaaaacatctttttattaattaaatttgtttatttatatattattaatttgaccaatttgtaaatgggccacttcattcattatatatagacttaagaaagtacattgttttcaatctaagacatgcaagtgtccttagatttttagtggaac

SEQ ID NO: 233373 - DNA, 3733 bp, Cannabis indica
atccttgaaagacgtacaacataaataaggcagacatggtatttaatgcctttgggagtaaaactgggtcagactaagctgataataattggctatctctttgaagtatagatgcaatggcaacattgcaccctatttagtatgaggacctaaccacacacaataatcctctctaggatctgttgccagttgccctggagagggaaagaagctttcaacccacccaaggaggcgttcctcaaagagattggataatctcttgaaagtcagaacgaatggtgaaaaaaccattgagctcccctcagacccctcctgtatatagagtgagccttagtatactcctcctctacgtagccctggccaacttctaagacttctcccatctcaaagtcaagttctcccttttcattgaagccaccaaagggtggcacctatacaatccttctttctcttctccttcttctcccttggccttgaaaggagtagcatgacggacctcgccatggtcctcaacatcctagacttcaatgtccccatcagcagtatcttcttcttggaccgtaggttgggcctgctcccctctagtcgcgacgaccaaccgagcaatatgggggttagaggatgaaggctttctagtagtcttcttggtttgcgccatcattttatgtctagacagaactctttcagaagtgtgcctcacaacggtcacaacaaactcggcaatagagtatcccttagtagtgtgagttggatgaccttcgggcaaggtatcagctatatcagattggactctgtacgtccagttagtaggaagataatacctccaacctttcttcagttcctagatgaaatgcatgtatccctcaccatgtatctggtcgggatactagtgatgatacacctcaggcttcggggaaggtgtgtgctcactgctcactcccttgtcttcaaaattagagtttgacagatcatcactagatgaagataaatttgcaaggagatgagggtgatcttcatataaaatttgaagcaagtcctggtcaatatgatgcttgcctctccataaatcaccaaggttcatctacaaaaggtgggggacaagagaataagagttggtcgggaaaacgaatgaaaaatagattttatatgccgaccatgcaagattaaggatgcaaagatggggttcattcagggttggaattttaaatctcagaagttcaaaacttcagttggtacatggtattttttagaatctcaagtggaaatgaacaatttcaagctagaattaatattcaattaaagaattagacgtcacagttaaacgttgggtaaagttccaaaaccctagaagtatttattctacaattagttaaagaagagttcaagaacaggcagagtttatggcaagaaacccaaaattaatgcatatatatactttcattcatctaaaagcaaggaataattgacttactcactgattcaaagctttcttgatctgctcagatggtaacgtcagaggtcttccaacaagttcctcaaagatttgagagaaaacttagatagaaaattttgctctaattctttaaaagtgaaaatggctaaaaggattaccaaaatctttgatctccttttataggcaaccaaaaaaggaagataaataatttttaaaatttgaatatttgggtttacccccaaaagtgaatgttagtactcattacaaggagtaccaccatcacgcatgcactgtcactcagccatcagaccgtgatttgaggtacaattttcaagaggtatttaatgctcagacactaaagagacccctagttaaagtcacgttggatcaacctcaaccgtctaagacacgcatcacccattcggacaagattcctggccgaatgaagtccacatgcgacgaagaaagtcccacacagacttgggggacaaatgttattctattttttgcactacgacatggcatttagttggatgacatgtggatcatatttttctccctgggcaaagggttacactcctaagagccctcatagattggtggaagggtttatggtgttcgcgcgtagcaggatgttcaaacagagtcattaagggacatccgaccaatgcacaattgcatgatcaactcgcatgtaccagacaggatatgtgagttaccaatttcagagataggcatcattgcttccaagacacgaagataatctctacatttgtggaatttattcagagactaaaggcaataagcctcagttttccattccttgcattataattatagaattaatttagtttcctattttatttattatagattaaggaaaactagtcttcatgtaataagctcctataaatagtggcacaaattcactattcagggggacgaaatttgattcaaaacaagagagaaaagagcgatctaagagagattttctctcagagatcaattgtaagagctttcgagagagaatacattattcttgttctcaagtcaatataacaaaaaaaaagtgtaggctgttaccattttcacggggccgaatctctagaaattctagtgttttctttacttgttgtttttgctttctattatttattttatctaatcactttatcttgactcactgaataagtgtagtacgtaataactattaactatgcatgtagatgcacttgagattagttcaagtgaccataaagagtacgaggtggggtgtgtatgtggggggtcttaggatcaaatcatatattatgcaactaactaggaatcaaaccgcgcttcgcgtgcggttgtattttatgtagtgataattaaattataaaattatattaaattttacatttttgacatttttatataatatttttaatagtgagtacctattaaaaactttattttttaactcttaataataataaaaaaataaattaatattttagagacttaatttttttaataactttgaagtatataggagttgacaaaaacaatatataacatacacagttatttttcaaatcactattattaccatgtattactcctttccttctgtttattttttttaaataataataataaatacattaatttttcaataaataaactatactcaaacttgaactcattaaatgataattattaattaatgcaatagatatatatttctataaagtcagttttcaaaatatatatcgtttgcataaattaaattgggtaaatactattttggactcagtgttttgcaaaaattaccaattggaccatctattttgttaaatgacaaaatagaccctgtattttctaaaattttacaaataggaccctgaactaattttttatcaaaataaaacttaataataatccgatctagagatgttagggcaaaactagttatattttctgtatctgcttgtattaaaaattgtcttaaagttagttatattaaaaaaaataaaattgttaaaaattgaactcagggtcccatttttaccattttgaaaaatatagggtctattttgtcattttacaaaacagaaggtctaattagtaatttttgcaaaacacacggtccaaaatagtatttacccaattaaattagattaaggacatgatagaattttagtaattgaataaatgttatttttgtgtgattaaacttatataaaaaaatagaattaggaaaaaaaatataaccattgataaatctataagaaactc

SEQ ID NO: 233374 - DNA, 914 bp, Cannabis indica
tgacgtactcgtgtataagagccatttattctgtgggtgtaagggcccaatggaggcttgaagcgaggacgttacactaactcaatgatttaaccccatgtctcctgcctgtctatggtttctccggtgaaggagtcgacctctaggacaaattcgtctacccctcactattggacaagctccaacaagcatgactatcatggcacagttcctgatattagatgttccttcagcttttaacgtaatgttgggtcggccggccttgcatgacttaaaggctgtcacatcaatattccactcatgtttgaagtttcaaacaaagaatggggtagggtgtctgagaggaagccaagagtctgctcgggaatgttataaccttgcagtggccaaggctaagaaggaattatcctccagccagagcacaaacaaggaaaaaaacatttccaagttgggaacttcccaaggcgaggaggaagatgtggatcctcgacttggggacccaagcagcaatgttggacctgtggaagagttagaagagatcgagatcgatccagatatcccaaccagaaagctaaagatcggaaagggtttgttgctcgaagtaaaatcagaatcgataaaatttctgagaggaaacctagacgtttttgcctggtcacatgcagatatggttggaattgatccttctatcatttcgcacgttctgaatattgatccaaacttccggccagtccaataaaagcgaaggctacttgataaagaacgagcattagccctgatggaagaagtagaaaagctgggcaacaataattttataattgaagctttctacctagcttgggtcgaaaatcccgtattggatcccaaaacaaacaagaaatggcgaggctatattgattacacagacctcaaca

SEQ ID NO: 233375 - DNA, 603 bp, Cannabis indica
gtctatctcttattagatttctctgatacaaaactagagtttttccctcaaggatttttcatccttttttcaatacattatgcccctatttatagtatcatagggtggcagttaattacaatcagattcaaattccacaacaatattttcctcgaaatttgggctttaattacgtcccacgtatataaatgcggttattattagaaaatcacacaactgtgacttatctacttttaacgggtcaatgctgacgtggatttaatcatgctgcaaggtgtatatcattggagcatctcggtgggacagcaacattaacactgacaacgagctggagttttttcccatgtctttctgaggttgacaatgtaaatctcaacatttctttgattaaagacataacgctccatcttacaatcgcagttcttcctgacaaagtgaacttcagtagccaacatcatttgaatatcagcttctatctgagagagctgactcgactgagtagtggatctcattgaaagatgtctggagctgattagtgaaggtaccaaaagtcagcgttcctataacgaaatggatgtttcgctattcgttattcacgtcctt

SEQ ID NO: 233376 - DNA, 656 bp, Cannabis indica
gggcattccgctgcctgaaaaggtgcgccctaacatctggcttcttcttgatagtatcctttagggttttattaacggcttccacttgtcaatttgcctgaggcctggatactaatgagaagcttttgataattttattcctctcacagaattaagtgaacaagtcgtgatcaaattgggtttcattattggatactatcttcatgggaattccaaacctacaaataatgttctcgatgacaaagttaaggactttcttgcaggttatggagacgaggggctcggcctccgttcatttaatgaagaagtcgactgctactaccacatacttagctcctcctcgcccagtgggtaatgcctcaattaggttgatcccccatatagcaaatgggttgggtgaggtcatcattctaagttctgttggcggtacgcgaggtatatgtgaaaacctctaacacttaacatatttcttgacaaactcgtgtgtgtccttattaatcattggccagtaatatccttgttcaatgatctttttagacagactttcccaacccgcatgatccccacagaagccttgataaatttctctgatgatttgatttgcttctgccggaagaacacaccgaagtaggggcattgaataccctcttctatat

SEQ ID NO: 233377 - DNA, 2446 bp, Cannabis indica
ataactctttttgatcttatcaggaaatagtcttttgctaccgaggtaacatattctaactatggctcgcgtttttctatcgatgttcaggaataactggtcacgttctgcgagacattggttaagatgattgtcctcattgttgtcttttttggtgattactgtgctagtttttaggaactccgagagtggttgctcctgaatctttcaacatactcacgagtatgtaggtcaatgagttgcaagtttttaaggaactcattatctatcatttccaacgatacaatttcagcctgtatttttttggaacctcatatttagtttacgagaagatctcaaaatatcgtcacctcacaatactgtgttttatcaatgttgttactgagacatagtgcgagacaggcatctatttatgaccacttaccccgaagccagatatctattgtatataataatcttttttaatgttcaaccttattattcaggtgtcgtatccatatttatggctcaaaatatgggcatgacaattgtcccttaaaaaattctttatgaagttggaagagttttttaaacaaccaaagctggaacaatttggtctttctcttaccagtaatgagtacatccttttggcaatttaactttcaccgagaaaggtaaactaattattaattaaatgttttttcatctgacgggctttttaccagtctctttgtattttctagaaatgtcctcagccgtttaatccaatttgaaacctaatcaatggttatccatcttttaatataagaaagattttttccatagccttttttttttacctcatttgaaatacaaaaccagagaaaaaatacccatctttattcaaatgactattgcatgcctagtttttctttgacttattttttttatgtgaccaataccattttttccatcctcattctcgttatatttcagacccttcttaccagagattcctagtgagaaaccatcatcgtttttagaagaacccaaaacctggtaagtatctaatctttaccctaaattttctttttgttattttttttatcgatttttgatatgttcatgcatcattttcgcctaaaatagataaggtagttttattttagtaatgtttttccttgaattatcaaaaatttctaaattcctaaaatatttcttttttgtgaaaagaatattcattcttggttcgaaactttggaagtttgagtttttagaataggaaaacccaaaattgttgccttacctttcaaatcacgattggaacatccaaaaacgatattaaaaataaacgacgagaaaattgtgttgttcaatgaaaaacttgaccgagaagaaatttctgcttgatttaaacgttttatagacgaggttgctggtgagaaacgtcattttttgcgagatgcaacttggtcaaagtctcctagtttaactaagtatcccttggcaagacctttatttttacccgaggttaccattgctttttctccaagtaaactaaaatttgacatcatgtctttccaaagagtgtaagtccaaactaccctagaatcccacagtccaatttgaagctcagttgattgaatctaaagtcaggtcaattgccctgtatgtgggtccatttttaaggtcttatggcatcaagaatgagaatggatatcttattcgctcaattgtactaggcgagttcagtcatattcccccaactcgcatgtcgaaagatgaaagttgtagaactagcgactcttcaaagattggtgcttggagtgtagagcatattaaggcagggaatgtccttccccataggcaatacttcaaggatttttataattatgttgaggttgtgccttttcagctcatcccaaatacttataggatcttggcatgcttgaagttgctctttcatatcttagagtgggagtgtccgacccctttcgagattatgggcttttatgctcttaaggcttgtcttgcgaggaagaatttctcagatggcttctattatttgggtactcattccaatgataataaactcatctaagtgttgaaaaatagtctttataaagctataaaagattaaaaaaacctattatttttttttttgcagtttaaaataggcgggctgcgatactaccttgtagtgtcacgacacttgaagttcgatttttggcagcaagcttcctagtgcgacagttaataatattttagttacaactcttttaatatttctcaaaattggacgattcaagatgttttagaaatctgaaagaaaaatttagaacttttattcacattattttcttcaaagtgaatgcattatagttgaaaatttaatttgaagtttcagactttgattttttgatcacaaacggagcgtgttgagcatccaaaacttagaatttttctaccacttatatcctagaactcc

SEQ ID NO: 233378 - DNA, 538 bp, Cannabis indica
agatcctcctcatgcaaccccatctgtttgaaggcttggaagttcaagagattcacggaacttccattgtccacgagtatacggtggacattatccctgccaatattggcaacaaagaataatgcatcggaatgtgggtggtggacccatctggcatcactttccatgaatgtgatctcatcccactctctcttgaacaacttctccagtcgctcgcttaggttgttcacattggtgagtggcttctctttggcttcttttgcatatcgctcctgcgactttctggagtcacctgcaatatggggtctgcctatgatagtcaggatattgcgaggagttctcgaaccactgacattctaattttcttctttgtcatccgcccagggatgactttcctcattctttttgtatttgctgaactttcctctcttgatcagctcttcaatctcgtcctgcaaaacacaacactccaaagtagtgtgaccaatatctttatggtttcccctgatcgggggaggatttttgaagaccccattct

SEQ ID NO: 233379 - DNA, 1233 bp, Cannabis indica
cccaaaccatttaacctcacccaaaccgggaccgatttgaccattcgtgctgtgtccatatcctcagaccaaggcctaagaatcactggctttctatcaaattgaattactccagtttcaagaatgacattccgagtagcctcatctttgaaacttacaagagtaaaccctgagtgcattctaacaatcctttccactcccaaattcccccaaattcttttgataaaaccttcaaacactctaaatggaggatttgcccctaaaacaatacacactatcgatgatctccaatatgatgcttctatttccacttcatccaaatccaaattagcaaacacctgatccccaactttggaaggttcagtataagagagctgtgaggaaggggtttttacctgattcagattgaatttactccaggtgaactgagcagatgcctgaaaatccatcacctccgtatcgtccgcccaagccgtcgatttaggaatcgacttttccacttctgcaacaacctccttctccggttccagttcatcgcacgggtctaggaagacctccgtagcttcatcttggattgaggacagctccgggcttgcaacagctacgttgatattggctgcacgaggcttcgatgtacctttcctcttcttcaccatgggaagagaatcagagcatcacacgcctgagaagtaatctcttgaatatttgctgtgaataaagtatcttattctagtacatcaatttttattattttttttaactatattacattgtaatgtaagcatgatttatcacatatgtcttatattattgatgtataataatgtaaatttattttatagtttctttatttttgcatgcatattatgatgtttttatttttttttctccatgttttatatataatattatttattatcaaaatatatttatatgctttttatttagttcactcttcttctggttattgtgtgtttgttgataattttatatactagttgattttgtatattttttgtgttgttatttttataggagtgatggagaagtacctttccctacttctaccccattaggtgaaattcgtgataagtctaaccctactccaatttatatccctaacactactaccatccctactcccacaatccctattgagcttaagtcaccaaaaaaggaaaggtgatgatgacgcacccactaccaaaaaaaaaccaagtagacaatctgctg

SEQ ID NO: 233380 - DNA, 1540 bp, Cannabis indica
attgtttacctagaaattggcccagtgatgcacatcaatgtttgacatgcgataagaagaaaaacatttatagagttaagttcccaaagtcatagcagtcgacctgagaggggtccctagcccggcgctaatgttgacttcgggaactctgaaatgggtgttggccgggattgtgccaagttatttctaactcaccatccttcagtattctgaaccaaaaagtcaagaagaatccaagttcgaaccctaagaactgaaaaaagtcgaaacgacctcccacaatggcaacctgggcggccaggccctaggttgacatctcgggctagagttttagttatcgggtttgtcttagtacaaaaaaatggctcactcaaactgtgtcttagacatgaataagacctgtcatgaacatgctagaggtactagaattagaatcaaaacacttccaatttgaggtacctgggcacccgatgcctagttcacctggtgatgcacacagtgcctaggttgacatgttgtcaacctgggtcacttccaaccacattattgaatatgtttcccgagtattttcttcatcttcattcaaaatgtggaaacaagtatttttgggaaagaaacagattgacctataggtcaaaactaggacccagcacccaagttgacctggtgctaggtcccaacacctataggtcaaagtcgaagtctttcgggcatattcttcattttcatcaataattaagatacaagtacttttgggaaacaaatagatccacctgagagccaaatctaagacccaacatcaaggctaactcaacgcccaaattgacatattgttaacttgagccattttcaaacatttttcccgaaaagtcttctgcgcatattctctcttttcaccaaaaattaagatacgattatttttaggagtcatacagattcatctggtagtcaaaattaggacccatattcatccaggttgacttgatgcctggttttgtgcttgagttaaaaatttttcaacttaggccaatttcaagtatttttttccatgaagtgtccctagaattttatttattttcataaataacaaagatacaattgttcttgagaagaaaaggagaccatttgggggccaaaacagggacctagcgcctaggttgacatggccccgtgcccaagttgatgttcgactttgttcacatgtttctgctcctcaaacataaatttttctccgggaattcttcttatcttggtccaaaacagggtaggagacctcgtgcccaatctcaaatgccatataagtatcaaacgagtcccgagaagctctccaaagagcacctagcccccaggttgacatatagcctagtgcgctaggttcttcttattcgattctagttccgtcacgagcatctgactattttccgttgtaaacgagagttacgacttgtgacaattcaaatttaaaactttgataattcactttttcggtaaagtggaatattgacaaattaagtcgcaaaattccaaatagtccgtgtct

SEQ ID NO: 233381 - DNA, 1141 bp, Cannabis indica
gagaccatttgggggccaaaacagggacctagcgcctaggttgacatggccccgtgcccaagttgatgttcgactttgttcacatgtttctgctcctcaaacataaatttttctccgggaattcttcttatcttggtccaaaacagggtaggagacctcgtgcccaatctcaaatgccatataagtatcaaacgagtcccgagaagctctccaaagagcacctagcccccaggttgacatatagcctagtgcgctaggttcttcttattcgattctagttccgtcacgagcatctgactattttccgttgtaaacgagagttacgacttgtgacaattcaaatttaaactttgataattcactttttcggtaaagtggaatattgacaaattagtcgcaaattccaatagttccgtgtctacccacttttgtaaaaaaagtgacatctttgagaactggtgaacaacttcattagaattaagaaattaaccaagtaataatctcaatatataaggtatcaaaaaatacaagtttgacacgctttcctactcataaaacgtctaggttgacgttacaatgtcaagttaggcaccagttactgaactttcttcattaaacgaccataagtatctcaatatcgatctgattgacgcgattccagttacatttgaaatctcttttcaagctctttcaagacatgtctcacactcacgtcgcaattcaaaaaatttcaagtcgaaatttggtcctcaagacaagtacagtttttttttttttttttttttttttgcaaataacccgaaaaaaatccaactagcacgattcaagctccaaaatttgacgatcaccatctggagtcattttagtcatttgatcaccatcaatgatcaagattagtctagaatgatttttttttcatattttttgtattatttattgacattttaatggagctccttgcctgtgaaaggatagctccactagctcattttacacattcaacaaagttctcacaaggtcagaacatttttctctaaaaatttgaattcttgccttaattaattttcttgtaattcctatgagaaataaaaatcatgttcatttataattaagtactggtcgatggattattgtaaattgt

SEQ ID NO: 233382 - DNA, 1037 bp, Cannabis indica
ggcataaaacccaacaatagcctaggttgataaaatgtcaacgtgggcgctagcccaccgttgccaacttgggcattgggcccagcttttgccaccagatgactgtgtttgattcccaaaaatactcttatcttatttatttgcaaaaataaaaaatatgcaagaaagacttctcaaaaaaagtgattagaaatggtccaagttgataaaatgtcaaattgggcgcttgacccaacacctaggtcaacctaggagttgggtcctagttttggctcccaagtgactcagtttgtttctcgaaagcacccaaatcataatcattgaagaaaacagagaatatgcctagaggaattcttttgaaatgttgttagttatggcctagcgccaaggtcaacctaggcattgggtcccatttttgacctccaagtcgatctgtttctttcccaaaagtacttcattatttgtttaggatggagacaaataaaattcttgggatacttcttcaatataatggttggaaatgccccgtgttgaaaatatgtcaacttgggcgctgggtgccctagtcacctagtgcctcaagtgcccaaaactaaaggtgttcagattttgattccaatgcctcaaatatgttcgtgataggtctcattcatgttaaactataaagtttaagccattttcactaagacggacccgaaaattgaaatcctaattaggatgtcaacttgggcgctaagttaagaccctaggccgccaggttgacttctggggtgatgttttatctctttttagtttccaagccttggaattggattcttcttctcttcttggttcagagtactaaaagaaggtgacatggagatagtttggcaggatccaaacacccattctggagttcccggagtcaacttgggcacagggctaaggaccccttctaggccgactactatgactcgggactacttaactctaagattttttatttcttgccacgtgtcaaaaattgatatccacgtctgttggaaataattttacca

SEQ ID NO: 233383 - DNA, 681 bp, Cannabis indica
ggatggggatattactctccgccgtaacgaatctcatttgatttttatttattttgtgatagtatttttagttattatatatgaattttttagggatattggcggtaaaactacctaaactatatgattagtgacacttaaccacataaactaattttttggtagtaaaatcctccaaacctcacttctgttagctatttatcccttctgctcaaaaggctctgttaagtaccacagtggacatgccacaatgtacacaagtgtacacgtggtaaatttttagtagaggatattggcgtcaaaactacttgaactttatgatttgtgacacttagccacataaactgattttaccctccaaacctcactttgtgttagctatttacctcttccattcaaaagactatgttaagtgctctactactggaaccatcagatcttcccttcccccattccttcttctttttttgcaatgaacccaccataccacgacgaacctagggacgaaccaataaactcctccgactgcagtagtatcgacgaagagttgcgtgagagggagaatcagatttgatgatgaggttgagaaattaaaacttcaaagaagggttgggtctcgagacttagagggagactgaagaattgtgtttgtaaggtcgagaagttggttttgtggttcgt

SEQ ID NO: 233384 - DNA, 1140 bp, Cannabis indica
acacgtcttcaactaataaaatcttatctttctttaggctgccactgtgctaggccaattttgggtatattaattgttaattttaattaaatataacatttaaataatgagatcttaaaaatttttaatgggcccctaggaagtgttggccctaggcatgggcctagcccgcctatacctagggcccggcctggtgtcaatttttgttgaagacataatccgcactgttcacgttcttatatttccagctcttgaaaactaagccattttcttctttaatgttgggttgaatgaaccgaactttaattccctcattttggtctagcttcttcttctcgtcatggttgagaaaagtcacctaaactgatctgattgcgtggcatttgaagacgattttgtcatgatagagtatcagtttggaagagctttctctgaataaccaatttgaggttgagagaagattggtcatgatgatcaccaataataccacgaataacttggaccagctcttcagaaataggcggagggtttggtccatcaattacaccacctttacagcttgtatcattcttatcactcctctttcttttattggacttatttcttgcggccctggtttcttctgatctttcaggcactactagtagtcagggccgaccctgaagaaataggggcctaagacgatataaaattttgggtcccttaataaatatataatatatttaaataaaaaaaaaactgattgatttaaaaaaattatgtgctacatatcataatataaagaaaataaaataaatatagataaatttaaaataagttataaatattacaaaaattaatgaatttgtatttttttaattaaatgtatcatttatgataaaaaaaatttatcttgctaaaataaatcaaattcttaaaaagaaaaaaacaattaagtctaaatttacttgtagctaataatttctaacaactacattaaattatagtccataattataataagatatatataaaaaattaaaatcaaatcaaataatattcaagaaaaaaattatttattattgttattattgaaattaaatattatatctcgattaataatttttttcccacaagaaagaaagaaaataataaaaaaaa

SEQ ID NO: 233385 - DNA, 907 bp, Cannabis indica
aatagattagtctaagtaagtttgtaaaagcacacacgtggcgtccccgtgtgttggggcgttacagcaagcatgctccgaactgtaacaataattttcagaataacaattagaatgggattccaaggaaccaaaacaaatagtagcaaccccctaataagaatgaacatttgtgttttctttgtaacaaactaggtcatatggcatgcaagtgttgaaataggtctagttctgttctgtaggctaaccagactgaagagctgccttatacaactatgatttcagaaatcaaccaaattggtggatcagaagggttttaggtagacactggtgcttcttccgcgtgtctactttgatcatgctatgttcaaaacatacacgactgcaaccgaggataagaaagtgttgttaggtgacttccacactactattgttgctggtactggtgatgtaaaattaaagtttacctctaaaaaaactatgattctcaaagaagtcatgcatacttcagagatgagaaggaatctggtctcaggctatcttctcaacaaggtagggttcacacagactatagggacaaatttgtttactttaactaagaatgagaattttgtgggggaaagtgtatgctactgaatgaatgtttaaaatgaatgttaaagttaataaagtgaatgtttatgtttgcttgttgtgttcttttaatactttgcatgctagactttgtcacgttaacaaacgaataattaaaatatgagtggtttaggcttaatccctaaatgatctttgaatgattttgaaaatgtgatttttgagaatatgtagcacttgtcacatattctgacatagtccatcgagtcttcgatcatcgttggccaaaaatacccttgtcagagtatctttttgg

SEQ ID NO: 233386 - DNA, 2781 bp, Cannabis indica
acaaacattactcagctaagacgttcacatacactcatgtagcaaggagacttaaccaccctgctcgaacaattcaagcaacttttttgtctcaaacagttagatgcgcatacatcgcctgacttaggcagatagacctcttggccaacacccatgttattcaacaatatcacctaatttggtatcattaactctccagctagaatgaattctagttagagagtgagggacaaactgtagaggtaaaaatttacttaatatttacaacatatttgagaaatccaatatgcaagtcagacgggtccatcaataatgaacccaacattattatgcacaataaggcagccaaacgaactccctaggccttgaaatggacaaattggtgagcctatgggccataagttggttcaccccgcaatcgggtctgagtccgaccaatcagccaaatggatagaaccaagtagatattgaaccagttagaaagatggttaccattcccataaaattaggaaagtaactaacttgaacgagtctaatggataacatggatggagggcaatggtgctgagggaacatgataaaagaaaccatatggcagacacaggacatcgaacaatcgatactcacactacttgcttaagcagacaatcgtcctttcttaacttttctcttaagcctcaccaccatagttattccttgagtctgttcgtctgcttatccactcatccatccgactaccatttatgtttcatttattttccattattgttattttttattacaatcgtactaacttgagtattggagtccctttggctgacaccccaccggttcttctaattgaacttttgtctctgtcttttttcttgacaagttgctggtgcccaaattctgtaattatagatttcacactatacaatctccgggacctggagttgaagggtccatttggtctggatggctgcccgtaattgactggtcgctctttcagcttgtacccttacccttcacttaggatgtagggtgcctttccctagttaggttcttccccaagcggctggtcctcttgctcttgctccagtcctctatggaattgcctgatcaggttggtagcctccctagattgacggttaatttctgcttgccaagcacgcatggactcagattgtcagtccatccactcctagaattcatgcctttgctgttcaaagtttcaaacacatggttcagcatgacttgtgtttcctcatggctgtggtggagggtattggtgtgaccttggacttgtcccagtgcctcccttaagttttctagctcagagttgtcccctagatccacgtggggttatccttcggatggtcgaccaatgtcgagtctggtttctctagcatattgagtgttggtgtttccagtctcttagaccccagtagtgcttctcgcagtgggccttgtgggagatggaacttcgggctttattcccacaagtggattaccacggggagcaagttgcacatcaggattggggttcttagtgttcaggggaacttgaacattaggatccgcaaccatcagatcttgtggctcggtagaagtggctcttcttgttaagaccatcgtttgttgattcaaaagaagattgagaatcaaaaaatgatgagagtaaactagaaatttatgctcttaatgaaagcaccaaaatattgacttcacttttagtcaacgacatagagtcttttaagtgaaaatatatgtagagtaattaataataaaataagaacaataaacttcacacagtgtttacagaggttcatcccatgattatgacaatagtctactccccttttagttatattactatgaagaaccattaagatcactaggtctggccagctgagtttctcaatagctcttgaaaagtgtaaaaatatttctgcagagtgttgctcttttagaatgcaaaaaaaaggatcccctgaatagtgaaatagcttcactatttataggagaagtgaaattacataagtttctaaactataggagatattaaatataattctcgatattaaagggaaaaaattgaggaatgagttaagtttgaaatcccactattatctcaacttggtaagtgaatcccgcaaaaataaggatttaattgagctacatttgaggaaacagtttaggaaaagatctgtggaatatctctactcaatgagtgcctctggtcgccaattagaattgttcagcacgctaggtctactcgacattttacgagatctcggctctactcagatgattgttgttgagggttagactttgactaattcaacatcattctggcctggtcgaaataattgggagatatactccgcccaagttcaattatgtcagccacatgtcaccttgttgagtgccaggtcattggtgcgaattttggaataacaataagctttactcatgtcaagcttcaataaactcattcttccctcgccacttctgctttagatagtgcatcaccttaaaagaaactcgaatgttatcattgattagcctcccaagaataaaagtattttgggtatcacaaaccacgtgatcaagaaatcccttcatcatattagccaaaaccttagacgtaaatttctaaagaacattgcacaaaaaataggtctaagatctctcacattcaatgggttcttcttctttaaaattaacactatattagttggggtgttgtcttgcccaaagactttggataaagttactgaacgcctttgagatccaatg

SEQ ID NO: 233387 - DNA, 605 bp, Cannabis indica
tctatcaaaaaaaaaaaaaaaaacgcaccattcactttccttacatcaacatcaggaccaagctaaacaaaattaaggcatagctcaaatttgcactatctcaaaacgggaatgtaaatcctcaacccaacgggggtgccaattcatcggtgaacgctgatatttcccagcgacgaaccactcttactacggtgcgttttgtcgagccgaaaataattcatgggtttgaagaacacttggtgacattggagaggttggttgtctgacaaaagagtgacgtgttcaaggcgatcgccattgtcagaacaaaaggaatcggcaaaacgtcactctgcgctgtagtttttgacaacgaaaagctgaagaaaagattcttaccaagagtttgggtctccatgcccacactgtcggatgaaattcagaaagagccgcaagagagcgatagccaaacagatcttatcctcgctcagagtgggagaagaggtgagtgagttggtggtagaaaatcacgacctagaaaggctcatttgtgctcttcgcaaagaattggcgaggaagaggtatttgatcgtgttggatcagtggtacatggatttccaaaaggc

SEQ ID NO: 233388 - DNA, 1337 bp, Cannabis indica
tacgtttaaaaatcacgtaatatgcctaaattagttagggtgttacatccttagtctaagattttttataccttttatgggtgattgactaatgacttaccaataaatattttgttaatattttattttccattattaatttttttattaattgttttatacatatatttattattttaagaattttatttgtactatttagtattcttatattgttatttgttcaagttaaaaatattctctcttaatttttatttgttcaaaaattaaaattttattttttattttatttgtaaaaagtgattgttaatgttatatatgactatttgaacactcttgattatattttttttgttttttttattgttataattttagaatataaaacataactatttgtacaaattgatttaattttctattagcatttttgttgttattttttttgtaagtttaattatttaaatgtttaagttggagataaaaatacgtatttttcttttttagctcattaaaggtaaatagaaaagtgtttttctatgtttttttctcttctatattttttaaatttgtgagagtttcatatcaatatatatatataaaaattattttaaaaatattatttgtactattcaaattcttatattgctatttattcaagttaaaaataatttttcacaactaaataatatatatatatatatatatttttttttgaatttttatttgttttaatttttttatactaaaaataaaattagtagtaaactcaatttaaaagtgttataacaagattaggtatgtttttttatatttgtatacaataaaaattattttcaatttgattatatttaaaaaaaaattattaaaaattaagttcagtatattattttatattttcttaaaaaaaaataaatttatcatttaataaaataaaaaatttattttggtgacttttataaaatacgaatataggattaacaaaaaaccaataattctaatctagtaaaaaaaataattgaaatcattaaaaggtggggtgcaccattttacaagtgtatataattccattttattattattatttttagctatttttttattacaagtgtagactaaattttttgaacgagtcttgttgtgcaacccaatttgtttaagctctatttttggcgtgttaaattttttgaatcttataaaattttgcaggatgtttaaataattacaacatacgaaatcatgaaaaaaattagacaaaaaatttctctcagataacgaaatagattgagatacattagtgcatcccttttaaggattgcattgtaaagattttcatt

SEQ ID NO: 233389 - DNA, 543 bp, Cannabis indica
taacaatgttcctataggtagtaacagtatatcaaggtccatgcattttacatgtggtaactataggtaattataatattataacttttacaataatttagaacactttccaagacacatcgatcccatgcataatattttgtgcatttttcggatcatgtgattttctctccattgcttctcacgctccaataattattagtattattgcttcttgttcaatcaaagagagcattaggttcaagaagtttgtgatccatgagatcttcaactttacttatatttaacttctaatattaatttgagcacaatatttacacggaaagggctataaagctaatttggtcaatatcatattatatattaatgtatgcacaacgtgatgtcaacttcaaagttctctcagtttcaattaaaatatataaatttatttgtttcattacgaatacactttttgtagtagattgtagagacccttttacaaattttataaggtagtgtttgaatttattcatttatcaaattatatacatgggcatacat

SEQ ID NO: 233390 - DNA, 586 bp, Cannabis indica
cctaatgtctttaatactactttgcatagtgatataaatttgtgacatagcaaactaggacatctagcacctgcaacgctaagcaaaatattgtctacatccaacatagcacactctcttaagcatcttaagttttgtaattcctatcaactagggaaatccataaactttctttctccctatcatctagtagagcctctcaaccattagaacttgtccatactgatctttggagaccatcacatgttgtctccaaagacaactataaatatgacattatatttattgatgactacagcagattctcttggatcttttccttaacactaaaatctcaagcctttgaagtgttcataagattcaaaagtctagttgaaaagcaatttaacttaccaattaaggttgtacaagctgatgaaggaagtgaatatagaccatttgagaagtttctactgaccaaggaattaaatttcaactgtcttacgcacacattcatgagcaaaatagaagagtggaaaggaaatatagacatgttacagaaactagattaacattgcttgctcattcaggtcttgacatgagttat

SEQ ID NO: 233391 - DNA, 1451 bp, Cannabis indica
ttctaagacctccaaaattccaagacacgttggagggtatgggtgccttttagtatttttcttttggtaattggagaaagagaaatactaaaagataccagtgttgtctagcacactttcttaagtttactggttctgttacatgtatatagtccttattatgttctgtatactgtccctagtgttttattggtgtctatagatctttactcattttatgttaattcggttaatcagttatggttgttacttgtgtcagcatatgagtcggtttattcagttaaatctgttgagtcctattttcttgggtctaatatgtaatgaggtccaagctataaaaggcttgcctctcccctgttttgtttcaattggatttcatttctttctgtttcaacattcaattcctctttcttaacatggctacacgcaacaaggttacacacaacaagaaggactggatttctttgatactttttctcccgttgcaaaaatggttactcttaaattacttcttgatgtatctaccattaagaactggcacattttacaactcgatgttaataacgcctttctcaatggagatcttaacgaggaagtttacatggaaataccacaaggtctgaccctgccttcttctctcaatgcaggaacgaatctcgtatgcaaattgcacaaatccacctatggtctgaagcaatcttccaggcagtggtacaagaagctatccgatgctcttctccaagaaggattcaagcaatctcaagccgattacaccttgtttactagaggatccgatgataattcatagctcttctggtgtacgtagacgatatcatcattacaggtcctaatgtatccaatatacactagctgcagacatctctacaccaaaaattcaaactcaaaactcttggagacctcaagtatttcctcagttttgaaattgcccgtgctaaggaaggattatttctttgccaaagaaaatacactctccaattacttgaggattcgggtttcataggcagcaagcccagcaaaacacccatggatcctaaacaaaagcttaacaacgaagaaggagagactttagacaacccatctcattatcgacaacttgttgggaagcttctttacctccccttgtctagacctgatattacatatgccgtgaatactctcagccaattcatgacaaatcctcgtactcctcatcttcaagccgttcatcacctcctcagatacatcaaagggaaccctggacaggggctcctctattccaaaaactcttcactgcatctccgtggcttctccgactcagattgggcatcttgccccataacaagacgatcaacaaccggcttttgcatcttcctaggagattgcctcgtttcttggcggacgaagaaaaaaccaacaatctcaaaaagttcagctgaagctgaataccgagc

SEQ ID NO: 233392 - DNA, 826 bp, Cannabis indica
tctctcatttttatagtggtaccctttgtgaaatgtggtccagacccatctcggaatattttctccactagtgacaatgattttgcactactaagatgtaaacataaatatttgttttgcgttaaattttctaaaaaagaccccctaaatttaaaattaaaaatgttctcttttttcagggtaaattttaacaagttttttccttacacttatactcgtaagtattctcttaagatctcaccctacacatctcaaaaaatcgttaaatttcacattgaagaagcctagacagttgtccatcacttttctattggacacattactagataacctatttttcaagcactaacaatcatttttgtcgaaatagtgaagatctcacatttctgttaatggtacctctttttgaaatgtggcccagatccatctcgaaatatttttctccactagtcacaatgaattcgtactattaagacgtgaatatgaatattacttttacgttaaatttggttagaatgaccccctaattcaaaaattaaaaatgttcttttcagggtaaattttgacaagttttttccttacgcttacactcgttagtgttctcttaaaatctcaccctacacatctcaaaaaatcgtgaaatttcacaatgaggaagccaacaccattttttatcacttttctatgggtcacgttgagagaaaacctagttttgaggcactaacaatcatttttgtcaaaatagttaaaatctcatatttttgatagtgggtacccctttgtgaaaatgcccctaattcaaaaattgaaaatgttattcttttca

SEQ ID NO: 233393 - DNA, 934 bp, Cannabis indica
taaaaatatatagaaagagcatgactaagtctatatatatttagtatataatagcatatatagtagtatagatggatgaagaacaataaaataaaagtgaaataagaacttgcactactcaaatgaatattacaagtgaatcaaagatataaaataacctcactttgcatatggaatcatccctaaccttccaaggaagattaagccattatgctaatcattctcaaaaagaaatatgagaagaaaagtgaaaagggattttgctatagtttctttactctaaaaattacaaactaaaaattgtctaaagattacctaaagattgcttcaagctctctcctctcctccctatttatagccaaagtgagtgaattaaaataattaataaattaattattctaatattttctagaaatatctggcataaataaggtaggtgagatatgagaagggtagaagggtaaaatatacaatgtgcaatttattagctgagagaaatagtaaaatagaaaaatgagccaaataaatggaaaggaatagaaaattatagtgtattttgaatttgaccttttgggtacttttccatgcattgggacacttggccgcatcaaaataatttgaaaatggttgatggaaggaggagacgacacttggcgagcatgtattggttgctgaaactcgaattaaaggagaagctgccacttgtcgcgcatgtggaggctgggagagagagaagctgctggcggatcccacgcatgtagaaagtaggtggcttggcaggagagggacagggaccactcgcccttgtctggagtgggaagcacgcgcccatctaggccgtaagactaacacacggatggcccagattgaggagcttgctgatgcgcgagtgggcttctatcaggatccgaaatctgatctttttgtaaaaaaa

SEQ ID NO: 233394 - DNA, 577 bp, Cannabis indica
ttagagtttctaaagtagttgcaacgctagttgcaataggatttctacgtaaaatttcgtaaaaaaaaactatcttacagtgtaaaaataaaaaaactcctaaatttttcataaatatattattataatagaaaatggacaaaacaagtatgaaaattgaaccagtcaatcactagttaccttctactatttacccattggatgtcaagagagatcattccccaagtaatcatctcttgaggtttctcatccctcaaattcaatgaggtactacttcataataataataataataaaaataaaagcttcgcacggaatctgccatggagagtccttcgccttcctcttcgtgttcacttttcaaaacttctcaccgcttcgctattccaaccaattcttcaaccctttacactacacacttctcttctttacccacaaaccctctaactttgcttcctccatttcgctttacttttccgggaaaatcacactttcctggaaaatgtttggacctcaattatttcacggctttctcctcacttccccgccaggactacctcaacgacgaccagaaccc

SEQ ID NO: 233395 - DNA, 861 bp, Cannabis indica
gcaataccatatactatccaaacagattgccttcggatagtaaatcacataacaagagcagatcaagccaaaacagattggggaatgatgcttgatgaggttcgagattcaaaggatttcattcactgctctgcagtaaatcacactagaagacaggaaaatttagtggctcactctttggccaatttggcttgtaattcaaatgttaataagttgtggttggggagttaccccgattgtgcatctgcctatataatggcggatttgcctaacactttgtagtttctttgattgaatatacatctttcaaaaaaaaaaaagaaattatgtattttaaattttttaagatgttaaaaattctttctaaattattaaaattgttaaatataaaaatttctgttcaatttcattcaatttttataatgtagcgattctccgtatattaaattatactcgcgaactttaatatatactatcatgcctcctaaactttagcatatattaaattgtgtttttaaattttttttcacgtcagattttttttagtaaaattgggtaaaaatccttaagtccaacaatctcaatagtttggaataatttttaacgacctgaaaagttcaagcggtataatttagtatatgtcaaagtttaagggcaaaatttaaattgatctttatttttcgttcatttcaaaatgtaaaaagtatatattttttgttattttcaagaagaaaaattaattattaatatagtgattaatttattttatattttttaaaatcttaattaacatatattttataattctattaattaaattatattatactataaaataactaatttagttttttttttttt

SEQ ID NO: 233396 - DNA, 951 bp, Cannabis indica
tctctctctctctctctccaccttactctctcttactctgtcctgatctctctcttattttatcattcctctcttctctttgtctcactccatggcttttgagatcttgagccagtcttcaacaacattgaagacgatgccctcccaagggcaaagccccaagccacgatgacaatcttccaaggctaaagcttgagccacgacgatggcttccattgctgagttctttgttgcctaatctctctattggaacttgttacataaggatatagatttattaacatatatgttgattatattttataatctaatatcctaaaaaggattttcctaaaacaatgaaataaacaaatttaaagttgtaaaaaaccttatgttatccagtttttcgcacattgacgtggcgagaggaccgagcaatatgtgtcctatatttttgatacctgtgcggaggtaaatgtccctagcagcctgcacataatttgtcagcatctataattctcaattacccgagcaaagctgtagagaagacatccgaccaggtagaagcctgttatgccaagcaacttacaagagataattatttcagaatgatcttgttatgtgtggacacaaagagaatccctataattgtgggattaagtcaaagaaatagggcaacctatttaaaattcctatttcatatcttgcaattatgtaagcattgtaatttcttatttgatgcataataagcaaaggggaaaccatcactcacgcatttagcccctataaatagtgacctagcctgactatgaaagggatcgaaagaattgcttcagagagaaagagattctagagagaaatagtgatgtaagagagttactcaaaagagatcagttggaagagctttcaaaggggaagaacactttgtcctttcttaagccaataccatacaaggggagtaggctatta

SEQ ID NO: 233397 - DNA, 1446 bp, Cannabis indica
tatattcttattacttagaaactaaatggtaacttgtttctaaaaacaaaaaaaataaaaaaacaaattttcataacaatttttacatggtattagcacttcaattcgataatcatgttccatatactgcactggttcactcagctatggtaatttggtattgcatttctctcatttttttaaataagtagcaattagtttctgatattaagaaagttttaaaataaaataaataagtttaatgcatctggactctccacgtgtccatatttatgagttaacgaaagtacgtgtgtaagagaattgtaatatttggtatttttacctcccaaaataaagataaggtatttaaatgtataaaatctgaaacatcaggtatttataccgcaatttaccctaaaaagtaacaccaaaatagcatttattccatcaacaaaactctaatgtagtatttggtttacatgaatgagtgtaggaatagaattgacattcctaaagaaagatcatttaagtgtttggtttgtttattgtgattggaaaactcatttcaataaaatattgtctatgtgtgtgcaggggcaggtggaaccgagtctgaagccgcaagatgtagatcgctggagtctaggccgaccacaacatcaacaagctggccgaccacctcctcagcaagtgggtcggccagcccctcatcatggttccctgaggatgacccctctcaataggcagcggtctggtccgctccaaatcggctctcgaagagcatctttccttgagccaacgtgctctccacgaaagcctcattgcccaagtatgacagattagctatggggttacgcagcttgaactcataggtgagttttgaggacaagctggcatactcatcctttatggcctgttggccatcaagagccgctctcagtctctcctcatgccctgcaagttcaaactctagcctagagataaaggcaactttcatgttgttctccttgttcctggcgccaagcatggtctccaagccagaaatcgtgctctgtttttccacaaggagagcctccatctcagacatggccttgtccttcgctagaaaggaagcctccatggtcttcatcttctcatttgcaattcgattttcctattgatgaaagtgaaaggtctatgattaattactagtagttgcctaagtccttctagggctataccctagtcataaaaaaattttagaatgatgaaacggttgtatacttaatgtaaaacattactagattcatgggtgtcctgatcgtgaacttaagaaaagctagaactgttaacttatgtttgcatatttgttagctattctaagtgattaggggtggaccatcctatggtcattaagataagaaagtgtttgtttcaacaaatactacttctctaagatatgacttaagtctgaaaataaagtag

SEQ ID NO: 233398 - DNA, 1552 bp, Cannabis indica
gccacaaaaaatagagtttttttaggaattctttcaagcatcatctccattttcagaaaatattaagattcaactatttttggggaccaaatggaatttttgaagggccaaaagagtggcttagcacccaggttaacactcggggccaggacccagcacccaggttgacacttggggctgggccctacgcccaagttaacattttgtcaacctgggatctttccaatccagttcagcaaaaagtgctccaaggattttcactttcatcagaaaaatgaagattcaagtaaactcgagaagaaaactgcatacctgagtccctaaaaatagggcccaacgcttaggttgacatggtgatgggccctacgccaggttgacaatcaacttggaacactgccttcaattgttcaaatgccaaattcaatgcgaccattgaattcggcatggtcaaaaatggagggagagacccatcctcaagtttaaaccttagaagtatcaaaacaaaatctagaatgctcggtttaaagggcccaacgcccaggtcaacaaatgacttggttcgctgggctctgctaatccgaattcggtgtcatttcaaccgtccgtctagtttttcacaagtgcaatgatccatgaattcagattaatcaaattcacaacttcaattttttggcaactttactcactcgaaaattggaagttttgagtcttccgtttccgcaaaatagcaatatttctgagaacatgtgaccagcttcaccaaaacatataaatgggctatgtgatgttaaaatcaggtgcttcaacagctatatttgcagaggctcaagctttgcacctggcccttctttggtgttcggctatcaagctgttagtcacttgtattgaatcggattgcctcctgctagtatcaaagatcaagcatgagtgaaaagattgttcctctctttttggacttctgtcatagatctggtgcttccttatttttttttttccaatgtatctctttattatgtttctaggaatgataatgtgtcaataatgcttaaggtgcactagacttgataaagagttggtatggagattctaagctccatcttcacttgtaattgtaactttgttcctggttttgtttcattaagttgcaattacttaaaaaaatagtaataataaaatattaaaaagataaaaataaatataaaagtagtacatttattgtgatacaataattcaaatttgaatcaactttaaggtgcaaacttataattattacagtgtcagttatattttagtaatatattactaatttaccaatccattaaaaatgctctaatatttaaatattgcattaggaaatagtctaaaaaaaacatttttacacatgaatcatttttttgatgacaatatctgttatagtgagatttctctcacctagaaactcgagaccagactcctatttaaaggacacgtgtattcagatttccaatgaaagctgaaatgtccatgagggactcctcgatgtttaaacctcgcccatgataaagccagtgag

SEQ ID NO: 233399 - DNA, 886 bp, Cannabis indica
gtcaacctcttagacacccctgtatcatctttctcttctacttcatccatttgtaagactgaattcttatcttttttggcatgtaactcaaaatctttccaagaaaaaatgactgctgatcgaaaatcattgcgatttttggccttgatggttctgagatggcagttcataaactcattgataacttgttttgtattttcctttcttgagagatcctttttcatattcggcctactgtacaatagaaagggcttcaatctattttctggttttaaataaacctccaccggcccaattgattccagccatagagaagctggaccgtatacagaatgtaattttagtgggctgggcctcgtgaagcccatcaaaagcttggaaaggcagactgtacttggcctttgaagcaaaattcctcccctattcttagaaagccacgtgtcattaggggaaattaatagccgcatatttggacttctgtcaacatagcttaaatccaaaaataatcgactaaaaattctcttcatatccaccaagccgtttttcattaatttctttttattgggaagtcctcctcttcttgttacgataaccatgcggcaacaatcaacctcggtaatcccactaacttttatttccaataattgcttccctggatgagcaccgtttaccataaccatcggagatgcagtgtactccgattccgactccgaatgtttctcaaggacgatcgatacaacttctgtgaacctgtcgtcgtcttttgaaacccaggtatcatcgtgatgatcgcctcctacctgaatttcatcgctgccatcttccacctctgtttccgtttcgagttccggcaaaaaggtgactccttccttctcacaaccagatg

SEQ ID NO: 233400 - DNA, 1199 bp, Cannabis indica
attatttataatatatataataaaaatattaattttcatatatattatttttaattttataagtataattcacgtgcggagcacgtgttattttactagtataaatataagagttaatacacaaagttgtaagagtagaaagcgaaagtgcttttaaaagcagggagagctactttgataaaatcagtggagctttcgatgcctttgtacgcaaactaccaagctctccaaccatcttatatgtaggattgatagcttagtccaaaatttttggtgggggtttaagaaaggtaactatggaattcaccttaaggcatgggataaattgtgtctccccaagtctaggggggacttggttttagaaaaacgaaagagatgaatcagaccttcctggccaagtggggatgaaacttgttaaatgacaatcaatctctttgttgtaagatcttaaaagccaagtatctcagaggaaaagagctgcttaactgcaaatacaaagacttagattcctggttttaaaaaaatgtgataaaagcgaatgagatcttaagagggagcttgtaaagtggtgtctaatggtaggagtacaagaatttgtgatgatccgtggttggctgatggcaaatccttttatcgtggttctaacgggcgacctgctgagggtttagacatggtgtctgaccttttatcagttaatgggaaatgggatttacagaagttgaagagtattttttacaacaataccatctctgttattttgaaaggaggtaacctattgacgagtccatatttgtcttataaatatgatcaatttatgtattaatattcttaaattggttctttaaattataaattagtgtgattttactttgttgggctattttaaagaccattcatacatttagagtcttttggagggattttagcatattttggtagaaaatagtcgaagtcggcgagctcgattttacaaggtggaacctaatttcaaatttggacgatcttagaagtaaaattggacttggagctcaacataaaaattttagatctcgttcttagttttccagaacatcttgagtcgtccaattctgagtaatatcgagagagttatagccaaaatactatcagtcgttgcagtaggaaatttctggaaaaaaaaaaaaggatagcaaaaataaagatagcttttcaagtagagt

SEQ ID NO: 233401 - DNA, 1542 bp, Cannabis indica
tccttcatttgatctgtaacgatgccacgtcaggattttgttcagtaatagttactttttttattctttcataaaaacaaattattgaattctcttcacacttaatggctgtacaagacaaaacagtttcttaaaaaaaagttcgaacttgcatttttttttttttcgaaataaaaagatccactgaacagaataaaaagttcagtacaaggatccaaatttgaagagaattttgcttttactgagagtgaaccacttgatacaagcgtgcttgctaatgtgctttatgataatatcagaataattataaaatatccatttccaaataactgaaagtgatatttcaattttaaaaaaaaaacaacacacacttaagttgagtaatctcttctacaggttaaaaatcttctgacctattgggatcaggactcggaaacctctcatatgagggtacatgtctatttcccaactgtaaagctgaatctagtaaaaagaatttgaacgaattcaatctcagctgtaaaaaaacaaagcttcgaatgagagcacagtccaaacccactgtgaaatgggagctatttacacactagtttgattttaagtcaacaaaggagttaagtatcctagtttttaagcaacaggcatagaggttgaaacaacgacataggtcaaatattggaggccatcctggatctttcccacagctgttgttcggtcagcacgaagatgctcagtacaggcatttgctttttcttggagtgaagtgggcggaagagcctcatgagattctgcagaaacacccttcatggcctcaacataagcatcagcaacatcagatattcctgaaggataaaatagagtcaaaatgtatgactttagactgaaacgccaccttgcatagatattaagcctgaaaaccctaggccacactaccaatacacatatatatacatatattccaccaccacctcctaagttcacttattgggaccatacaaagaaacattactctttgtatgagatgaaaatagttgaacgttaattggagcaacagataatgaacctgtgataaagctattggaaactgcttccagatacccggtcatcgattgtgcttttgatctgattaatttagctttttcaacagaatcttcaggccaatcagtattctgcatttcctcagcatcatcactgccctcctgaatcttgttagcaccagttatgattgatttaccaagcatcagtagttgtgaaacagcagagcagcacatttcagagagtctctgtaaatacacacaagttattaaattccattttaacaacagatataaaatatagaactaaaaaatttcagatagactacacaagatctccatacatgaacaccctcagaatgaagagactccactctgccagtggtcctttgtattatatcattaacagcttgtcctgataaagcactagtaaacctgcatttctcaagcaaacaacacttcaatgttacatgtgtgcaaatatagaacccaaaaaatgagagatgaa

SEQ ID NO: 233402 - DNA, 583 bp, Cannabis indica
tctaaatttttttcataatcgtgtacgttgtagttatttaaaacattttgcaaaattttaaaaaatttagaaaaaattaacacaccgaaaacatagtttaaacaacctgttatatgggtgactcttttattttatacgcgtgtgaaatactatttgaatactattttcaatattgtaaattattctaaatttttcaaaattatacataatgtctgaaatctcaaaaaattagaacatatacgattataaaaaaataaattaaaaaattctcttaaacgccgaaataaaaaaaaaatgtgtaatttatcatagtattcaattcaaataaagagagtaaaaggaacaagagagtaaaaggaactatatatatcaatatttttgagggttgggtataatataatgaatttcgtgtagttttaaaaatggtgggaggccatggcccctatgacctaatatatacatccgtccctgtgtatatatactagttaatgtcacgtgcaaatgcgcacctataattagttttttttttttttaaattaagtttaattaggtgatatgtgcatgtatatttaattttttaatt

SEQ ID NO: 233403 - DNA, 1134 bp, Cannabis indica
aaaacacagtattttagaaaaaaaatacatgtgcagctatttataaataccaatcatatttgtaagtttttctttttttaaaatccttttactaattagaatggatcgaattaagcgaaaaatattggattgaatcggatgtctagccctaaatatatatatatataataatatataaagtgtatcatgattttgagataacttaagaattttgagaaataatatttatctttgtaagagagttctgctgataatgtattataaataatagaatagaagaaaaaaaaaatagaaaaagggataagacaaagttaaaaatataattttcttagtattttatttttatgagatatctcctatttatataaatatgtgaatagtagattaaaaaattaagaatagtaataataattacaattaatagaaataaaaaattaaacatccatatatctatctattatttatcactaacaaaattctgtattgcgtttttaagattttgcgatactaatgaacaattctagctatgaataaagaaaatgaagtaaccatttaccatggtgtatgcttacattaatagaatttgtaaatagttaatttgttaccactataaaattgaaaaaactagtaagggtgattaaattatataatatataaatattttggcatatcaataactggttacctttcaaaagattctcaaagaagaaaaattcatcttgtgttgttgggctgtgatttgggtgctgaggcatgtactgtaattgggttaatgctcataatatttggggctatttcgattttttataagttgtttataaaaattttggagaaataaaggaattttatagaaattgaaaaaataataaaaagttaaaaatatgaaaataattaatttggaacatatagaatctccagatcttttaaaaacctaaataaattaggaatagttaaaatcactactcattatttttctcccaaatatgatgactttgaagaagttgagaacctccattttttcaagtgtagtgtttcgctcacttaattgatttttttttcttgcaacaattaaattctttttgattgaaaggaaaaggttagtaattgtttaattcttaatttaacacccaataa

SEQ ID NO: 233404 - DNA, 6687 bp, Cannabis indica
ttaatgcgtgtacttctgcacaagtagctttgatcactggaataaagctcaggaaaattttgttgtcatcaatctttctgaaaagcatcagtgatggcgctgagtcatggactagacccgtagaaaacacaagtaagattaatgtagatgcaacactctttgatagcgacaacaagtatggtttcgaaattgttgcccgaaaccatcttggtcaccttgttgcagcacgggccggttgccatggcggaagatatgcagctgaagtcattgaagccatggggaataaagaagctctcggttgggtaaagaccaataattgacaacatgttcaaattgagacggacagtcttgttttagtacaatctattcgaagcaaccaagcaatgaggtctactttcggccttttaatcaaagactaccaacttttgttatctaccctcccaaatgttaatttatttttcattagacgatcagcaaaccgagtagcacattatgttgctagacattcttagtatcaatcttatcgtaacaaatctgatatttctatttctggtgaactcttacatcttttgtattcaaaatattaaattattcaatgaaattaatatttcatcaaaaaaaaaatacaaatataaaaatatgaccaaatataatttgatagtatatttgggaccaaatccattggagatgatgttattgccaaaaaaacacttacattttacacaaactaattattgcaggtgtttgattaaaagagaaaagaagaagaaaaaaataatcccacgtgtctttataatcccacgtgtaagacacgtggcagaatggccggagtgatgaatgtcgttggctgtctacggttccagcagggcaaagggaggcaccaactttcgtgacctctctacaaagtaaaaacctcatctcatctcatcctcttctgtcttctttcttttctaacccattcattcattttcacggaccttaaaaagtaagggaaaaccccttctcctccacctcctcccccaaataataatattattaataataaacttaatattcatttacaacacacacacgctcacgcacacattaaatttaaaaacactcgaataattttatccctctcttctctggggtttctgtttggattcttgcaaaaatggcgaagaaaagaaagtcagacgctacgcgcctcgacgaggtcgatcgaaccatgtacaccaccttttgcagcgccgccaactctctctcccaactctacacccaggccatgaaccatcagcgcctctccttccaagccggcgaacgtcagggcctggttttttttttttttccttttgatctgatgttgatgctgtcaagatgtatgtctctactgattgaataacgttttttaaacttcaatttgttcgattaggccgtagattttttttttctttttcttttttgggttacgattcttgtttgttctaggtgtctttgaagtgaagtatctacttttgggtcattgctcttttgttgtatatctataggtgtatttattatgtaatgtatggttcttttgaagattattccatttcgttgtttgtaaattgtttctttctgccttgggattttcggtctcgagttaggagccatgactcatattttaacttaaagattttcttaatcttttatgctttctctttctgctggaggctctaaaggtttatggctttaactaaaatcttatgccggaggccatgtgacaaaatatgttgttccggtcattctttcttctatgaaatacagtttaaatgtcgatgagggtaatgagatgcagtatttttgtctttacattaccagtgcaaggtattttctaatttagtttatggcaatataccaatctttcattgataagaatcttgaaacacgattatcaaaatacaaggaagaatatcttccaaccaagtaaattcttcatctatcgaaagtacataatccagaagtagcaaagtaacattttcaggcacatttactgaacatttgtgaggtatttactcatagaagggggaagtagcaaaaatttctgaaattttaggtgttatgtcgaaaatgaactcagctacttctgactcttctgcttgccctacagtacatcactcactaatcactataacagtacagcaggtgtgaaagattagattgattatatcaatcatgcagttgtggaaaccttgaatatgagttatgatttcttgcttaacgaaattgttaggaccagagttgaacaatttaggatcttcttggttttggataatctaccagattttttcctcctagaacagacagataccatgtagttgtggaaaccttgaatatgagtattgatttcttgcttaactaaattgttaggatcagagttgaacaatttaggatattcttggttttgtataatctaccagattttttcatcttagaacagacagatgtttttctaaatgttatttttaagtctttgggatgttgtggagtggcttggactgtcttgctttttaggctcgagaaaaagaagaatggggaaagtgtacttagtgggttgcagggctggtttttatgaggttgaatggaaggctcaccttgatccgttcactttgttttggcttcaaagcctgtttattttgttcttgttaagtcctaggagtgctatcatagctggaaaattttatatgccagacaatccacgggaaagagaaagatggtgactctaaagctcgctaggtgtttgggaagttgctgtgtattcaaaatccaatagtggcttggttatctgaagtataaaagtaaggctttgaacttttgatgtcaaaatggatttgcctttatagtttggggtgaattttatctagtactaggattgtcccataagaatgagtgaggtgtgaacaggattgttagagaggttgttcaagctgcctttataagttcctgaattcttccttaaatttatttccaactttaagttggaggtgaggatctaacttgagctaagtacctcaaccccacctaagcccacctttgccactttgagtttgattttggaaaaatcatcgcagggttgattcttgatttaatatcgccctaggctctactttttgcttggtccttaatgtttaattttttatgattctctttccaaatcatctttaccttattaatttcaattgttattcttattgataaggaagacttacaatgttagtatttttatgatggcttggatttgagagaagtagggatgactaaagggtctagttcaattattcagtgggcatcttttcttgcaaaacttattttgttgtcactggttaataattggattctttgaatttcaagtctcttttaaggtgtttggaagtccttttcttccgatctcataaaaattatgcttggttttatccatttccagtcctcttatctatgaagaagttttctctttcaatggtgaaagcaaatgtagggtgttatgggatctttagttttggcggtgatctggggttgtttaattgaagacaactaactgtgttttgaatacaaggtcatcattgaagatttaaattgaagtgggtgtatctttcagtttcatctgacaaagggtttagaaattgtcttttcttcactatttattgtaatggaacaatgtggtccattacatgtgatgatgttgttaggtgggtggtctctggtttagatgggtggtctctggtcctaaaccttgtctcctgtttctgctttcttcattaatacatttaggtgctccttatttgaaggagaataaaaaacaagaagaggtaagttgggaagcatagcagttatgcactgacttatggcaacttcttttcaggatcagggttggaattacattttggtgtagttgtacagtttagtagattatttggctgtatttgatttttgtttacttattttctcctttagctttacgattatttgattatcagtcttcaaatgtggaggccacactttggttttgttcttcatgggaacttgggttgaagttgaaatatataaagaggatatataagttgttagagagttttcacttaccctgggaaaggatgaattcctggatggctttatggttatccaatgtaaaaaaagaaactagaattttaatgtttttcaatttgctttgggattgtgaatcattttatgtatttatcaagcactcctagtcctggctctgggaatattttaatcaatttagtgcaagtttagtcttttgcaattttttttttcaaaaaaaaaaaaacttgaacttgatagtacctcactctgacagatgcctttgctggaggatattttcatagaaattgcccacataaaattctacatcactcgaattgttttattgtccttgataaacacaacattatgcatgtatcaaaattactcactcactaatttcatcttttccttcacaggagaaaatttaccaatggattgtaaggcagcaagaggaagggtcaagagtgacaacaccagatatagttgcctacttacaggtatttatataaatagagtacttatatacatttaagatgtcctctataaaaccttaagaaaatgttataaacattcagccaatcagggaaagggagggaaaaaagaactgcaatgtcattagaatattctttatctcactgcgccttgcatttatgtacttagccacagaacttcctagtttcatgggattcaaaatgaaattgaacatagaatgtggcatgtgtgaattttaatgaatttgttgtcgttgggatacagaactctcaattttctggttacgtcaaagcaattgtggtaaacttggttggtttatttgacacttcgatggtatctttgaagttctacttttatggattagggaatgtagctgtattttgtaacatggctagagagaaataataggatttttcaactttgggatagagtgaaatactgaatggcttttttgatctttaaaactctgccatctttttcaattctaaccaaatgttgttccctgtctttgtaatataagatgatcccttgtcaaaacacaactaagcttgataataagtttgaaaacatttcctctttgtgtgagccctacaattttttggggaataaaatttaagcattgcaggcaaaccatgagctcaatccttcaacatagaagtttcttgtgctcttttctttgccttgggtttttggtggagaattagcaaagtaacctgccattaacttagcaatttctgctcttctatgctcatgcaaacatctcctccccttaaaagcattgccagcagttatccaatcttgaagttgaagatgattgaacttcttgttttattatgaaattttgtgtattgcctgaaagatgtttgcagtttatcttcagggtcattaatgtgctgtgttctcgtgcagagaacaaaatttttgctatttgtacttggattttcttaaaaatcgtttaagagaaaagctggttgcgtgtttcattgtttctattataatatcttactattaaaggttactctgtatgcgttgcttggtaaatgacattgccattattttccttgtaaatttgtagaatgagctggattatggagccgaggaacctccaatgtctcccagaatgctacttcagcaacagcacttacaaaatgcaatgcactcgaccaatctagggccaaccgctccagctgctcccactcctgttggaccaggagtacgctgggggaatcctgatcagcaagctaaaaactcggttttctctaatgctctgtctagcccggttcgccaaagccttcaaccgtatcaccttgctgcgcagggaagttaccattcaactaatccaactaatgtcctgacatgtggaaatggacctcgtaataacaatgaggggaaccatcatcatcaccaaaacagggacaccaactctcccatgtcgaatgattccttggatatgcatgcagatagtccggattctgggtttcctcgctgagtttggttctatgattgaaataaatagaagaaaagaaagtatatgataaagaaaatgtgtttgttttgtgatggaaaattatgtttgtagtgctgaacttgaattcatagaaaatttgaacaatttcattcgctatttgtttttgttttttgttgcatgtaaaatgggttctattatattgcatttttagattgttcttgcgatttgcaagttcaataaaactcaaatataggaggaagaaactagaagcaccaatacgaaaatcaacacataaagaagaagaatcatcaacaaagtgataaacagattattcatttttgtcatctgcttaagtagcagcatcaacatggtggaataagttaatcgaatatgaagataaaatgcaacagcaaatatatgcaaatcaccccataataattatgaaatcaactcccaaatatattataagttactttcaaatcttatttaataaaatcaaaaataaaatttgattacaaatttaagacattaacaaagttcatattaatagcattggacaaaaattataattttactaacataaaatgtataccactgaaaaataggagtgtgcagaaagttatctaatccaattacaacggaccgatccaatagaatcggacatc

SEQ ID NO: 233405 - DNA, 812 bp, Cannabis indica
ctggacgcttggacctgaactgccttcagtaaaacaaccataactcactcaattttcatctgattgatgtgatttaacttgcatttaaagctatataagttctctatcaagtcttgtctcatacattagtcaaaattctaaagccatcattgtaaaaattcacccccaagggagttacaaaaataagctctgggtaactcgcagcgggacccaccagacataaaaaattagccatctccaccaaaaactaattttcactgttggatcatcatcaatggtggaaaatgcttttgttatagtgcaaattttttgctgagaaactcgagagctgtctcctataaaattgacacgtggatccaatttctgagaaaatgatgaattattaattattgactctcaagggattagcctcgcttgatctgaactcgcaagatgatgccaccttgacaaggtctagtcgcataatatgccttacatagccaaagacaagcgggaccgaaaggatttatacaagtcatatatcgaaatatatgcgatgactaagtagtcttctcctacgactaagtgaagatcacttctttacatgataattggttcgaatgacgaatcgtgcttgatgacttgacaggattgcatgcctcatgttgtcaacacgcaatatgttcgtcaatgcgattcaaggtgaacatagacatcccagcaataagcccatcaaccattcagcaaatatagaacacacctaaagcctgcgagcttgtgtgagaatatgaacaggaaactcatgcacgataagtcgcatacgttgctgcact

SEQ ID NO: 233406 - DNA, 676 bp, Cannabis indica
ctcattctgctcatactcacaatggaacttagtttgatgatgctctccgcacttctgaaaatgatgatgatgaagagtctatttcaaaggaagaagatgatgctaaagatgaggatgacaaatgagatgatattgttgatgatgattatagggatggtagtgatgatgatgatgatctcgatgaagctggagtttgtattcggcagggtgagactacaattggagatgtgaggaatgatgacactgttgttgttgctgaaggtgtttcaaaggatgatgatacttgcaaaatgggttctacttccaaagatgccacaattgatgatgccaagaagtctgaaaaatttggaaactattgcagatgttaatcaaatttattttattttccacatttttgtttttcggtgtattatggtttttatgttgttttaatattttcccactgttgtttttattgtcactctcaagtctcaacaaccagaccctaatgttgatgatgcagctattgcatctgttgttagtgctgtagaaaaatggtatgtttttcttgtaatctgtttttgtgtgtttttgttttattttggtgttgttttagtagtgtttttcattgatgtttgtttcttacaaataaaaaaaaatcatttcttattttgtcagatggtttcctcaaatcttg

SEQ ID NO: 233407 - DNA, 907 bp, Cannabis indica
ctctttttgtctacatgacagatgaaattattctcatggtgctgatatatgtggaccatattattataacaggaaacaatgaaaaaaggctgaatgagttcacttccaaactaaacaaaaaatttgctctcaaggatctaggaccacttcacttcttcttaggaattgaagtctaccgtgacatcacaaggctgtatctgacacaatcaaagtacatatctgatttgctgcacaagtatgaaatgctcaacataaaaccgtgtcccacacctattgttgctggaaaacctatgtcaaagctcgatggagaagctctccctaatcctacgatctacagaagtgcaataggagctcttcaatatctgtgccatacaaggccggatattgccttcgcagtaaacaagttgagtcaattcttacaagcaccaaccacaagccattggaatgcagtcaagagagtgttaagatatctcaagggaaccatgcaccacggtcttcacattggcttcagtcatcacttaaacttagttggctactcagatgcagactgggcatgttgtcctgatgacagaagatcaattgcaggatactgtgtctatcttggagaaactctagttgcttggtcttcaaggaaacaagcagttgtgtctagatcaagcactgaatccgaatatagagctcttgctcatgttgcatccgagattacatgggtcgaatcccttctcaaagaactcaacttcaagcttcccagtactcctatcacatggtgtgatagccaaagtgcaagtgccttagcctcaaacccggtatatcatgcaagaacaaaacacatagagattgatatacatttcgttcgtgacaaagtgttgaagaaagagttagaaatttgctacattccttcatcaga

SEQ ID NO: 233408 - DNA, 635 bp, Cannabis indica
ttttttccatgggatgcttctatcttgttcgtaaataagagggatggatcactacgaatgtgtattaattatcggaaattgaataagctcactataaaaaataagtaccctttacctagtatagatgatccgtttgttcaactaaagggtaaaacagtcttttcaaaaattgacctttgatttggttatcatcagttaaggatcaaagatgaaggttttccaaaaattgcattctgtactaggtatggacattacaagtttttagtgatgtcttttggactcactaatactctgacaatttttatggatatgatgaaccgagtattcgaaagactatttagataagcatgttatagttttcattgatgatattttggtgtactcagaatcaaaagaaaagcatgaatgacatctcagattagtactacaacgattgcgcgattacaagttgtatgcaatttaagaaatgtgaattgtggctgtctcgcgtttttttctcgatcgtgttgtggataaagatagaatcatggtagatctaacaaagatcaattctattcggggttggccaacacttaagtcggctactgaggttagaagtttttttaggcttagctggcaactaccgttgatttgtt

SEQ ID NO: 233409 - DNA, 1004 bp, Cannabis indica
ccgatactgatattgatgtggtcgaccaattactgctagatgaaggtacgatgttggtggccgaaacgatcgtgggtagggtcatctcgacacgatctatcgatcgtaatgatctgatttacacagtcaatgggttctggaaaatacaggggtcttttacgtgaaggctcaaggtatgaacacgtttgtatttcgttttgatttgattacggatcgaaaaagggttctggagggtgggccgtgtatttttgaacattgtatcttggcgctcaaggaaccggatgatgttttggctccgacagagatggtattgtgcaatccgaatgggctttgaacgggtgcgtttatgaaggtccgaggtagtgttgatatccgcaagcctctcgctcgtgtgatcagaagacgtttggcactggataaacccttattacagatgtcgttaaggtacgaacgacttctcgatttatgttatttttgtggtattttgggtcatccctttaaagaatgtctctcaaagctgagttcggtcagtggcaaggaccaattaaaatatggtgattggattcgggttttgtttccgaacaaggttagtggacattattctaaaggctttggggtcgtgccttgaatgcatcggcgtctggggctgtggttcatgtgggaaaggtgagtgaccccatgacggttcgaccattggagggtggccgtggtgtaggaggggttgggttaaaatcggctactaatgatattttggggaaaggtaagggtattaaggtggaagacgcgattaattggcatcccgtctcggatgcatttattgctcaagatccgcactctctacctgttttggatatttctacttccaaaattgatgttgatggccttgattcagaccatggttttatggtagatgggagtgctagttagttttagttcgactaataatggggatagggtggcaagtgtggtgatggtggagaaagatgtcaatgataagttagaag

SEQ ID NO: 233410 - DNA, 1042 bp, Cannabis indica
ttccaaacctttattttttagtgtagggttgacttctttccaatttttataggacaaccctatcgtcttacgacatctaactcctaaagttgatactaacttggagtagtttttgccacactactgtcctttgtcattcacttcgagtgctactctttttctttggtccatcagcttggatatttcattcatctaagtagctccttgtgtaggtatcggcctaggacatcgcttctgggtctgaatctgatcctaaacctgagttagccatatctacaccattaacaaacaaaatttaaagttagctatataacaagtaatctatacaaaatattaaatgcataaacaaacataatgtattcaacataaacaaacattatgtattcagaatagacaaataaatataaagtaagctatatatcaagttaccaagtagacacgttttcttttatttttttttgtttatgcttgcctgaatcacaattgacccatattccctcattgatatcatttctaatgtattcaacatcgtcttcctcaaggttatgattatttcccataacttgttcatgaattggttgcccaacagtgaagtcatcataacataaatcaacattctcctcatcttctttattctctaagaatctcctctctggtgtcgataaaacaacagactatttatcagtagctggattagaaatgtaaaaaacttgatctgcttggctagccatgatgaatggatcattcttgcttcctttcttacttaaatcaaccaaagtaaaaccaaactcgtcagtttttactccaacattgttgtcaacccaagaacatttaaaaagttgaattcataacgcaaaacaattaagctccatatttcttcaataatcccataatacgtcatagtacctaaaacaaggtttctatcttttgcacttgcaaaatgtatggtttctgtgacgatacgtatgccactattttgaacctattgagcatcatcttttgactttgtatggaaacgtttaccccttacaatgtacgcttc

SEQ ID NO: 233411 - DNA, 1016 bp, Cannabis indica
atttacatcagctttccaaagcagcattaaccccccactaagtcctactctaggaacttctatccaattaggaaaattaaaagcagtacgaaatttagaaataacacctatactaagcttagattccataataaaaagtacatcaggtaaatgcttagaaatgagcaaacgaagttgacgaaatgcacggggactgcccaagccccgagcattccaactaatcagattcatggcgattggcgaggctgggacacagccttcgccaaagaaacatcactgtcctcctccactaaagaaatggcagccagttcagaaatgggctctgggagttgatgttgaggtgtattagtaatatcagtcaaagaagcatctttggtacgacatctcttcaacacttgccgaacattacctccttggttgatcatttgacgcttcgtaaaagtacaaggagacttggcatgaatggaagaagtctcagcagcagttccatcaccaattgcaatcgactttttggctagagaactatccagaaaaggtgttgttgtggtagattgttgtggtgaaataggcaagtgattagcagcattgaggtgatgtaaatatgctggaggggttgccacaggtaatgctattgccttcttgggaagatgaccaggaggatattcattaacttccttgaatgatatcgtggatgaaggtgaattaatttggcctctaaatggtgggtgctggaaggaacaaggcaattttactggtgtatcatccactatttttttgcctttgatatcagtcaatcttatttgatcactttgtagaccatgctccttaacaacttcattggtagcattgactgctgtctgctgaatatctgatgaaactggaacaggagggacagaggcaactcctttctcaccacctgaagttgatgcagaaaaagcattcagccgagagtgagccatggtacctttgctactggtgtgaacaaccacttgctggtgagaatttccagggatggc

SEQ ID NO: 233412 - DNA, 1673 bp, Cannabis indica
gggaggcaacccaagtgttcttaatgatttagttgattttttttttaggttttactgttatttttcttttcggttttgtccagctctccaaaaaaaaaatatggaattgcccagtggccgcggcgaggggacatatcgccgcggccatttaagccttacagagaggagtatattttcacgaaatctggccgcggcgaggggacataccgccgcggccatttaagccttacagagacaattattttttcacgggttttggccgcgacgaggctatatctcgccgcggcgaaaatggtcagtttcctttaaaaagggcaaatccctaacaattcaaaatcaaaccccattcaaatccctaacctctcccaccgaacacccattctctccaccatattttcttcatctaatcccattcaaaaccccttttcatcaaatctaaccataaactttcatcctaaatcatcataaacccttatttctctcatcaaacactcttttcctctaaaaatccaatccaaaatccctaaacctcacccaaatttcagaaaagtcactattcaccttcttcttccttaaagcttcaagactctcatcaatggaggttgaataaagattgattttcattgaggtaacaattttaaatctctctacacaagtttgattggattatttgtggattgctagagaattttagactttgtgttggatttttgaaatttttgctcatacattgttgaatattattgttgtgagtgaaattgagtttgattgtgaaagggttaattcccgggaagtggatttttaaggggaagtgctgtcaaaattttgaaaaatcttgagagttagaaaaatttgggtgatatgggtccaaaaaggtcaagagtgagtgaggaagggggagcttcatcatccaacccacctaggggtcgctctaatcttgatagagtaaggtttaccaacatggatgctcaagagcggtttttgaaattgaaagatagggcattcattgaagatagagggatagacattgtaaacctgagtcaaactgcaaacattcctcctgcatttgcatctattagagatcaaatcttaaataggcagtggactaagtttgtggatgtcactgagcgtagtaaccaaactctagctttagaatttttagccaactggcctgaaagagaagatgacaaagtaagagttaggggggttagagttcctgcttccacagctgccattcatgctctttacgagctcccaactttcactgtagagcagcaacccttaaagcagcaatttcgggaaagaagtttgaattatgtggatattgctgaaactctagggtatcctggcctgaggttccatgagcttgctggagaaccataccaattgtaccggtgtgaacttaacccagtggccaaggcatggctttactttgttagtgcaaggttgctcccgaacaaacatttttctgatgctcaaatagacaggattaaatgggtttatggcattatgaaaggttataatttgaatgtgggggatattattcgagtaacatttgacataatggttgaggggtcttctggtggaggacttgggctggctggaattatcactgatctttgtgagaaacatggggtaccgcagtactcatatgataccaaggcgccgccaca

SEQ ID NO: 233413 - DNA, 740 bp, Cannabis indica
acaaaaagacagctacaaagcaactaaaaatataacatgacatcgacctcgttgcaatataaacattattcatagattaactctgaataaattacaaaacatctaaaaaatactactttattaatcttgtaagagagagaaagatataggaggagcgcctaatttttttgtaagagagagaaagaatactaaaaaaatatatgagaaaaagtgtgtaagtatgtaacgcccttctaggataggcacgtcaccatgttttttaatttattgtgctctcctttgctaattaaagagcttattaaaaaacgtaaataattaaaactttttaaataaatttaaactttaaataaacaagtactaaatatttaaagttacatactgctatgatcacaattttgttttagaaatataaccaaaatttgagcctaaatattttatatacaaaagtattgctcgaagattaacaaaatctaagcctactatcccaaagatgcgaacactttaggcctaaccatcccgatatgtacaatcttcaactgactctggactcactactgcttagcgtttaccttgcccttacctacacatgtaaatatatatgtgagtcgacagactcggtaaaaatagcataaaatataaacataaaaccaaaccgtaactaggcacccatgcacccaatcatgattctatatcctgcatccaacgcgtataggtcccgaatgttcttaaaaatagtttga

SEQ ID NO: 233414 - DNA, 1201 bp, Cannabis indica
tacacattctcatgtcatcttgagtttcatcatcccaataggacagatttcgcatcttccatatgtggtaaatcaagcttgcaacagcagcagctattacaagctttctgaaattgctcatcttcgacctaccaagccatcaaattagacccgagaggctaactgattgtggcttccattgcagccactcctttacttgttgcaggcacttccgggaaacagcgcactcaaaaaacaaatgcattgatgtttcaggctgttctttacacaacaaacatccatgatcagtagagatccccatcttgcatagtctatcccttgttttgagtctgtgttggatagctaaccatgcaacaaaactgtgctttggtgtgtttagcctaccccatatttgcttgttccaaaacaccttctcttgaactgggttcagaagtttgtaaccatagtcaacagtgtatttttgcagtaccaaattcccatttagagcaatcttgaattgctccttaagcctcatcaagctaatccagtaccaactcgattgacttggtgggatgtgatcccaccaatctccattatgcaaatatacactatttatccatctcaaccataggctatcctccttattggctatagcccaaagatacttccccattgcagctttattccatgctgaaacattcctaaatcccaacccaccagcagacttaggttggcaaatagcttcccaagccacaaggcccggtccttggtacatggcatggcctttccatagataattcctgcatatagcttctattctttggatcaccttcttcggcagtagcaaaagttggctccaataagtatggatagtaagaagcacagaatttataagtgttactctacctgcaaaagataggtttctcgagctccatgttttaatcctagcagtcattttttcagttagaatctcacactccttacctgagattctcttcgggcaaatggggattcccaagtatgtgaatggtagctgttggagagtaaaacccgaagctttcacaatcttttccagatctgattttggcatgttactgctataaatagcagattttgaagcattcggttgtaatcctgatgttaaggagaataacttcagcccttgcaacatataacatacacttttggagtcaccatgacaaaacaatagaacatcatcagc

SEQ ID NO: 233415 - DNA, 2031 bp, Cannabis indica
tgacaatgctatcaaaaagtatccttatcacattaaattcatcaaactagttagatacatcaacccatggtatgatatcgaaataatgtttcacctactatgagaaggaaattaattttatactctataaatttgaaattagccacctaataatataattcttggcaaaaactataaatttggcttttaaaaaaaatcttatatttttatgtataattgtaaaaaatctaaaatatataatttttatcaaataaattagatcttcttcaaaaatatatgtatttttgttttttttttttaaaaaaaaaaattaggcatttttctaaaagaaagattttacacctaaataagagcctaaggcgtatgccgagttacaattaatttatattagagtatctccattggagaactataaaagtagtatattgctatattttattgcatttttttttaaaaaaaaatctcagttagtagtgtctaaaaggtgtgtgctaaatttgacacatgctaaaagtttagctaaatttaacataaattatagtttgtgcctaatttacactattataaatgttaattttttttgagagagtgagtcaatgttctcacatgaagtcactagcacacaccgaagaaaaatcttgattcaaagtcctattaaaagttccttggttattgtctttctcaagtgtgtgtgaatatgtggattgaaagaagttgtttcatctttttattaagtatgactattgtgaagctgaatgaattgattctttgctcaaatgatcattgctcacttgttaattgattaggccactcattgtgattcctctttacaagttgaacatgttaattcgagatatatcatttggtatgtttttttattgaaataaaaataaatctcatttgaagcatcattcgtaatatcgtggtgatttgattgttttgcttggtaaatctctcatttgtttatatctaatatccatatgttataggtcatgttgtgagatggtttgacttttttctttgatgttgtgatagatactttgacatttctttgcaatgaggagtctttgttgcattttctgtcgccattcagagggagctctttgataaacttttaattttcttagggggagcaattggtttaggaccatattattattggcgtagattatgctcaatgaagggggagaaattatacttatcctttgtgtaaatggttgcaattgttgtttggttgtttaaagtgtttgtttttctgtttgtttagactttgttatattttgatggttgttttcttttgcactggtattgttgtcattgaccataatttgtcaaggggagattgtaagaaccaatattttctgtagtgacaaattatgtctagttgcatctgggattcgtagtgttttgtcaagagttcgtactgttagtgttagtccacgttagcaaagatatttgggttttaattgttcagatggtaacaactgtctatttcgagattcttggtttagctgggtataaatacaactccttggtattatgttgaaaaaaaaagctttttgattggagattagggattacgcttctttcttcttgttttttctttatgttccatggcagatgatctttgagattggggggtattaatccaaagttgcagattagagcttgaagatgttgagttcaggctgaagggatttcaatatcatcttcatcaccagatctgaagggagttcagattgaagaaaaatgttgaagagagctcatcattcacacaatgggatcttgtgtttccaatcaagggtcttggttggtatgagtatagattcattgtattttgtaaaagagtgtattgtttacaatattgttggtatttgtaagatacatctttgaatatagtgaaagttactaccctggttcggggaacccaagcactaggcgcctagaataagtttctagagcaggtgaagcttgtcaaattctggtgttgaatctttgattttgttttttatatttgttaggctattttta

SEQ ID NO: 233416 - DNA, 1266 bp, Cannabis indica
tgagtggacaggaatgtgaaaaggcttttcaagagctaaaaatgcaaattgcaaaacctcctgtactctcgaaacctctggacggagaagaactttgcatatgctttgctgtcacggagcatgctgtaagtgtcgtgctgatcaaagaggaaaacaatatacaacatccggcctattacattagtaaaagacttattgaggttgaagcccgatacccattgatagagaaactaacttactgcctgattctagcaataagaaagttaaggtcctattctcaagctcatcctgttcgggtgtacacagatcaaccgttatgcaaaatattacaaaagtcggacgcctctggacagctactcaagtgggcagtagaactaggtcaatatgaaagtacttttcaacctagaacatcaatcaaaggccagaccttagcagactttgtagtagaaagcataggcaaggaagaaaacatatcggatggcaaccccgagccagtacaaaaacctcagccaagtaacagtgaagacaagacgacttggaaagtacatgtggaaaagtcagctatagatcaactattcggtgcaggaatttcccttgtcacacgtggggggcaacacctacattctgcagtcaagtttggatttaaagcatccaataacgaggccgaaaataagaagctttgatttttggagtaaaactagcccgggagatgaaagctgaacatattgaaatctgtagtgattcacagctagtggtaaatcacgaatctggagaattcaaggctcagggagaaaagaggatagcatatttgagcaaaatacacgatctgctcgcacatttcaaaagctacgctctcagacaaattccaaggggagaaaacatgactgctgacgcattagctcggcttgagagtattaatgtaagtgatagagcaaatttggttcctatcaagttcctcaaagaacctagcatcattggcacataagagatcgatccagatgttcttaccaagaagcttaaaatttgaaaaggtttattgctcgaagtaaaatcagcattgacaaaaattttgagagcaaaccatgacgtttttgtcaggtaacatgaggatatggtctggattgatccctctctaattttgaaatcctaaatattgatcccaacttccgatcagttcaacaaaagcgaaggctattggacaaagagcgagctctagcactaaaggaagaggtagagaagctacaaaataacaacttcataattgaa

SEQ ID NO: 233417 - DNA, 921 bp, Cannabis indica
agacaagtgtttgggaataataatgttgatgaaacaaagcttcatgagcttaaattcttaaagatggttatcaaagaaatcatgagattacatcctcctggacctttgttaatcccaagagaatctaaagaaagttgtgtcatgaatggctattacatacctgcaaaaactaaagtacttgttaatgcatgggcaataggaagggatccaaagtattggagagaagctgagaagttttaccctgaaagatttattaatagttcaattgattttaaagggaataactttgaactcattccatttggtgctggtcgaagaatatgtcctggtatatcatttgccatagcagatattgagtttcctttagcacaattattataccattttgattggaaacttcctaatggaataactcatgaaaatcttgacatgactgaggtttttggcatgactgttagaagaaaaggggatctctttgtaatcccaattcctagaaataatcctttggttattggataaaaacacatggagatacctagaaactttcttctactatgcactactttcacttatgatctaaatttgccatatgttcttaatttcttaattttatctatattttatgtatttcttttatcaggttttatgactagctacttgaaataaataaatatgtcactatattgagtactactagttttagttatgacaccaggcatgatccgatgatcaggtttaataaaatgtataggattgctcaaaatttttttcttttaagaaaaactgaataatttaggatgctaaggtttcaacctacgtacaatcaaggtaaatgttgttgggttttatgccctaaataaaactcatttcaatataatcagattcatttattaatatagatcagaaataacatttaatgtt

SEQ ID NO: 233418 - DNA, 837 bp, Cannabis indica
ggcattaatttgggacaaagcactttttatatccgactcagtaaacttagaaagtaggaaatcattttgatttctactaactttaagtggtacgaatcgttggagataggcaatcatatctccctcatagtctttggctgaaaaaggctcttgaaagtggtcataaatggtcatctctacctcttcctttgtgcttatccacttcagatttttatcaaatatcccacggattctattcttttttcgcctcgaggatgctttttggtggaagtatttggtgtttctatctccatgggccaaccataattctctgcttcgttgtttccaaaatatttcctcctttgccaggtacccattgatatctctttctttcaccttgagacaagaaaagccatgaggagtttggtctcgagataacttttctatatcttttttcaattcctttattttggcttgattgtccctcctatgcttatgattccatgttccagtaagttgccacatagctggattctctctccaaactctgcggaccccctagtacatccattttgccaattttctgtgatgatttgtttacattcatccatgtcagcccaggccttttcgtagtggaaccgtgagccccatctttgtttagtctcctcctcattcgacatggaattaaaggtgaccaatagcgggcaatgatcagaacaccatctacttaaatgtttcactttggctactgcatatatcttccaccaattgttatctaccatgactctatcaagacgctcaaacaccatattcgttgcccttccattacaccaaatgaaattactgccttccacatct

SEQ ID NO: 233419 - DNA, 1021 bp, Cannabis indica
ctcaattctctaccatttatttgtccataatattcccccttaagatgatataggtgcaagggatatggctctgataccatgttgagaatcatgggggcccatctcaaaactaattggcaatgagtggagtagcctgtattcttatatatgggtcaattctctaccatttattctatgtgggataatgttcacaataaaaacatggattctcatcagcttgagtcaaatagcaagtatttgaaatacttctttgttacactatttcagaaatacaaaaaagcaatatcctataaatattataatccatacaaaattataaatccaacaatttttaatttaataaaatcgaaatttagaatcagaagttataaataaaactacacaactaaacatttatatttttaattatttatgttgattattggttgttgttttactcctataaatgctaatggtgatgctcattacttagccaatgtgactttaagcactaaagtctatattggaagtgctgatatggcaaacttgcctaatcttttgtaagtcattgttgtttgaaggataatccactaacaaaaagaaagaaatatatttatatttttgtaataattataaactcttaaatgatttacgggtgcatcttccacacatatccatatatacataaccataaacccagccgtttggtataacatcccattggtagagaagggtagagtcaacaaaagtttgtccaataagagaggcttttgttgtattaaatttaatataaaattacacacacatgaatgtgttctttaataatttcccatctactaagggttgcccatgtatatatatctttgaccatacaatcaatgaatgaatttggcttttaattaatatttatatatgcatgattatgtatttaggaatggctttaataaatgttatgaatatgaccattaaaaaatctcccccattttttcattaagggagataattttttttaatacacttggttttgggtgtaatatatata

SEQ ID NO: 233420 - DNA, 652 bp, Cannabis indica
cagattgatcagaccagacttcttaacagtagaataaaaattagaatcttccaaccaggtattttcaaaccgaaacctttattaacaaaactaggtacagatacgaattattatcaagaactagcttaagagctctatgatccgagccataaaaacctaggtggtgcaaagagttattaggaaagagatcacaccaagactcagagaaaacaacccaatctaatctttctttaacactagaattacaccaagtgaatttattaccaataaaaggaagagtaataagagaaaatttattaagaaactcaacaaaagaagaggaaacagaactagaactaacacgatcaccatatttatcactactaaacaaatagctattaaagtcacccatgataaccaaaggaagattaggggcattataataaagcttatccaaaagttcccaagtaaaacgcctagtactttccatcggggaaccatagaaacaagtaaagtgccatatatcattagatttaaaagagatattacaatctatatgattaagggaatagtttaaaatatttacattacaatcagctttccataataacattaagccacccccaaaagataatctagggacttctaacccaaaatcaaaacccaaagaagt

SEQ ID NO: 233421 - DNA, 815 bp, Cannabis indica
aacaagtcatgcttctccattattgcccaaatgtactttgccaaaactgacctattccattgagctccatctctaaaaccaatccctccaaacactttggggagacaagctttttcccaagagaccaagtgcactttacttctatttcctttagtaccccaaagaaatcctctacaaagtttctcaacctctttaacaacactttgaggaagcacaaatatactcatccaatagtttcttaaccctagaagaactaaatgaataagctgaacccgaccagcaaaggaaaggtgcctcgttgcccaggtatgaagcttgagttttatcttcttcaggataacatcacagtcttcaagtttccatttggttggccttagggggactcccagatactttagaggaaattttccctcttcaaattgaacttcatgcaaaatggccaacttctcatcttccggaacacctgccagaaaaatttgagactttgacttatttgcctgtaatcccgcagcattgctgaaatcatctagggcattctttagatgcctaatagtttgcacggttcctttgcaaaacaaaattagatcatctgcaaaacataggttagtaatttgcaattgcttgcagagagaatgaaatctaaaagtatcttccatggaggcaactttcaatcttcgagttaagtactccataaccagaacaaataagagaggggatattgggtcaccttgtctgagccccttagccccttgaaattttccttgcaacctaccattcatcatgacagtgtatgaggcaccctttagacaaatcat

SEQ ID NO: 233422 - DNA, 1731 bp, Cannabis indica
aaaaaataaattatattaattatttttttgttattttttaccataaaatagataactactttaaatgggttattgagtttgggcttatttttttatttcaacttcacaatttttttattaggcttaataataagagaaatatcacatttttttaataagtaaaatctaattatcctaatttaatttatacattatgtttatttttttctttttctaaaaagttagggggggccatggccactccatagatgtatgtagttccgccactgatataaaacaaaaattaaaaaattatacaagatttttttttaaaaaaatataaatgaaaaaattaaataattattgaaattaacacaaaataataatgtaattaaagaaaattttgaaaaaaaaaaatagtaaaaaaaataatttttttaaattaattaaagttaatttttttttctttaatattgaagtgcaacaataaatttgtgggtacaactcccatatattttaaaaataaataattaagtaattttttttggaaaaaagaaataattaagtaatttaaatcaagttcatagcattgatttatcaagaaagaaaagagagagtgagagcttaaataagcataatgtttaatgattttaataaagttacacataattaataacttaattgtaggttaattataatatttttctccaaactattaaattgtgcctttaattttttaggcggttaaaaataacttccgaattattaacattgttggatttaagaacataagttcaaagagcataattgagttcatatcaataaaaaatttggtacatagacaattgtcacgttatgcacccattaattatgaaattgaactaaataaaacggaagttttaacaatcttaatagtttagtgaaaatttaaccgcgaaaatataatttagtacatgtgaaagtttagataacttaattattatactattattacttaactaagattttatgtgaagagcgcagacactacagccaaacaaataaatcaacgggagtgcttgacaagttgtagatcattccaagttttaatttcttacgtactatatatatataaatatatgtagtgtcatatataatatattgaaggtaggcgcattggagtaagtttgagagtaaaaagctctgtttttggttaaaaatggatggtggtgatgtatacagagcagggaacagtttaagaaatagtatgagaaatggtagcacttccttatggaggaacaataacatggaagttttctccaaatcttcaagggaagaagatgatgaagatgcccttaaatgggctgctcttgaaaagcttccaacttattctcgtttgaggaaaggaattcttactacttccaaaggtgaatccaatgaggttgatattcatgaacttggctttaaagaaagaaagaatttacttgagagacttgttaaagttgctgaggaagataatgaaaagttcttgttcaagctcaaaaatcgtatagacaggtatatattaaaacatataaataaatatgtatatattatgttattattgttataacataattctaatttgttaaaaaattacagggttggacttgatgttccaactattgaagtgagatttgaacatgttaatgttgaggcagagattcatgttggaagtagagctttgccttcatttattaacttctccattaatattgtcgaggtaataataat

SEQ ID NO: 233423 - DNA, 1237 bp, Cannabis indica
cacgaaactcattatctataatacaaaaccgacaaagtcataataaaatatgaactaataattatccaatcttgatgaaaaatattaaaaaagttctaattgttaataagcttcactcattatcttcatcgtcgatttgctctccatatatgatcagcaatttcatcacgaacatcagccatttcacgaatttgatctcttgaaatactaaactcaacactatcattcaaaatttggtgggtgctttatatagtagcattttgtacttcaggaatgtcttcatctccatcaaaatatatatctttttttgcatttgtccttataaaattgtgaattccacaacaggcaatcacaatgtacttctgtatttaagtcactagaaatgatgtcgagaactataaccgaagaaaatcccaaaagaatattgcaaacaattagcctaacattttcattctgcagtgaaagaaataagaattcaagcataggaagcaaaaatatgagtacatatttaagaccactcatttaatttaagttgatttgggcaatccaaacaaaaagttccatttgacaaatgatctaaaccattgcaatattgtacagttagagtaaaaaagataatatttttttgaaaatgcccaactcaaaagtcattgcctgacaaacatgacaatccacacaccaattaataagcttactggaaaaacaagtagagcaacttcgtaacatcatagagaaaaagaaaaagctcattttgcaatataaaaaagagagactaaactggaagaacaatttacaaaggttctataaacagctttggcatattattttgtgagtcctataatatttcattactgaaaagatttcgtcggttaatgcagaatcaggtgttgttggctactgctgaaagtagactagcagaagctagaaagcaatatgatgttatgttagaaagtaaacagctggaattatcaagacatttgaaagaattatctcagaggaatgatcaggtcttgtatcttattatttactaaaaaatatcattatcaagcctatgtaagctgtacaaatacttttggattgactcaatatggaattggattaggcaattaatagaaatatgaggcagagaagttagaaattatcaacatggaaaaggaaaaggtaagcctatttcataatctctttccacatttttaatagtgaatcaatatgaacaggggcagaagcaaagacaaac

SEQ ID NO: 233424 - DNA, 621 bp, Cannabis indica
caagtcaaggacaagaaattcttcataggagacctggtgtaatgccctaacaataggaacgccataaattgcgactaaaatatatactaatcttgctaaaccgggatttactagatctaagagctgaatttaaactttaaaacaaatacaaaataaaaataataacttgtaattattaaactttaacataaaatcaaaagagtacattctatcctgggatcccgataaaactttttcaaaatattacaagttatcagtacatgctaacctaagcagtataagttgggattacactttttccccctggtacacccaacccccatggtctagcttggcttgaacatgtacaatacaccgcaaaagccctcgacttcatggctgatcaacaatagatttaccccttccagcataatagagcacccatgaaccaagaccgagcaaaatagtataaacaacaatatgaatattaatttaaatcacttaatattaatgccactgatctattgtctatttgatatagacctacatgttacgctcacacgtctatttacaataatgccttagaatgatttatctcggttttgattaccaagtcaagcctaattatgccttgagcgcata

SEQ ID NO: 233425 - DNA, 855 bp, Cannabis indica
attcccactcttcctatgaatgttattacatacagaaaacttatgtttttctacttaatttccttacctcgaatgtggagatcctagattgattgcaaaagtgatctttgagaaccaataattggtttatgagaaacctagatttcatactcattaattagaacatattatgatagtatatatatatgtatacgaaactttaaccttgaatctacaacctaaatcatataatgctataccttaattagcttccaatgagatctagttgagcactaaaacttgaatgtaaaaatagtgatggtgatgccagtatatatatatctatatgtatatatatgtgtgagaaaaagatgatgatgtatagtgatagtttaatctagagaaaatatatacatgggattatatgattgtggtggctgatatgtttatagagcttttgtggaacaagatatgggatgtagagtatcaaactttggtctagatagaatgtgaaggatgagagagaagaaaatatagacccattagtgtgtatgagagagattaatcttgaaagtttggctttgaagtgataaatgaggaagtaaggttctatatatatataagactttaactaaccatactcacgctctccactaactacatcactaattatagttaaatttaaaataaataacaaattttcaaactaagagtcaccttcaccgtagtgatctccctatgattcttttatcacttggtcaaaactaatgtgcatgatatatgctatctacgtgtaccgaaataagttggtacttagtctttatatgttgagcggataaatctcttaggatctcacgtgtaatacattttagttaa

SEQ ID NO: 233426 - DNA, 664 bp, Cannabis indica
attaaatcaaaacataaaatacaagtttagaacatatacctcttgatgactatcatgatatcctcaaaatttctcgtatgttgtatcttttactccagatgatggggatgatgcaagtgaactcacaccagcgtcttccaaattgatccaccacacacaaggaatagtgtggactattagaataaagtgtataatgtgttcttgttaatttctcaacacatgaacaataacaatttgagaaagaaaactatttttcttctctatattttaaaaatacatattcaaaatctcttctgatttcttaaatcaaactactatttatagtagttaaatctctattaattaaattatatttaattatttaaataaataaatatctataactgtattcggttactaatatttataagggaatctcttaactactcaagagaatatctcaactactttgaaatatctttaaccacttttcaaattcaaatatttatctgattgaatttattaattaatctaaaaagacaaaactaataggaacaccctacattaaggataagtgcctaccatgtctgaattaagacaaggattaattgtatcttttgtcctgataacttttatctcaacaaatattatcttgacaaattttatcttaacaacttttgtcttt

SEQ ID NO: 233427 - DNA, 1588 bp, Cannabis indica
ctggtcatgccttttgggctaaacaacgatggtgcaacttatcaaagaatggtgaaccggatgtttaaaggccttctaggacggaatatggaggtgtacatggacgacatgttggtcaagttgaaagcatacgccagccatgcagatgacctagaagagtgtttcgaagtggtccagagatacgcaatgaaacttaacccaaagaactgcacttttggggtcaaattgggaaagtttatgggcttcattgacagtcagcgaggaatagaggcaaaccaagagaaaatccaagctctctttaacatgccttctcccaaaaaatacaaagatgtgcagagcttaaccgaaaaagtggctgccctgagccgttttatctcccgatccagagacaagtgcattcccttcttcaacatcttgaaaaaatatcagaaatttgaatggtccgacgaatgcgaggaggcatttagaaaactaaaggagcacatggccaaacctccaatcccatcgaaacccgttctcggagaggacttgttccaatatttggctgtctccgagaatgcggttagcgcgaccttagtacgggaagaggaaaaaacttagcatcctgtgtaatatgtcagcaagcgcatgataggggcggagacacgatacccggtgatcgagaaactagttttttgcctcctaatggcctcgagaaaactgagaccttacttccaagctcacccaatcaaagtaataaccaaccactcgctccgacaagtcttacaaaaactagaagcgtctgggagacttctcaaatgggccatggagctaagccaattcgatctgcactacattcctcgcacttccataaaagggcaggcgctagtagacttcatcacggagtgccacgaagcagaggctaacgctaacatacccacaccgcgagtcctagcgtggaaagtatttgtggacgatgcctccaacgagaatgggtccggagcgggggtcgcgatgatatccccgaacggacttcgagtcctggcatccctacggtttgaagtcacaactactaacaataaggccggatacgaagccctgatagcaggactaagattggcaaaagtcgtgggagccaaaagagtagaagtctacagcgattcacaactggtagtaaaccaggtatcgggagaatatcagacgcgcagagaaaaaatggctgcatatgtggcaatagtctgggaactgctccacgagttcacggactacaaagtggaaagaatccccagggaaaagaacgctcacgtagactatttggctaagttagcttcagactgtgaaattgagaaactgggggtggtacctgtggaacgcctagcggagccaagcatcaaagccaaaaataccatagcaacagttgagcaagagcccagctggatggaccccatcatcgaatacataacaaaatgcgagttgccccaagagaagacactatcaagaaggatacaatatcaagcgcaccgttatgtgatgatggacaaaattctctatcgaagaggactccggatgtcgtacttaaggtgtgtatcggaccctgaagctaagaaaa

SEQ ID NO: 233428 - DNA, 822 bp, Cannabis indica
aattagtgattaggcaattaaaagtaattaagtacgaatgaaatagaatacataaaaattgagggaaaattaaatgatattaatgaatcaatgtcaaacaatcataattgtattccaaaaaataataataaataagaaaattaactctaaaaataacataaataataggctaaaaatatgctaacaaatttccccaaactaaatccttactcggccttgagtaagactaacaactaaaaacaacacaacctaaataaaataagtcaatccactgaaacacaaaaaattttcaagtaagataaataacatggttatgaacaaaaatttcaccaataataattcacaatttcagttcaatcacacctttgattcactgcaatctattcagtgcatgaaaacataattagcacttaactaacagttgatacaatttatgcatgccaattacaaccatcaatccactatcctaaaaatattccatatgcttgctatacttactattatccactaatataaataaatgcataaccaagaatcaaaaggtttttctaggctggtaatgttaggcttaggtacaggtagttaaaatggtcatttaggcttgccaataccataagcttttccaatcatgtcactcaaaataaatttttctacacaatcccaataccccaatttttttctaattatatgagagattttttttttcaacaatattgtaacaacttattttttctttccttttttctttcgaatttgacacttattgtcagatttttttctcttttttttttgaagttcctgccaatcaattttttcacattc

SEQ ID NO: 233429 - DNA, 760 bp, Cannabis indica
tttctaaaaatataacttaagtattattacagccaaaaattaaaattaaatatttatttgcaactgagagttaaagttaagtatttataccacaaaataattactcaaacttttaataggcttttttaactttggtttgagcaataaaaggtggagggatatttttgtaatataaaagggagagagtcttaatacccaaaaaaaaaaaaaatctaagttgcacttattaaacgtatatattttattttaaaatttgtattttaatattactaattaattaaatgcgaaataataaatatgatactgaaataattattctgtaactataaaacataactttgtaactacagaataaaattagaaaataaacagtgtggaaaaaataaaaaacacacaaaatttttgtgcgtgatatcaacaatctatgcgaattgctactagttcacggggccacaccaatttattagatagatctaaaaaatacaaattaattaacttatgcctaatagaccccctcttattgtatctcataagcttgatgtattccaccttttaatcgaatcttgttgaaacttcaagtgcttaaactccattcgatctccttgaagagtgattgcttcctcatgaggcaagacttgaaaagctatctcccaaaagtaggggtgtactttagttgatttggtcggattatgctacattttatccaacctaatgttaagaccgggttacaaaaatttaagtgcaacccgcccaattaaga

SEQ ID NO: 233430 - DNA, 1518 bp, Cannabis indica
ccggggtgaacaagaattggggaacgacttgcactgttcaggaaattattaaacgagacatcaaggtgtcttgataaaagtacttaaacctagtttatgaatagacgatctaaatattcataaaagcagtaaaaaataaatcattaaaattatattcaagtttgcgtgaaatagattataactgttattgcgaggcagaattgataactgctcctagatcaaaagcatggcaggtaataaactgctcgcacacattgtagataattaactacttagatattgttagcagaatatatgtgcaatggaaaggcctaaagtattttgcatttgatcaaaatatagttgtttaaattgtgaataaaaacgcaagcatacaagtatatattaaagttcaagcataaaagtacgaagcatttaataaagataaaagcaaagttggccattaaaccttacaaatttgtctttacaagaaaaaaaagtgccacaaggggcaaaccattgtctcgaccctagggccattttcctatacaaaataaaaatatgtaaaaaccaaacctacatagtaggagacttggacggatcttcttcttctgctgcctcagcctcttcctcctctaatttggtcttctcatagaaggcaagaatttccttctcttcttcctccaagaaactcgtgtccatgtcttgattttccatccaggctcgataaagggtacgaacccaaacgtggtgcaaccgtcttgggtgtcagtctctttcccatcaagtgtcaccttggcagctgcaagttcctctttaagcttctcgcattcatcagttttggcctttgtcgccttctcggcatcttcaaggctcttcttcatcctctcgaattctttggtaaggcgagtaatttctagttggccatcattccatttcttaaccacgacctcgtgttggcctagtgagttatggacctcactctccaagtattttatcttttctaagcctcgtcactaggcgaccgaagagaggaaagaagcctggaaattcccaaacaatgatgtatagaaaaaaggaaggagaagaaaaataaaagaagtgagcagattaggacaaagaaacttacgaagaggctgtgtgacaaactcctcgtaagcactccatccaaatccccatgattgattaaatcccaatcatggggaaggagagccttgaactggcaccaacatatagccccaaactcttgggtgaactccgagccagtctttcttgcctcgacatgtagtgtttcaatggcctggctcgagcaggttgatgcttgagtcgctttagggggaggctcgtcggtacttacggttaccggaggaggaattggatcctgggtttcagtttcagggaccttgaggttaacggcttgagaggatttattctttatagtggtggttctcctttgccttttaagggctccacttcgggatcagaaggagcctccaaggttttctgcctcttctttcctttcctctgcatgagaccctc

SEQ ID NO: 233431 - DNA, 758 bp, Cannabis indica
aataatctttattttcttttattcaaatttttttaaaaatgacacttttgtcctgaggcctctcagttcttgtgataaacttaattcatgatagatgcttgaccttccttttatttgcctgtcttttaactatttgtatattttatgtttacaaaatggtctcaacaacatatagagcaggccctcttgtagagtatgaaagaagaattgcctcaagtgaacttgttgatggtgacttgtgccaggtataattttaaagagttttaagctttcaaacaaataatatagcttgttactatacaacatttggaatatttctttgtttagttatgcaaaaatgtgcagttacctttgagattcagccttaattgtcatgaaattttgagtaatctacttcccttgattggaaatcttagattcactgatgcaatatttgttgcacaatccaaacctcatgtttatttaataaatttttggcaaatacataaacatggctgctttggatggacaatagcagaatcatgatagttgaaagtggcaatactaagctctgaatatgaatttggttttgtctgagaaaagatactgacaccgataattgcagctaggcacattaagagagcttcaaaggctctacgatgagcttgttgattcagctaatatctatcgattgaatagatacatagcttccgagaaagttggaaggtaactcttttgttctcattctctctgttttgaaccaaatttcctactgcttt

SEQ ID NO: 233432 - DNA, 1288 bp, Cannabis indica
aaatctcttccatatatatatatatatatatcttttgtggcattttattaatttctcgacaacccaggagagtacacttttttttttatttaagcgtgtatatattacaacatgtttaacttgggacccgaacccaggacctccaatactcacacactcacctatggccacagccaagagagtacactagattatatcatcttatctcttcatgtatttttttgttcgaaaattacaaaacaaatgaaaaagatgcaatcttcgtgtatcgcatctattattattgttgatacatacacaaatatataggagatatatatacatgcaaacatgatgttacaacaaaaatatgcaggaccacatactcaatacatgatcctaattaaataatatgtgtcctaaataactatgttatagtgatattcaggcatcttttaaaatatacattctagctagctaccatatctggcttcattattaactatttcttttatcatcacttcatcccctcaaaccaaatttgagctagacttcgttaattaaattgtacaactaaaataaattgctattttcaagatttttgagacttcatcatctacaacaaattattatttttggtgataatcttttagtcacaatataattttttgtgactaaatgtgacttttagttacaacaaaatattacttgtgactaaaatatagtattaaatataatttgttactaatttaattttaatcacaataaaaattgtaactaaatatacatttagtttagccacacgaaccttttagtcacaatatacgaataatgatttataattagtcacaagttttgctatgattaaaagtaaaaaattttgtagtgactataagcatagacaaactagacatgtagctaattagtcggccccaaagaaattcttttaaatatgtatacacattaatttttttattagatttgaaaatactatttctttctacaataaaataagggccaaactttttttcttagtccactaaaattcaaggccaactctggacttgatcttaataattttcctttaacaaagacttgataatcaaagtctccttagagagcatgtcccatcaattaaattggaacgaaagtaaaaaaaagattaacatggccactctgcagcaaagatgacacacaaatcaactttacaataaacagattgtgcaactccttttcttgaatgaaaaaaaatatcaacctaatattgatattagctaacattataaacagaattaacaacagttggcat

SEQ ID NO: 233433 - DNA, 860 bp, Cannabis indica
actattaatactaaatcacaataacaagccttaaccctaaatttaaaagcacaaccatatcctcctaatcattcctctcttaaatattgctttctctctccctctacgtctctctattctgttgctattcatgcatggtttgtatattttgcaatataattctgttactattgaattaattatgcaatgtctttgatgatacaaagtagtacatctaaagtaatactaccaatctcatatatatgtgacataatatatattttgttcttttttcaatacagaataatcatcatctactacacttgattcaacacaaacattgacgatttttgaagccaattgtcaacacaaacattttgaggatttctgaagctaattgatcaaattgttaataattataattatgtggtaaggtatgttttattttattttttaaacattaattatctcagtctccttattttaatatacttgtcttcatatcgtttttttgtttttttgttttgtacttttgataattttatatgatatatttagccataattgtattttatttttttgtgatgatagagcactggattttttagattggatcattcttgtaactaataccattatgtgttgaaagcattaaagcaggatttatattcatggtcaatatgctaataattaagatgtgtcgttgtaatttatctaaactataattattatagagtgattctacaatgcacctccttaaaatggatgtattgatacattctctactcgtttcggcatccaggaaatattttttagtctaatttttttcatattcatgtacgttatagctatttgagatatcctacaaaattttaagaaat

SEQ ID NO: 233434 - DNA, 690 bp, Cannabis indica
aaattattagttgaattttttttacaaaataaaattgaataataatccaatataaaaattttgtaaacaagactgagtatattttctatatttgtttgttaataaaaaaaaaatcaatatataagtgtacaattaatgatatgtgtatatataaataatatgtacatttgatatacatttatgtaataatttatttttctcacaaattgttttattttaaatggatctcactagtcaaaagtcatttagcatataaattatacgtgaaaaaaatcgcatgtaattaatatatgaacatatcataaatgattccttatattagtaacattccttcaaaattaagatctttaaataatctgtcccctgtcccataaaaaaaaaatcaataaaaaataataatatgccaactttattatttattatagtgttttgtgtaggtctaaaaatatttatatgtatattatagaaattatatgacaatttgtgtttttgtggtgtgatatgtttcagacactatatatcatgagcacctagtcatatcaacatcctaattcccttcctaagtaggaacgtaacatatagaggtcatacatcatgatgactcgataatagcatctcgataatagcatctccaataattgtatctcacgaaactaaaaatatacacgttatttaaaaatttaatatttt

SEQ ID NO: 233435 - DNA, 799 bp, Cannabis indica
ataagtaatgaaaataaattgtttctttattgataaattaatttaaaatattacaatgaaatagagtcttatttaacagtttgaccctcgagcttgttactcactgagaatctagttaataactagctgtgaatcactgtagatctcgagtgacttgactttgattggtagtgccaatcgttgtcctgctaggagtgccttatattctgcttcattgtttgttgcggtgaactcaaaccgcaatgcactgtgtgttcaaaatcccttgggagtaactaagatgagcccaacactagaaccgtgttcgttgaaggatccatctatagtttctaagaaggtccattgtcctcttgcgctgcagtcttaggcgtgtggacctggtcttcacaaatcatgtgattgtcttcttcgaggccattacattcatcaatgtagtctgctaattccttccctttgattgatgttcgagattggtaggtgctctcaaactaacctagctcaactgcccacttgagtaggccccctgatgcttctggcttcattagaacttgcctaagtggcttgttgatttatgttactacatatcctatatatgatgttataaataaaatattttaatcctttatttaaataaaagaaaatatcttttttgatttgaattagaactcaaattcaaatataaatatctaataatcgaatgacaaatatcaaatagatcttttattttaattattatttttttaattaaataaatatccaataatttatttaattactaattaaaagataattagttaat

SEQ ID NO: 233436 - DNA, 1726 bp, Cannabis indica
aaagaggagtctggtctcgagtttctaggtgagagaaatctcactataacactcatcaagtttcttcttcataaatctttgaggataaggaattggcggtttatacattggaagatcttctttcttcatagactttttaggaggcttatcttcacgagtctcttctttggcttctactgtgtcttcaacctcaggaccagttgacttgtcttctacacccccatcaagtactttaccactcctcagtgagatggcattatattgttctttcggattgacaactgtatcaatagggaaactactattttttttcaaagcactcacaacattggccagttgtcccacttacacctctatgttcttcatggaagaatccatattagaaatatgagtttctatgttgtccaacctttgcttcattcttattaaacctcttgttggattctatcataaaagtacccataatattttctaatgatatcttttcaggttgttgttgtgcattaaatccaggaggtggttgcaagacatttttagtgttaccgtacgtaagaaagactctcatggtttctcaattccagatggtagtagttaggcattgaatttcaccgatagttgttattgtaaggtttattagccatatattgtgcttgttctatactgatccaaggctcttgtgatgtagatgcagcaacaacatttcctacaattgatgtattcttctgattaactaaggctgccacttgattagataaagcaaaaatttgagctgctatatttgtcataggatatactacatgtaatcaagccacttttataggagtatttctttcattaggccaatcatagctattagtggccatctcttccagtaaattaatggctttagttgcaggcttagacaataacgctcctccagcagcagcatcaataatagtcctagttggcccattcaacttgttgtagaaaattgagacttgcatccagctctcataaccatgttgtgggcagtgacgtaataagtctttaaatcgctcccatgcttcataaagttgctctgaatctacctatctgaaatgtccaatctcactccttaactgtgcagactttgatggagggaagaatttcaccatgaactttctggccatgtaatcccacgtagtaatagaacctggctgtagagattgcaaccaacttcttgctctatcccttaaggagaaagaaaagagttgtagtcttatggcatcatcagtaacaccattcatcttcacagtagcacatacctccaaaaatatagctagatggatattgggatattcagtagccaagccaccaaactgattttgttgcaccatattgattaaagaagacttcaattcaaaattattagcagcaatgactggattaaaaatacctgtcacattttcataaaccataggtaagcaataatcacgaacaacacgtggttgtgcatcaactgcagcaggtgctggttggttgttattaaggccattattgttattagctgccatggtgaagtctagttttttttcgcttttaactactttagagttctttcaatctctggattcagcggtgtgagtggtgtggcacttcaatttttttgcataaactgaaccacaaagcaacaaacaatataaagaaacaaaataaaatctaatttaaaagcaaaaaacttgtagtaataatattagcaataatttaa

SEQ ID NO: 233437 - DNA, 1459 bp, Cannabis indica
ttttttgaaacattagcaagagcatcccccatacacacagcaacaccctccttcggcccaacatgcctaatagaaacttccttactagtccgtttacatttagagtccaaaaagaccattcccacctcttccaaatttgaattactatcccctaccgcctcccatcttttactcccattattgtcgctcaaaatagctggagaaaaaataagcccacaattttctccatgattcgtgacaaccgggttgacagcaccacccgatccctaaaaaaccggccatgtactcattgtcgactgcctaggcttagccaccaacagtggatgagctaggtgccccagatcgaagctatttagcccccatcgcaaactgagtttgttggggcattgccttcatgaacgtgccataaggtttaacgattgatgtggttggttgaataaacaatcgagaacaaaactgatctgtatgcttaatcaccccacatataaagtaaaaagtcggcacaaattcatactaaaaattaatccaaaaccagtcgccaccaacctgttgcagtttcattatgcgcttcaatggtttttcaatgtttaaacgaacccaaacccgtaaataatctctccaaacaccattaaaattattctcaccggacttaataaatctaccaatataattcctagcatcccgaacaacccactctgttttgaagcccgacctaatatcatgtagttgcacccatatatcgagatgatgcgaaggaacctcccgaggaacatcccctagtttcagccatttaaagatgagatgagcattcttgaacatccaagggctcctatccatcaccctttgaatgccaatttcatgatagaattgaaagatatatttcttacctcttaactccttcacatacatgcccataccaggcttccaaagcacagccatcatgtttcgcatcaccatgaaatcaattggcgtattcgtcaagaaacatcccacaatactccatcgagtatcaacctcagcctcgtcaataaggggcccctcataactgactgcaggctcttcctcctcctccagaggaatgatcgatacatgctccaagctaaggtccaccggagatgacgatgaagccatgactgaaaccgactatcaaaacaccaaaccaggaacaaacgcaaaccaaaaaaaccaaaccaggaccaatcacaaaccagaaacacaattgcaaactagaaaaagctaaaccatgaacaatcgcacaccaagaacaaatcgcacactagcaacaatcacaagctagaaaaaaatcataaaccagaaaaaacaggaaaacctagactctcacaccatgtcacgaaggacaagacatttagaattttgattatatcgattgacaaccgtttgacagttttaagtgggtcctcaccaataaaatattagctgaatttttaaaaatactatt

SEQ ID NO: 233438 - DNA, 1480 bp, Cannabis indica
aaaaatagtttgaagttttcaaaacacaagtctctttggttagtttttcctaaatgagtaatttacggcataaatactaagtttaactctcagttgaaaataaatacataagtttaattttgggcggtaataatacttaagttataattctgtaacttttgtaggtattgttatacctgaaattcagctacacttcaaaggatgacatgtgtcaattagtggaatatgaaccacttggtataataatgttatatcatttaatacaaaaaagaataactcattaaatataaaattaataaagtatattcataactccctaaatgtatagttttaagcgagacaaaaatacaaaactattaataccagtattgacaagacaccaccctacctcggagtacacagatccaaagagaatatttgtttattttaatgggataaatgaaataactcaaagcaacttcggactacatatagcgaggtattcacctcactattcataagaaatattgacgaggcgaatcatttgttaaacacttagcgtattttccacattacaataactacgtgtaaaacttggaaatatacaagacacaattgtccttatggtcaaagagcatactggtgctcatgccattgttggaaggcatataattatccaaatcagcattgatcatctatgagttaagcgatgagctattgtccagatcagcatctaccatctttgaagataagaataataagcaattatgtagttaccaattgttatataacacgtgtttaaatgaaacgtgatcaattctcacgtttcatgaagcgattataatttgaatttaaaatgtaaataactgccaacttatattcctacaaatagggacagatttaatagaaaaatggagggaaaattttggagagaaatatgaaaaatactatcaattgtatattgtactcagaaatatcttaaataagatggactcatgtgcagatttaactacaaaaccacgtaaaaatatctggtgttgttaagtgttaagtaaattaccacgtgtcaatttctaattggtctaagtcattaaatattttttttttaaataataattcaaataaaccaaaaaaaaaaaatgacacatgcataatgatttaaaatttaacagtgaggtatctacagagttccaaaaatataacttaggtattattactgccaaaaattaaccttagatatctatttgcaactgagagttaaacttagatatttatactgcaaattactcttctaaaattaatattgaccaaaagtgaattattttataaaatagaaaataatattttgttgttaataaaattcttgttttttgtaatttttttttaaaaattatttttaaaaaacaagacaaaacaagcctaattattttttaaaaaaaaaaacaattttttttagttatgataccaaatgcactcattatctctcaattttgattcttcc

SEQ ID NO: 233439 - DNA, 976 bp, Cannabis indica
ataggagatccttgaaccttttaaaaacacacacatgggttcaaatttcattatatttctcttacagtcgatggttatattatacttttcaagttaatccactcccagtacaacatctaaatcttttatgtctaactcaattagattcagcgacagttctctaccttccacgtgcaatggaagggacctaattcacctatcggagataaccaactccctagcagctaacaaagtaccaaaactatttggtaatacatcactagacttattcgaactactgatcactctactcgatacataagaatgtgtagcacgagaatcaattaaaggagacaacataataccatcaatagaaatttgacatatcatggtagaaggaccaacatcggccactacttgggtcagagaaaatacttgagcaggaactagagcatcctctttcttctgttctagtatcactatttgtagataatttatgttcatgtggcctactactccacgctcgcagcaggctcaagcttgacattttccctgatgttgtattttaaatctaggatacttaggataagttctctggtttttaatcctgccccaacggaaaccctaattacctagaaatttcttattgagacttgtggctggtggatcattaagtatttttcttatgatcattagggtcaacacccctacctagacaaacatttggagaaaacctccaagaatctcttcttatgttacttttcttcaaaatctattctttagcacccatagcagtaagggctaactcaaccacttcagcataagctcgaacaaaccctggttgtttagtagctacaagcacatcccgtgtaatatgttcctcaaacccccagataaacttagcctttctatagcctcaccggaaactttatcacaagcaatttttgcgaactagtcaaatttggtgtcatactgccctaagttagtcgtatgaact

SEQ ID NO: 233440 - DNA, 531 bp, Cannabis indica
aattaatatactaaatactactagatactaaataggttgttgttggacatgtatttaattagctataatgcattgttgtaatattgtacgaaagaaaaatgtgtacgaatcgttttcatttatttattttcttaattaataaaatttgctatcattcaatcaagaagtgaccattgttagaaggcacggcgcactcgtgtcttttttttttttttttatcatactattattggtataattaagtagtaagttccataactaaaaagataaattttaaagaataatattgctaaccaatcataaagtactacctataaaaatattggacatcattagtgtcaatacagtaaatacgaccaattggaagtaagtatgtcctcttaagtaaatttgaagataatgaaccacatgaaattctatttgtacaacttttacaacttttgaaaccattctctatcttcttgaccaatcttttttggtccaactaattactactctatgtttagtttggtccgaaaaacgaattaggtc

SEQ ID NO: 233441 - DNA, 1296 bp, Cannabis indica
tttttaaatctataataaagaaaaaaaaggcacatactacctaaatcagtggagactagtaagtggggatatgtatgtttaaaaataataacaatagttgagagcaattctccaatatttggatttggagatgatatcttatcatcttttggttctttccttaacctgttttgaacctatgttttcatccattattagtttgtacggtgccttttcaacattagcttttaaatattcttctctaacacatatataactatagagcattgctattagacactagtggtgccctttagcatttctcataatgataatataatatatcttccccgaaaattgttttcagtatttaaaaatagaaaacaaaaatttataagaatatttggctaaattttttaaaaacattttttttttaaaaatgtgtttttaaaaaattagaaaacatgatgaaacatcaacaaggacccgtacttggactcccccggctcggatctcaactcgaactttggtccggacctagacctggaactcagactcagactcgaccccaggaccctggaccatgaccgaacccaaactccggacccatacaatccccgagacccgaacttggacccagaaggacctcgggacacagccctgaccctagaccttgaacccgagttcggggtctgagtctgggccgggattcaggatttgagttcatgttcaggttcagattcggggtccaggtctctagtgtgaggcctggctctaggtccgagtccgagtcgaaagtccgtaacgaggtgggatgggttcatgtcgtggtatagtattattaaaaatttttattcttaaaaaagtctaaaaatagttttaaaaaaaataagctaaacaccattaaatttttaacatgacaaaaaaatattttcttttctcatttttgaaaacacaatttttaaaattgaaaactaataatatagcaaaagaaaacctctaagaagacataggtttttttctttcgagaatcttgagatagagtgtaaaagagagatgaacaccagagatttcaaaataataagagaaaggatagagaagagccaatagaatcctaagcacgttttggggatgggacaatcaaggcctcttttctttttaattattgtgttttaattgttggattaaaaattttatgtgggcacatatgtataatgtatatgctattataaagtgtgatacaaaattaagtgaccaattatgttatgggtatcaaaaggatattaaattgtcatggaaataatgtgtagataccat

SEQ ID NO: 233442 - DNA, 698 bp, Cannabis indica
gatacaattctcaagcctttttcttctaattattttttcgtcccttttttagtataacttgcctctatttataattacatcatagggcagttaattacattattgactaatatcttacaacaattattccctgaaattgtcgggtttgattccataccatgtaaaataaatgtgattaatatttaaaaatcacacagctgtgatgggtccgcttttactgggtcaatataaatgtgtattaaataccttgtaaatcgtaatgttctgggatgtctcgatgggaacacaacatcaattaccttggtagcgaggtagagattttcccatatttctccgagattgatgatgtaagcctcatcgtccttgcgctcatgaagacataatactccatctgaaaatcgcatttcttggtgacaaagtggacctcagcagtcaacatcatttgtatgtcagcttctatctgagagagctgactagacggagctatgaaccccattgaaaggtgtcgtaataggtgattcatacaatagatttttgaaggcaagcctcgttctttgcgaattgtggcttggtttgaacctatttttttaacaccatttgcagacccaatgtttttattcaacatcactgttgctcactgaccttttacctttatcttcacaggaatggacataaattttgagagcatgttcaaaagt

SEQ ID NO: 233443 - DNA, 1049 bp, Cannabis indica
atatatttgtgattaaattttatacatatattatttgtgttcatttataatttaataaaataataatataataataaagaatataattttagtgtaatttttagtattgtgattagaatagaaaaaattagtgttaaaattgtagggaaatcacctcatatatatttttttttctctttacgttttagttgcttcaataattgctccgatagtttatttgtagattgttatatgaatttggattgcgatttagattattgggtcaattactatgtagattgttaggtaaattttttttaaaagtacacaagaaaaaactatttaagaatataaaaatataaaaaaccccaaaattttattatttttagggaaatttgcggcaaaagtcctcgaaaagttcagtttgatagagataagtcccaagatcgaaaaatagcggtaataatcctcaaggtgatatttttcgtaaattcgttcatccttttttttaacagagccgttactcatttaaaaataccacgtgttgaaattttattggtccaaattatattttaattaaaataattttaaaaacaaaatatattatttaaaaatcataaaataaataattttttttatcttttttttcttttctttttcttttccttttctttttttttcttattcaccttcttcgtcgtcttcatccagacgcactctcaaccctcaccaacccaccctacctccaccctcacccccgaccagagccctaccccctacgacgaagccttgccgtcaaaaatggaggccactaattttgcgatttctcctccgttagggtttgttgtaaatttctctctctctctctctctttttctctttctttctttcttctacttcttcttcttcttcttcttcattttcttcttcttcttcttcactctcaaccccagttcgctttaatcacaccactaatcaggtctctctttctctgtatgttcgaaacctgaaggtatacctagggcatgttagaaaaattaataataaacccaagatcaatttgtatataa

SEQ ID NO: 233444 - DNA, 875 bp, Cannabis indica
caaaagtcaaccgaaagtcaaaattaaagtgaaagtcaactcttaagaaaagtcaatttgggataaaaaacatgcaaattaagctaggaggctcatctacatgcaaatgatagaaatttattttagtcttgttaaagtgatttgcatagcacactaggatttataaaattaaattttagctcacttcctaacttgtgcaacaagttttctccctcgatagttcaattttttttttgattggatttctaaatcacatttaatttaattatgaaaacataattggaatttctgaaatctgataattgagtaaaaagttatgcacgttttagtcccgaaaatgcaacttttgccactgttagccatccagaattccggttcacgactgaatttgtcttggaatgagtgctttcaccccaacactatataaactcgattttcactcaaaaaatcaagttggctgagcatttatgtcatacagctaacctatccaagtgagattaatgagcttccaagtttaaaattcaataaacaattttcacatactttgaaccaaaatttgtatttattcatcatgagtgtgcttgcttatcactctaggtttctattgtattataatatttctagagtgattttgcttgtaatttcaaacacattttcttattgtgattgaggtgaggttgataccggtattgtaagcaaccctgttatagtgagattgacattacaacaattcgagaaagaggttaatagtcctcgacaatgcgaaactattataagaggtttagaaacaccttagtaaaaatttcccagttgtaagggttagtgaagcccattacttggctcgatattggaactcaaagctaggtccatagctt

SEQ ID NO: 233445 - DNA, 830 bp, Cannabis indica
agtgtaactgagaggttcagagttttcaatctcttctgcagcagcaaaggcaaaagcagtacattctgaagcagagtaatctgcataaccaaatctatctggggcttttgcttcccttctttctctgtcccttgcaagttggtaatcacttagattttcttgatttacattgtcatcctcagattcaactcgagcttccccagtttctgtcagtggtgcttctggtgtatcacagttttgacttggttcatcttgatccacctgaacttgtacccttctattcaaaattgaattctgtccaggtctcatagccatttcattctccttgaacactacatctctactgataatgcacttcttataaccatcttccaaacaccagagcttgtatcctttcacaccatctggatagcctaggaataagcatttcaaggccctaggttcaagtttgtcttgtctaacatgagcataggcaagacaaccaaaaacctttaagtgatcataatttggtttgtttccagtccatatctcttgaggtgttttgaaatttaatgcaacagagggacacctgttgattaaatagcatgcagtcttcactgcctcaccccaaaaatgtttctgcaatcctgcacccttcagcatacacctaaccctctctagaatggttctgttcattctctcagccaagccattctgttgaggtgtcttaatcactgatttgtgtctcttgattccagtcttggcacaataatccttgaattcatctgagcagtattccagtccattgtctgtcctcaaaacctttagtttctacctgtttggttttccat

SEQ ID NO: 233446 - DNA, 1257 bp, Cannabis indica
ttcttttaatttttttttatatattttttagggtcccaaaatttaatttgtcttgggcccatatattttcagggccggccctgtgtatacatataaagatccctaataagaaggactcgtggaatatgtagatttaactacaaaatcacgtaaaatatcttgcgtttattattattaaattctgtagtaaatttattacgtaaaaagtttatatatttagttaacaaaaatctgcattaacattaaggattacaattgtttgttgaatacatacatatattgtggatcactctttgatttgtgtgtccacactagttgatgtgagccaaaggcttagtctccgtgatatgttatgagtggatccagattagtagttatcttcatgctcatgttgaatctccaatgtctcgttatgtattatatttgtatcctatcgatacaatataatgcatacttagttttttttagacatttatgtttcttgagattttttgagtggagacactattgtttagtgaatactagtgttagtataattatgtagtttaagcaggagaatgttagaatatttatatgggccggcaaaattaaacaccattcacatagtgtcattattggtatataaggataactatatatttatgtaatttagaccataataggatgatcggttatattaatgatatttgaggtgcatggtaacgtcttaataattataaattggcccattaaatcatagtctaccactgctagtgttatgagcccaaatattaccatttaactcttagtgtatttaaacatataataagagtttgggatatgttgaaagatatgagatcataaggtgataaggtggtaagagttttgaaggggctgctcaccattagctctctcttgctcttcaattctatgttgttgttttcttggatagatttgatgataaagaaagtttaagatgacattagagaaccaaaatggaatttatgaggcatgtttattattatataaatgccttaaataaaatatttgattttggaaatctatacatacatcatttatcgagtggctatggccccctaactttttagaaaaagaaaagaagtatagataagatataaattaaattattttacttattagaaaaatgagataattttcttattactaagcctaataataaattataaaattgaaattgaaaataatctcaaacccacttagttcatttaaattagttatctattttatataaaaagt

SEQ ID NO: 233447 - DNA, 544 bp, Cannabis indica
ttcagacattttaagtttttgcttgtgttcattgtgaaggtttccatctcgcgtatgcccaaaaagggaattgtagactacagatttttagtttactaactcttcacaatgatcaatttcatcatttattgataaaataataatgtcaaaagaatgaccaaccaatttcttgacatttgtgcaactccaatggtgttgcaatgaaggtggctgtgagaaaaatggtgctaagtgtctaaaaaaaaattgacttttcaatggtatatatagcagtgtggctcctgctgggtatctgctgctctttaaaaattagggactttccgctcaagaactttagaagtttgccccaaccctttacaattccatgtcacacttcccatagcttctatggaggagatgaaccatctcctccacatgggtaccaaaataagaagacactcgagagtcagcatcctccactacagcaggtccatatacaaatcattcaaacgagatatctccaaccaatgaaccatgcgacccaacaggtcagcacacttcaacc

SEQ ID NO: 233448 - DNA, 858 bp, Cannabis indica
atgcatcatctagtttccttgaccaatccttcctcaatctttgcactattttctccagtatcagcttaatttcccaattgggaatctcagcttggccattactttgtggatggtaaggtagagaagtcctatggcgcacttcatatctagctagcagagcttcaaactgtttattaaaaaaaatgactccattcattgctaatgattgctcaggagttccaaactgagtgaagatgtacttttgaaggaaagacaaaactgtcttaccatcattggcttatgttgcagcagctttcacccattttgatacatagtccacaaccaataagatatacagattgttgaaggaagacggaaaaggacccgtgaaatgtatcccccagacatcaaacaactccacctccaagatacctatcaaaggcatttcgtttcttctagaaatatacaccgttctctgacaacgatcacatgccttcaaaaaatcatttgcatctttaaaaagagtaggccaatagaactcgctttgaagaaccttagcagcagttcttgtgccactgaaatgcccctcacattgtaaggcatggcagtggttcaagacagaatacatctcttcttcatgcgcacatcttcttattatcttatcagcacaatgttcgtaaagaatcgactcttcccaatagtagtgcttcacgtctgaaatgaattttttcaactgttgacgagacatctcagggggtgtaacatttgcatccaagaagttgacatagtctgcgaaccaaggcaccatcaagctttccctcaaactaaagagttactcattgggaaactcttcatgtatctgcaccttctttgcgtttt

SEQ ID NO: 233449 - DNA, 940 bp, Cannabis indica
agagccaatgggctcacggaggctacccaattcatgaacaactcgttcaacacggtcaacacgttcaagaagaagccaacgtgatggtgaccagaacccagaaactgggaatgagaaacccaacacaaatgctggcggttctacgcctgtgagtgagggtgcctatgaccccacaagatacgtaccgttggtcgagttggaaaatcatcaattctgacgacgcttggaggaggcaaaccaacgaaaccctgagttggaacgggaggcagccgcagccagggcggcacaggaaaacaacacacaaaaccaactagatcctggagtgaggaggccacgaggtagacttcgcggctcacgaactaggaggcaggaaatggctcaggaaaacccccaaacactcaggaggagcaacctggggaaactagggatgcacttgaagatgaacaaccagatgaccaggcacctcatcaagaagtgccacagagacctcggggatttacaacttatgtgaatggaaactgtgatttaccagagtcttctcgaagaaatgcaaatagaagtcaacctcggactagggaacaggaaatccctcgtggtaacgagagagatcttgggactcaacctaggacaagtgggttgcccccgagacatcgtcaacatccttcttgcactgatagggaaaggagtgtatacaatccccagcaagggacatgtatcaacccgttcccaaaggagaaggcccgtacatgacgaggcaagttctcgctcaggacgtacaagatctcgatatcatagtcgatctacgcaaggaggggatagaactcgtcgcggtaatgatcgacagagtacgagcacaactagaactgaaagctactcaaggataaggtctgtaagtaactatgacccacaatggctgaatctttgtgagcaattgaaccag

SEQ ID NO: 233450 - DNA, 701 bp, Cannabis indica
tcaccacgcacctaaaagccaaaccaaatttgattaaacaaaagcttaaaagaagaaaacccacattgaaatatttgtaatttttctcatctcatacaataaatgattcaaaaagcttacatcttttaaatacttggcgtaattgctcagaagaagagaattccacggattggcttcgatcattttttgatgatacacatcagtcccataatctgaatcccaagacccagaattcccatcatctccaccgttggatccaccattactaccacccccaccacagattttcccaccgccacctcctaccaaaacgctcacacacccattacctctggatccaatataagactcttagttttgcgagctcgaaaataagcccaaaataatgtcaaaattagggttatgactcaagaataggcgacctaatttatcaaacaataatgataaggaaaaatgaaaaatatgaatttaagaaattggaacatacgagggacacgaggatgatgatgatgaagatacgggctggtatggttaccttctaggtttaggctttcttgaaagagaaagacagagggcttcgagagaggtaggcgaaggagaagtcgaaatcggcagaggcaggtggaggagaattcgaattcgaagtcacaaaaagcaaaatgaatctgaacagtaggacttcgatgcgtgggtgtattaca

SEQ ID NO: 233451 - DNA, 619 bp, Cannabis indica
ttttttaggatttctgcagaaaaatagtccatcgttttactagaaacagtgaactatttccccaggtaggattcttagaaaacagtccatcgttttggaaatccagttcaccgatttgggcagttttggaagcctcaatttttatattttctcgatacttagggaatttccacactatttaacgatagggaaactttcaattttggatttaagtttcgaaagtgtttagagtaaaccttacttattttacgttaatgtgacatagggcctttgttcatcaatcgatatttcccgtcatattggtcggcacaacttgaatctagaaacgaggtaagattagtataagatgtatatatatgtgtgcatgtgatatacatgttaaaatatgtgtttggcaattctaagaagtatgaattggtatcatagcagtacaatcatagtttcaagttaatagtacaagcatagtactggtttttactgatattcaattccattaagtataaattgatgctatcgtagcagtactctcatagtatgggtcgaaagtacaagcatagtactagttaagagtgatagtatggtcaattgtacttttaggtatagattgatgctatcatag

SEQ ID NO: 233452 - DNA, 1999 bp, Cannabis indica
aaagagaatattgaacatatatcatctaaattatcacaagtcacctccttatttataaacatattagccccaaggctactatgtagcagctcttgtgttgtgaacgcgatacatgaaaaaaaaaatagaaggaaaaaaaaagaccaacctttagatataagcatgaaaaatatgacttaacagatataaaaagaaagaatagtataagtttttttaaaataaaaaatattaacacatataatattaaaattaaataaaattaataatcaaaagaggggtaattctagtcatcctcaaaaattaggtccactaaagtcataagataccaagtgtgtaggatttataaataaagtgtaccaagtaatcatttttagaaacatatggcactaaacctgtattttgataaaacactagataccaaatatgtaattactgtttgtaaaataataaatcaaaaatattacaacaataaaaaaagaaattaattaattaaaaataaactaatataaatattaaaagaataaataaatcttaaagaataagatcaaaactttttttacttatatcatatgtaataaaatggaactaatctatggatatattcttgggtataaatctttgataatctttgttggcaggtagcgatttagattgaaagaccacttaaaggaaatgagaggaaaaaataatagtctacatatttatttttttgctgattttattttttgtgaaggtagataatcattaaaaaatttatggagataatggatgatagcaatcgaataggtaaaaatagacggaattgacacctgaatgagtaaaattataaaagataaaaatatattgattctagctaaaattaataaagttataaattaaaaagtaaaataaaatgtaaatgtgtcaccttataaaaaaaatgagagggtgcagtcaacttgagcattttccattagttttataattattttttaaaaaaaattattagatttaaaacttgtttgtataatttttaaataagttattaaataaactaaatatttaggtgtaataattttaaattaaagttataggtaataattttaaattatatatgtgaaattatttcaaattataaggtaatgtgttataattttaaaatataatgaattttgctataaatattaaaataatttaagtgtaaaaaaataaattgctaaaaggaccttgtttagtaacaaattgaaaaaaaaattaataattataattaatttatttttaaaacaaaattaatcttaattaaggctttataaggaaattaagtattagtttactatcatattaaaagttattttttatataatttttaaattaatcacaaccattcaataatggtcaaatgactaaaaataaatgtaaccattatggttatatatttgatgtaaccattgaaactccctctatatatatatttatataattttgagaaataaaatgtatcaccctactagtttaagcgtgttaacgtgatttttaacttaattgtgcaactcattgctaaacaacaagcttattgaaaatcatgaataattaaaactttatttaattaattataaataccaaaataacatacttatattaaaccgggatcccgttatacaaaatatttataaacgtttcacagtgcatactataaaaattttgttgcctagcgactatacaaaataagcctagctgtcttaaagaccgtacgctccaggcctaactgtcctgacatgtaaaatcatcatctgctcgctttcacggctgctcaaccttagttttgcccttacctacacatgcaaacaatatctgtaagtcggcatactcagtaaaaaaaagcataaataataacatagtaataatcctatcctcgtgtccaacacggtactgagtctagaacgttgtactcaaatactactgaccataactatctagcctatactcagtatgctagtcatactctagccactactggtgt

SEQ ID NO: 233453 - DNA, 521 bp, Cannabis indica
tatcaatagtaataagattgaaattaatgtttgaaacctatctttcgaaaggatttaagattaccccataagaggttaatcttatttccatagtaacaatattcctatccttgaaataaaaagaaacctcataccaaacacgaaaatgcaaaaggttactcaatataaatttcaacttgttatttgaccaaaataatagcttacattggtccaatctaaggttgtagataaagaaatgttgctgaaggcgatcatatttgcatacaagcgtaggggtaagcacttcaagagagatgcctaaatacaaatgataaaaaggttagataatctgaactctccattgcattaaacaataacaactacagtgataataaaactcttatcataaagcactctcaacagcttctcttctttattctttaaaatacatcatcaaaactctactttctttattttaaatctaacttttacatcacaccgtacatcagattctttatcttttctccatattatttaaataa

SEQ ID NO: 233454 - DNA, 2639 bp, Cannabis indica
aagttagatctggttttacctgaagatctaaaaaacgacctatagtaaaactttgtcgtttgggctttcatttttggggtcaacagtgagtttgactggggtaaaaagctccaaattcaccttggtatattgatcaatctattgctatgtgtagggcgaattgggaataaaattcctacagtgatatcagagccaaacaaggcacaatctgcagcaaatattaatcacaaaagcataaagaaatcgtcaagaaagtaacgagaaacacattcataacagcaagaattcaaatacacaaaaccaagattgcaagaacaacaacatgattattctaaactcattatctatatactttctttgaaataattttatacatatacaattatgagttccatgaaggttgatatagataagtttaatggttcaggtgattatcgtatttggaggaagaagattagggctctattggctcaacacaaactgttgaaggttcttaaagatcctgtgaaatggtcagctgatacaaccaaagaccagtaagaagagttactggaaacagcaactgaattgatcattttcaacctatcgtataagtcactttcactgttatattaaatttccaaactttactgctttttacggtgcgcctaacccccataataaacctcactcatggaaattaatcaatcgtcttggctctaaccctcgtttatcctcttggctcataatgggtgacttttatgattacctttctctatcggacaaaatagggggtgacatgtctcgtagtccttctgctcaatttcaatctttcgttgatgactacgggcttcaccctcattgtcctttgggtagtcccttcacttggactaaccgacaaaaataaccgtctcacacccaagagcgactcgactagtgcctctccaatactgattgggatgcaaatttccctaacccttatctgcttcatggtgatttttttggctctgaccatcgacctttgatattaacctttcattttcaagctggccaggctaatccaattcctagattcatctttgataagctttggctatccgaaccgaggtttgaggattgcctttgtgatgctttgacgttgaacaaccagactcctaatcacaaccctcagatcggactcactaaaaaattgcataattgttcttcacgttttaaacaatggaggaaatttttgggacctccccttgctactcaaattcgagagatccaatctcaacttaagctgattcaatcttctccccagcccaccaatgcccaattagacaggggaagacacctcgaaagtgaattgaatcaacttttacataaggaggaagagtactggcaacaacgctcccgcattacatgactacgacttggagataaaaatactcgatacttccaccgtatcgcttccatgaggcgtcaaactaacaaaatccattctctccaacgctcagatggttccacggcaaatgatactacttccattttgtcaaccattgagcattattttgtccaacttttccaaagccaattacctgaggacgatatcattgactctgttttatctggtatcactgaaagcctaactgaggatgaagttggactcttgcaggccactttttcagccaatgaaattaagaaagttgtatttcaacttgcaaatgataaagcacccgggttagatggattcaatggttgtttctttaaaaaaaaactggcatctattgggggtggatgttattaatgctgcccaaagcttcctgaatggagatgcagacattgctgcgatcaataatacgctcattgttcttatccctaaaaagccaaatcctgagcagattatggactaccgtcctattagcctttgctccacgatttacaagatcatatctcgggtcctagttaaccgtctcaaacccattctaagtcgcatgatctcccactcccaaagtgctttccttccaaacagattaatctcagataacattatcattggccaagaggtaatgcattctctttctcaccgcaaaatgggccgccttggatggatggcactaaagcttgatatggccaaggcttttgatcgtgttgaatgggtttttgtccgtcgagtaatggagaaatttgcttttcctcaccgattcattcatcttgtcatgtcttgtatctctaccgcaactttctctttctccattaaccagcaggttcttgggcatgttaagccttctagaggaatttgccaaggggatccgctatccccatacttatttcttttatgctctgaaggtctatcctctctaatttgtctcaaagctcaataggcccaaccccgcaaacattcacttggaataaaaattgtcacacgctctctgactatctctcatcttttctttgctgatgatagtcttctttttagttctgcttctcttaatgatgcgactgtcatcaagcaaatcctacatgactatagtctggcatccggtcaattggtaaattttgccaagtcggtcttgtttttctctccaaatactagcgctgagaccaaaactagtatcaccaccatccttggcatccctgttagagacgctattaataaatacttgggccttcctcaa

SEQ ID NO: 233455 - DNA, 819 bp, Cannabis indica
atttattatttattctaccaataaataacaattgatcaattctcattaatctcttatttcacacaaattaaaataattattattttctctaaaattatatatttctccctttaataatatttaacaataatattatatttaattaattaatatatttttatctaataaaattaaatagttaaatactatagattatacaattcataattagcataattaatcaaaaaaataatttcataaattactaatttgcccttaagaatttatttctcataaaaaataattcttactcgaaattcattcatcaaataaaatatttccctgtacagtgttgtatagaggtgactcggggaccatggacctatatttcgaagctccaataaacccatagttatcatcaatagaataattaagtttattaattccattattactccactataatggaattacactctttgacaatatagaattatatttacagaattcttgtagtctattgatataatcaatataagcagttcaccctcaaattattagttcataattaaagttggtcaaaatactattttacctttctaattatctctttattctttatgtaccattacttcaatgtgaacaattaatctataacttattatagatttggatccaactattagcactcgtagagttaacactataaaggaactaatattcgatccgttaggaaagcttggattctactattgtataacatgtttccaaccacttattttattaagctcccaaaacagaagttgtaagaatcatcttttctgagaaactttaacgagt

SEQ ID NO: 233456 - DNA, 2783 bp, Cannabis indica
atatatatagatttgtatagtaatgttcttggtgcgggaaaagtttcactagccaattataggtaccaagaatgaactagataaagtaaaattgttgcatatacatgatatattacccaattgaggttgtcattatcaaatacaactactttttttttaattatttctgttttttcttcttttaaggtatcgaaacttaaagaattcatttgtacatatgatagtgtggcccattttaatttaaaacacttttgacccacctccaattggtcccaaactgctcttctagcccaaatgattttattatagggattatttcacaaatacacaaaaacaacaaaaaatttataaaaaaacagttttactgaattttaaatatttttacggtttttcttattttatttacagaaaatacgttcttttatgttgtactcttgttaatttgttgttatttagatgttattttttattattttgatgttatctaaatgttatttttatgttacttttatctagttttcttgttattttcgtgttgtttttatagaaaaccataaaaatatataaaaaaaattctttaaacgtaaaaatgtatttttttacaaaaaatgatgttttatataattatacctttattttattatattcgtacactctaagcttaaaataaaaataatgatatattaacaaaaaaaaaaaacaagaatcatacaataatattctcatcgtggaaatgataaaaaattttgtacttattaccaaaaataaaaataataatataatattaaaaatttgtacttattttggtgattgtttttgtaagaaatttacccttttatcctacaccaaacagaaaattaaacaagttatcaaggtcaaaatcgaccttacacagagtcaaaactcagttgactccctgaagttaacaaaaacgacagtctttattccctagactacaagtcgttttgcaataaccctaattaacctccccaagaaatatctagaatcaattcatttgcacacacacacgaaacccaaatatgaaaccctagcagagcttcgagtttcttctctagaaactcgaagtctgctcacaacccagaaaaaccaattaatcccttcacggatcaaaatcaactcccaaatccatacacaacacagagaaatatctaaaaataaagcaagtgaaattagaaagagtgtaccataaattttatagaggttccccaaatgttgctgggtacatccttttcgagctcgcctcagaaaagctcgtttccactattgaatcttcaagatcaaagagttacaaagctagattccaaatcacaggtacgattggtaatcttttgagtttacagtgtttattttctctcttttctctctgaatatgcactaatttcttcttcttcttctgtgtatgtttcccccttggtttggatctccgagccctaaccctagggctccaagacttaaccactgtaagtctcttcctcttcgaaaatctgatatgttttttgttgttctgagtttattttcatgtatttatagcttgtagattagcagagagaactgagagttagttgcaacagttttaacaaactttgcaactaactttttgttttgtctgtaggttgtaagaggccgaaggccacataggatattttctgcttcgtaattcttgttaagtgctgatctagacaatgtatgtgggaatttatttcaacagttttgtttttgtgaggctatggctaatatgggacgtgttgatactagccttgaggaacagcatatgaatattgcattggaagatgatactgaagaatgttacattctatgatgaaggtgttgaagatttatcagagattgatactcgttgatatcttgtgggtcaatttctcacagatcagtctattgatttttaagcaatgaaacacaagatggcatagttatggagactcagtagagggttgtctgtgaaagaactagagcccaatcgtgttttgtttcagttttaccatgaagtagacaataaaagggtaatggagagtagcccttggactttcgatagggtgcctctaatctttgaaagacttaaagatggagataattctcgtagtgtagtccttaatcggctgcattcttgggttcaaatacatgccttaaaaactatattcatggtagaaagagttgtacggaatctgggtatgtgggatcgatctaaccttaataacttcatggggtttggagagattatctaagggtttgattttaaaaaaatatatatttaaaaaaaattagtacaaagatcatttataaaatataaaacacaaacgacaaaaaaaaattactaactgattattaggtaccacatcggtatgacattgatcactttaagtgccaataacaagtaccaatcagggtcggcgctaggcataggcaagctaggctcacgcctagggcccactcatttaaggggcctaaataaaaaaattacattttaaaaatatacatattttcttaacaatttttaaaaatatcatttatctttatagtaaggacccaaaaaaatatttttgcctattacctttttcaattcaaggccggccctagtaccaaatcgtatataaaaaaaattagaaaattgataatcaattattgtgtatgtgaattagtatagtattgagcaccttaagatgtcacataacaataatagtacaaaaaattattttttaaaaaatagtacaaaaattatttataaaaaaataaaacacaaaagacaa

SEQ ID NO: 233457 - DNA, 1898 bp, Cannabis indica
aatgatcgtgaaagtatgagtcatacaggagtagtcaatctaagagttactcagatacgaggtccatgagcaaccatgaacaaagacagctagatcttcgtgaacatttgaatcggagacaacctgattagcgcgagcgcttaaatcaaaatgctcctgatttacgccaacatctaaatgataatcgaaagcaagaggatccaatcccattgcaaatcagtgagttataaattttaaattaaagaaatacgaagatggagaatatgggaaacttcctggttacaactccattgaagagctcaaacctttccatctaatcattatgagctctgaatttgcccaaggatttcaaaaccctcacgtctcaccatatgaggggactacagatccggttgctcatctcaataattttaatactataatgcgagccagtattgtcacgaataatttacgttgtattttattccccacctcactaactggggcaacgagcagctggttcaataaattcacccatcactaaatcacttcttgggaacaactatctaaggatttcaagaaaaaattttaggaagcaagagacaagtgacctgaagcgtcttcccttactaacgtaaagcagcaaccgggcgagtcacttaaagcctacttaagtcgtttcaatacaagcgcagcaagagttagaaacttgaatgacagtatacaacttactgctcttcaagcacggattgtgactgacctctcgatagctagaggcgagctgtgggatgactcataaggtcgcccagtaaaaaacatcagtgagttcaatgaaagagctcaggcttttgaacgaaaagagaaagcaaggaaagagatgaaattgataaagactggctcgagaaacaaactcagcactgtctcagcaagcaccatctccatgaaggctgacaatctaggaggctctagcaccaagagaaaagatgactctagagaattagacaaagataagaaaaagcaaaagaagcatgataagtacgtgccaatttacactatttacaccgagcttaatgaaacttgggaaaatattttcctcacacatgagcacagcgttgcatttcgcaagcctaaacccatgacacatgcgaggcacaaacgggatgcaaagatattctgtagatttcacaaggacattgggcatacaacagatgaatgtcgtcagttgaaagacaagatagagaaccttatctcacgtggttattttcaacaatatgtaaaacgacagggtaatggacaaaaccagccaaatcagcccaataacctggacaaccaaagattacaacctcatcctgtagaaggagaggacattttttttcatctctggagggccacaactcgccagagaaagtagcaatgcccaaaagtgatatgtcaaaaaaaatcaagaacaagctgtaatgccctaaaaaattaggcacgctacccaaaaatacttatgaaaccctaatcccctaaacgggattactaatcaaaatagcgcagaatttaaacttttacaataaacagaatgaaaataaacttgtaatatatttaaacttttaaaatagttgggatcccaaaaatctttagaaacttaattacaagtcttttctttctagccgacctaagcggcaaaacagaattcaaaagttcaacactgatagacccacaacccgcttggtctgatatggcatgaacatgtacatccttcgccctgctcctgaaactcatggctgatcagctaatgccttaccctttcctgcacagtagagcacccatgagccaagcccagcaagacagtataaatcataacaattataatatgcccatcatactatataatagatatgccattcacatacgtctgtatgacacagacc

SEQ ID NO: 233458 - DNA, 878 bp, Cannabis indica
ggactttctctctagctaaatctttcgtcaaaggatcaaccaagttatcatcagtgcgcacatgatccactttaacaactcctgttaagagaaactctctaatagtgttgtgcttacgacatatttgtcatctcttaccattgtaataacagttctgaacttttgcaatagccgtggtactatcacagtggatcaacatagctggaataagtttttcccataaatgaatctcagctaggaggcttcttagccaacctgcttcttcactagtagtagctagtgcaatcattttagactccattgtagattgagccaaaatagtatatttcttacacttccatgaaacagctccactagctatgctaaaaatatagccatcggttgccttgcagtcatatgataaagtgttccaatcagcatcattgtacccttcaagtacagctagaaacttctgataatgtaatccaatggtcaatgttcttttgaggtatctcatgaccctctcaatagcattgcaatgctctgcactaggtctactagaaaatctgcataataattccacgacatacgcaatgtcgggtctagtacaatcagtggcataccgaagactaacaatgatggtcgcttatttagattatcttacaccatcactagtgttcttaaataattttacactgggatcatatggtgtacaagcaggtttacagttaaagtaattatatttctttaagatctctcaatattgtgagatttatccaaagaaattcccttttcagaccaagtgatctgtataccaaggattacatccacttcacctagatctttcatgtcaaaattttcacataacaagatttcacattgttcacgacatgaatatt

SEQ ID NO: 233459 - DNA, 857 bp, Cannabis indica
taaatcatattagaaccataaatgtatatcaaacaatatccatctaaaccctaataaactgtttagctagtcttgttcattgtagcaacttcacacatattaattcagaataaaagaagaaaataatgttgaaaacgccgttgaaaaagccttcgcgattgattttgctctctaattttcgtactcctagattgcttgctaaaaaatatcgaagtcccactccttttatagccaaaaattttaaaaaaataactaaaaaatatagtctacttgaaattcaaagggacgggtcgcgacatgtaggtcctatgccatgatccgtgtttctaaatcctcacgtctctacgctgcttgcaaacacgggcctaggtagtaccccctttatttgggcagtgagcattctactaatttatgcataggcattggatttctatgcataagcattggatttctatgcctaggcacgcccattccttagtccaatacgacattattagacaaattttaagcctttcatgccctgacatgagtttttaatgttgaggcgctcctccaaattttatattttcttcgcctctaaagctccaattgcaccataacttttggattttttttctcaaattaatttctaggagctcttgccccgagaattaatttatttgactattttttttcatatttcttcaatattttccatttttcttttattttaaacttgtcaaataaaagatgccaaaaagcataaagtgcaccaaacaagagtaaaatttaattacactaaaattaacctaaaaatagaactaataaaaaccttacacttaaaagcctaagaatcacccaatacatacacaaacaat

SEQ ID NO: 233460 - DNA, 952 bp, Cannabis indica
aaaaaaaaaagtttctataggtgttagtttatagccgagaccaaatgatcttttagtctcggttatgaactgacacttttactcaatctatatttatatttttttaaaagaaatgtttttggtctcgattatacttctagtgtcgctctactaaccgacactaaaagtcattataggtgtcagttataaaccgagaccaaagagttggagtggtctttaatgtcagtttttttttaaaaaaatgtccctcgaaccgacactaaatgtctattttgtagtagtgagattttccacaaataaccaatcaacagtatgagtatggctcctgcgtagagtctagttctttttgaacttttggtttccctcctttcagccgtagggttttccatttttggttttcaatattattttcttgggtgtttgcccttcgttggtttgttcttgagtgctttggatttctttcatgtgaagtgtgttgtcttgctttctttttagggtttaaggagagtggtacctctgcctgtgttgttcgtctctcttcaagtctgacctatggcgatggacaatgggaaggacgctgtggattcggctaaagttattcatgtggagtcagtggacgaaaccatgaacactactctgactcgtggtactgtggtagtgccatggagatggagctcctggagctctttgaagacattactttggaagaggttgttgctaacaaggcttgtgtgggtaaagtatttggatgtaaggatatgcctgcctcggtggtgaagaaaatcctcatcggagtttggagaagattaggtccctggagaatgaaaaagtgtgatgaaggagtacttggtttcttcttcgagagtgaggatgactgcgcttttgtcctggacaaaagaccttggcttgtgagtgttgcttaacctgaaacttgttgaaaattattttacca

SEQ ID NO: 233461 - DNA, 1369 bp, Cannabis indica
aaaaaaaaaaaacttaaataattgataaatatctcatctaataatatctatttaaaaattattaactataaaatttttaaatacaaaatagtttaactaataaatataatacaccattaaaaaataaataaaaataaaaacgccaggtacaaaataaacttcactccaagtcttgtggaaaccctttagggatgacaatccgccttcaacttcctgttcttgtccttcgctcgtcggccggcgtcgtccttctgcaagtcttgtcttttgtgacatggtgtgattgattccaatttgttttgtttgatgttttctgggttacgtctttttgttgattcttgatttagttggggttggtgttgagtcgttggtctctgtggtcggattgggtcatttggtttgagtcatcggtttgtgtggttgtttggattcggtttggttcctgggttcgattggttcggcgtgttctgggattgtttggtttgtttgattttccgttcgtctggtttgttgtttctggttcgtggggtgcgacggggtaccgtgggtgggtgcaggagtgaggttggtgtgtagggggtgtgggttaggtcatcggggtgtgggtttagtcaaaggttattgttctttgtttggtagggggttgtacagtcaggtcagcataacaaaaaaaaaaaaaaaaagaaaaaagcattatatatataaaacagtaatcggaaaaggaaaaaaaggagtgttctcatttattttttatatttatattacatttattaggtgttttggtatgtgtgttttgtgtgttttgtggtacagttggttggtgattatggcttcgtcgagtgtggctatgcgtgatcttgaggacagatgtgcggatactagtattgaaggtgaagatgatggtgatttgggtgttgacttccttgtgccggatgatcaagatggccatgatcatctctgtattgttggtcggtttcttactgcccgaccaattgattttgaagccatgagacttgttatggcgtccttgtggcagcctgggagaggagtctatgttaaagaaattgagtctaatcggtacctatttcagttttatcacgagattgatttggaaagggtcattgagggtagcccgtggaccttcaatcgtcaacagttcatctttcgaaggttacaaagggctgaagatcctaagaaggtggtcatcaatatccttgatatgtgggttcagatacatggcttacaaaccggtttcaaatcggcctctgttgtggaacgcttgggaggttttgtcgggacgtttatcaagttggattgttacgaaaattaagaacaatacgcaagtgtacgtaatcaagtagtaaactca

SEQ ID NO: 233462 - DNA, 1398 bp, Cannabis indica
taatcatgattcatgagcctactcttattctaatcaagcccattttaaaagtagtccaatacaaataataaaaaaaataatactttattaaaaaataaaataataccattgacaatattttattttatttttgtcaacagtattattttattttgttgaagatgaaaatttgaaagatacatttatcattatttttattagttttgatttaatatttattcaagccctcactcaactaaatttctggcttcgtcactgaacgtatcttatatatattgtgaatactgaaggaaaaaaacttttaaaaaaatattaaaattattctttccctgctaaaatcaattacggcattaacctatctcggcagttttaagtgtcaaaatcgcacgcataagcagatggcacaactatatctcggcatttacacgttgaaccatcgagatagagtaccttattttggcagtttttaactgtcgagattggtcattaattctattttgacggtcaaattataagcggtcataacatagtatttatttaattattaaaactctattataaaaatatagcataacaattattaataagtataatataaatactataaattaataaggaactattagctggtacgtactcttgttatgagctagctaggtgatcggtcggtcctacatttcttcatcgtcataactaaccctgtaagttcccaatcgtaacacataaccccactcacgttggtgtgtattataccacgtgctttaaattatatatgtatatatatgtgatttcatatgactactatttagtagtctctagctacgtactatctagtagtgaagatattattttggcacacaaattataaacaatgtataatgtataattaattaagcttaaacatacaaagtgatatatgcagttgcttaaaactattcgtaggttaaaattgagaataaaatttatttgacatactcaaattatatataaacatatatatatatatatatcattttgtggcttataggattactctaaattaatatatattaatgtattgtttaaaagtgggttaagtaccattactttatttgaatggccctattaattgattattttatagtattttaaatgactttaagtacttagcaatttttaagcgtgttactttatattaaattataataataataataataataatatgatattgacacacgtaaatatattaaatgataacataaaagatacttggaagatgcagtataagagtaggtccatggagcgcatattcacatgcatcgacccattattaataattagttgattgattgattgatgaattcatgatggtccttcattatatatagtaactactaccactactagacaaatgag

SEQ ID NO: 233463 - DNA, 2616 bp, Cannabis indica
gtaatgccttttggtttgataaacacaagagcaacatatcaaagattagttaaaatgatgtttgtagatttaataaggaagacaatggaagtttatgttgacgatatgctcgtaaaatctcaacgcatagaagaccatgtcgttcacctagattccatgttcaaaatcttgtgacattataaaatgcgacttaatcctttgaagtgcattttcggagtaggctaaggaaattttctcagttttatggtgaatcaaggaggaatcgaggccaatccagcaaagataaaggcattagtggagatgtgatctcccaccaaaccgaaagaggtccaaagcctaacaggtaaagtcgctgcattaaatcactttatatcacgttcctctaagaaatgcaaagaatttttttagattctaaaaggtaagaaaatgtttcaatggactgatagatgcgaagagccttttcaggcactaaaaacacacttggggcagcccctgatactatccaaactaatgcctacagaagtgttatcgatctacctggcagtgtcattagctcagtggtaattcgcgaagaccaaggtaggcagcatccggtgtactatgtgagtttatgcctattggatgttgaaactcgttatccacaaatggaatgactagcatttgcacttgtagttgcttctcaaaagttgcgaccatattttcaatcacacattattgaagtactaacaaactatcctttgcaacaagtattagcaaaactagaagcgttaggacgattacttaaatggtcagtagagctaagccaatttgacatcaaatacaaactgcgatcgacaatcaaaggacaagccctcgctgatttcattcttgattttccaaacgacgaagtagcgattattatagaagagcgagtcgaccctaaaatgtcgttgggagaagggtggactttgtatgttgatggggcatcaaacaacaaaggatcaggtggtggaataatactaataagccctaacaaattcaaagtgcacgctgccttaagatttgaattccctacctcaaataatgaagtcgaatatgaggcactaattgtaggattaaagcttgctcttgaaatgaaggttgaataatctcgaggcattcaacgatttgcaaatggtttgtcaagtgaatggagaatatttggccagaggaggacgcttagccaaatacctttcatatacttgtgagttattaaataaatttaaagaagttattattagtataatacctcgtgcttataattctcatgcagatgttttggcctgtttggcctcaacaagagaagcacaattgctcgatgtaatttctgttaatgtgttagtccatctgactattcatcacgaggagatgatgcaagtcgatgtaactaagaaaatcacttagatgactccaatcgttacttatttaacaacgagtaaactccttgaaagcaaagtcgaggctaaaaaattatgatatcgagctgctcgatatgtcatttatgacaacaagctgtatcgcatgagttttagtcaacctttgcttaaatgtatcgatggagatgagtgtgattatatagtatgagagggtacatggtagaatttgtggcaaatcacactggaggcaaattttgcttgcttttgaaaattatgcaacaaggatattactggctgaccttacgagcaaacgcaaactagtttcgctaagaagtgtgacaaatgtcaaagaattgtgacctatgtcaacaaaccaccaacccagttaaactctatcactagtccctggccattttatagtctggggcatagacttaattggcaagcacaaaggaaagtgaggggtaagtatgtagtggtcgcacgtagactatttcacaaaatggactgaagttgaggctctagcgaccataacagctgtaaagttatgcatgtctgtcaatcgagctattatttgtaggtttggcattccttacaaattaatctctgacaacgaaaagcaatttgattgtaaagaaatgcgtaaactgtgagatgatctagggattcaaaaacctttatccttacggggattcaaggtttcgacctcagtttttttatgagcacgatcttcgaccatcacttccaccgaagggtcatcatcgggctctgccaagtcctcaaacttgttttggaggtgctccatcatttgtttcattcttttagtgagcttcctttgttctgctaaccctgtctgagtagcctctagttccttggtcactcgcagcaagtttaggtcatggtcatagtagtaaccctttacaatacccgtccttcacgtaaccgttgtcatcgtcctcgtcttccctatccttagggttctggtcatcatcgatgctgtcaaacatgttctcgacatcctctcttagatcctcaacaatggttgtaccttcttcccttacaccgcctggctgaaggctagaggtgagaaagcctacatcctccataatggtatctagttgagttttcttgcttacattcttttgtgtattcacaatggttgaggtggtgcggcaactagaaaactttcctcagctcttaatgaaagcaccaaaatgtttac

SEQ ID NO: 233464 - DNA, 1292 bp, Cannabis indica
aaaataaatttaaaattttttaagcacgcataataaactctaaaatcatatacaataatgctagaactatgaccaataccgttataaaaaaaaattgaaaaaagagattccaacatttaattcctgacgtaaaaattaattaaaaaattataataagaaattgtaattaacactaacatcttcatattatcatccaaacccactttattcaacctctttatagaccccattaattaccaaaattttcccaagctagctaatctattaactttatacacaacaccttccacaaaattataaataaataagcaaacaaataaataaataaaaccttctaattgcgattatgagatgaggaaagaagtttgtgtttctctccatcaatagcaaaaaagtaggtaacattatcactaaaaccaaacattttttttaacaataaaaccaaacatttttaaacattaatcaaaatggtaaaatatatatgctaagaaaacattttagtgaacgcaaatttattaaaagaaacgaaaaagttatgtatatatgatcagatctgatcttaaatattctacaaagataaaaatgtaactttatattagagttagttccacattgttaatgtgtagaaataaattgtgatatataagatgaatgagctactcctcccatagccaattggttttgagccacttgtaatccgttgtgagcccaaattgccaccgatccaaaaagttatttgttaacctctatttgggacctttcggccaatgaaaggccttacaaaagttctcatttcagctgaataagtacatatagtaaaataagtaagctagaggtgtgttcatgttgttgtatgtatggattcaagcaaacacaacccaataactgggcattggcccaaggctccttagttttagaggccccaaaaatgagaaaaaaaaaattggttttgtgaaagttaggagacctttatgttgtggatgtggccttaattcagagctgctaaattggcctgaaaaatactacatccctttctttgctttttttttcctactagtcaacgatagatagttaaaagaatatgagtgctaatactcaattcagtatccttcctctaacagcatggtagttcaggtttgaatcccttctcaagtaacttctcagcatgataaaagctctgatactgtgtaagatttagtgagagaaaagcatttttgagagagaattattattcaatcttatacaataaagaaaaatgattacagaagaatttatataagatgtagatacaa

SEQ ID NO: 233465 - DNA, 748 bp, Cannabis indica
aatataaaataaattaaataaataattggataaataaatttgtacgtatcttctcatcaataaaaatcatgtccacactaataaattcatcatcctttttacttactgttagtagactccacatcctacaaagtctaatccttaagatccaacttttattgtcattctttaagtcttcaagaaaataatactccatgatataaacttcaaagaatgcttaagaaataacacaatataagaagaaaatgttgagtgaaaataatgaaacaaaatattctttaaatatacaaactcatctagtggtattaaattgctagttctaatattaaattaattctcctagaggaaaaaaaaactgataaacacacattaaataaatgataaagtaaagttattattaattgcataaagtaatacatttattttctttattttaataaataataataatatttattttcttattttttttgtaacaaataatatttattttcttaatgcaattattttattagttattttttttcccgaaaggcttcctaatcaccaaagaaaagagactctctctcatatcaaagtgatgcactggtcttccatgtctttttctcctaactgcacttatactctttcgaccaaaaattggactactcttctcatcttattattattttattttttaattactgaaaaagtgaattgttattagtttattaacagataaaaaaaatacacattaaagtttaaaaca

SEQ ID NO: 233466 - DNA, 1346 bp, Cannabis indica
tgaagaaagggttaatttggaaacttggcgatggcttgaatattcatgcgattcaagatcactggatccctggccttcgttataaattctatgcctcccctcctcctcctgactcgactctttcttactttctttcatcatcgggtggttgggatttagataggcttaatcagcattttgactcctcaacggtaacccatatcctcaatgttccaatttctggtgcatgtggctcggatagtctgattttgggccaagaatcttcaggaattttgagtgtgaagagtgcttatcaccttgctttgacagaccgtagtatagcttcaggctcctcctttgatagtagtaagttgttttggactaaagtttggtcttcaaatgttcctcctaaagttaaacacttgatttggagagttttgtcccactcaatccctgttgctacctccttattttttcgtcacacaattccttcccctgcctgcccgatctgtcatcaaaccacggagacagtgaaacatgccatcttggactgtaagtatgctagaaaagcctggaaaaattcaaattttattagcttttataatagtaatttgaataactccatggatagcttttttgttgctgcttttgaaacctttgattctcaacatattgctatattttttgttttgtttgggcaattcggaactataggaataaagtgtttcataatcataaaaggcctcagccacaagatatttttcaatctacttgtaattttttggatgaatttcagttagctcgtgccaataacttcaatcagggtacagcaagttcagagtctcaagatccaatccctgccccggttgtaggtacctggcaagttaacactgatgcagctattgatgtggtctctcaaaagacaagcttagcttcaattgtcacggatgaatgtgggatcattaaagcaggatttatggttccatttcaaggagtgcttcctccagatgttgttgaggcaaaagctattttggctgcggttcaatggttacaagctactaaactgccggtttctatccttctttcagactgtaaattagtagtggaaaaaattaataatgtcttttgtaataattctgttctaagtgatgtagttaaatgtattaaagccttgctagttgaaagccctggactagttgttaggcatgttcataggagccataacatgttagctcatgatcatgctaaagtcggtctcaggcttcttagcgagtgcgtttggaatggttgtttgccttccaattctacatgttgactttgttcttccttctttgtgaaatgaaagcttcaagtttgtaaaaaaaaaa

SEQ ID NO: 233467 - DNA, 1546 bp, Cannabis indica
acggagggcttacccacctggcgccccagacaccttgccttctatgaggaactgcagcagtaagctcctcactgacatagtccacgtcctcaactaggacgtctctgtcagcatcgattggctccttagcctcattgtagtcccgtagtttgggggttcaatctttgcctcttcctccgcctctgtagaactgctaggacgtacatcgtcgtactccttaatctcctggacctcagtgtcccctttatgatcccaatcctcctggatggctggatcctgttcggcgctaggcaaagtggcgtgccgagccactaggggatcaaacgcgtcagccaaatgcattgttttctttgtacgagccatcattctatggctgggtataagattttgggaatgttcttcactagaagaaggtgggctagaacgaagacgaggatgatcctcgtggaaaagttgaagcatgtcctagtcgatccgatgtttgctctcccaaaactcacctgggttcatctacaaaagacagcacacaagatcagtgtttggtcgaaatatcgaacgataaacaagcaaatatgccgatcaggagtactcaatagattaaagaacaagaatgttcaaagaaaagtcaaaactcaagaagtttgaaattttctcgagttagggcaaaaaatttcatgaagtttagaataagcaagatgaaagacaaatgttacgcaattcagaaagcaaccattatggactgtaaaatcgcatgaagccatgacaaagaagaatcgcatagtttttgaacctaaggtttcctaaatattttctatagcaaagtcgaaggtgcattcaaaatgtaaacatgcaagaataaggataaaggaaatcaaaaacttactcaagagtcagatatcttggtttgagcaacgtcaatccaacaagaagttttgatgaaggaacttcaacaaacttaaagacaagaacctctctttttgctctgaactcacttaacaaagagggatggtgaaaatgagtttatgtgccaatgctggttgatttttataggcaagtcacgaaaagatgtaatcatttgagaggaacctcagacgcttcagttccctccttaaaagcaaatatgggaaataaaaaactaatcaagtatagccgtcagccgtggtgagaaaaaaaattgaatttcaaaatattaattgtcagagcatttattagccaaaaaccgaagggacacccagtcaacctcacatcgagtctcggacagtcacgctcgacacgtgtccccatccaaacgcagaagcagctcggatgaagtgtacacgcaacttcggaagtcccatacagacttggggggcaaatgttatcctaatttttgcactctgacgtgacatcgcataatggtgacatgtggaatccacttggagtatctgctcggagggtatagtccgagcaggatgccttgctggcatgcccagagcaaagcaatcagcaatccgcgtagggcgaccaacacttagcgaattcagctttcgcattgtgagtcatcaat

SEQ ID NO: 233468 - DNA, 730 bp, Cannabis indica
taatgccatattgggatttgaaaatcttcattgcatgaaaaaaggttggtttggaaatggaaggaagatggctctcaagctagacatgtcaaaagcctatgatagagtcgagtggcgattcctataagcaatgatgatttgtttgggttatgacaagcgttgggtggataaggttatgaattgcattaagttaatttccttctcaatccttcttaatggagaagtcagcggtctttttcatcctagccggggcattcgacaaggagaccccctatcaccatacatgttcttactctgctccgaaggcctgtcttgcctcatccaagaagctgagagagccgataggcttcatggtctcaggtttggtagagacaatataaaattatcacacctattctttgcggatgatagtttcatcttcttagacgccacttcttcagattgtcaaagtttgaaaactattttggatgaatactctttgctttcgggccaaagaataaattttgacaaatctgaactttgtgtaggaaagaagatcacacaaggaaccgggacttctcttgctgctattctgggggttaagctagtggactgccatacaaaatatctggggatgccggcctcaattgggaagaaaaagaaagaagtatttgaagacattcgtacaagaataagaaccaaacttcaagggtggaaagctagcttattttctcaagcagggagggagatt

SEQ ID NO: 233469 - DNA, 1014 bp, Cannabis indica
tagggcacaaaatccaacagaagaagggataagcttttgaatatatactcggtcctcgagcacaacctctaacacaccctgagaggccgagtaaacgagaagctcctactcgttacaaccaaccacgatcgacttccacattcactagttttttgaagtcaatcaaatggtggccgaaatcaacatcaatctgattccaggttaatgaagatttagatggggtcataaatgactcagtttggcttctaatgactgacatgaagagattgtgcaacctgtaatatttaggagcccatcctatagaaattaatgaacttgataacttgttttgaaagctgtttattaattatttgttcttatcaggtacttgaaggaacgattgctgtactctaatggattaaataaaatatttatttttaaatccttgtatcactgccacccatgtcgagaatacaactgcccgttgtaaagcactggtcgaacatatggccaagactgagccagttaaatgggttgtagccccctacaataataggtaagtaaatttaaaattaataatttcataatttataattctacatagtatatattattatgcattaataattttacacatgtttatttgtgtagaaaactatttcattggatgcttgtactcattcaagtacgcagacggtagcatacttggattcaaacaatgacgaagtaccacaagatttaaaatccatcattaacacgtaagttctataacccatatcataatgtataagtgtgctgtttaatattttatatgttaactttaatttttgtctaggtcgctcaacatgtataatacatttacaaactggggcaatgttgctcacatcgagtggataactctgatctgcccacaacaaccaaatgggaaataatatggatactacgtcatgaaattcattgaaagtttcatgaaggaacaagatccaatacgtcaattgacagaaatagtaaaacaattaataagtaatgtaaata

SEQ ID NO: 233470 - DNA, 2021 bp, Cannabis indica
tcgatttcatcaagtgattctgcaaggagtatatgattggtaccttgatcgtacattaatattctgtgggaaggtggctcgtgttcgacgagcagcatagcttcataaccgtacgccattgaaaatggtgtttgactggttgctgttgtatccgttgtacggtatgaccatagaacttcagggagttcttctggccagtttcctttggcatcttcgagtttcttctttagtgtatccttcaaggttttgttgactgcttcaacttgaccatttgcttggggatgtgccactgcggagaaacttttgatgataccatggttcgcacagaaatgagtgaaggattggctgtcgaagtgcttgccgttgtttgagactattttgtacggtagtccaaactggcatatgatgttcttcacaataaagtcttgaactttctttaatgtaatggttgcgagtggttcgacttcagtccacttagtaaagtagtcaactgctaccagtgcgtactgcactccgcctttacctttaggtaattgtccgatcaggtcaattccccaaatggcaaagtgccacggactttgcatctatggtagctcgttgggcgaagctcttggaatctttgaaaatctctggcatttgttacacttcttaacataggctctcgaatcataaatcatcgttggccagaagtaaccttgccttagaatttttttggataagttctgtctggcggcgtgatttcctcagaatccgtcgtgaacttcagataggagtcgtgcaacttcgtcttgagtgacacatctgagcaattgcatcgagaatcctcttctgtacatgactccctctactacgatataccgtgttgccttccttctctttttccgagcttcatttcggttatctgagagttccccagagttgaggtaggctgctattggcgtcatccagtttggggatgtatcactcattttgatttcttccgtgccagtgatgctaggctcttcgaggaactggataggaaccacgttcgccttgtcacttacattactgcttgccaatcgagctaactcgtctgcagttacattttcttctcttggaatctgtctaagaccgtatcttttgaattgtgcgagcagatcatgtattttgctcagatatgctatcatcttttcttctcaagcctcgtattctccaaatacatgatttaccaccagttgtgaatcactgcagatttcaatgtgttcgaccttcatctcccgggctagttttagtccagcgattagagcttcgtactcggcttcgttgtttgatgctttgaatcccaacttgactgcagtgtgtaggtgttgccccccaggcgtgacgagggcaatccctgcaccagatagttgatatgtggccgacccatccacatgtagtttccaggtcggtttgtccttattgtgacttggttgaggtattggtgctggctcggggttactttctggtatgctttcttttttgtcctacgcattctaccacaaagtcggctaaggcttggcctttgtttgctgtttggggttggaaagtgatttcgtactgacccaactctaccgcccacttgagtaaccgtccagaagcatctggcttttgaagtatttctcataatggctggtcggtatatacctaaacaggatgagcttggaaataaggcctcaacttccttgttgctagaatgaggcagtaggcgaggttttctatcaacggatgtcggccctcggcctcaatgagtcttttactaatgtaatagactggatgttgtacgctgttctcttctctaatcagcacgacactcacagtattttccgtgacaggaaggtatattcccagttcctcgtcgtccagaggttttgaaagtacgggaggttttgcaagttttgcctttagctcttggaaagctctttcacattcttctgtccactcgaactgtttgtttcatcgcaggatgttgaaaaatgggacacatttgtccgttgattttg

SEQ ID NO: 233471 - DNA, 1355 bp, Cannabis indica
ttgcgaccatatcagtcacataaatttcaacatcattcaattaaatgtgtcaagttgggttatagtgagtttcataaagggtataagtgcttgagccccacaggaagagtttatataactcgacgtgtggtgtttaatgagaaggaatttccattcaaaaatggatttctgaacaattatcaaaaggagtctgaagtcattgtacaatcaccaagttcctggtttgaacttcccatacagcagacaaattcaactcagtcaaaccagtcagattcgacacaaccttcccatacacctgcttctgaacactctctgcctaattctaatttcgacactacagctgattcaaaccattctcagcaatctcaggcaacatcaccttgtgacatgccacgttcttcacacacggatcaggtagacatctcaaacaatttatttatcgatttagatttttctagaaccactactgctgatgcacaggctggagaaactcgaaataactcagcacaacctgatcacagtcaggtacctgagacagcaccaaaaccaagccatcctatggttacaagatcaaaagtaggagtatttaaacccaaagtgtacactagtcaggccaagtgggaacactatctgactgagccgagatcagttcaagaagccttgtctcacaaggggtggaacaaagccatgtcagaggaaaatggtgccttgctcaaaaacaatacttggattctagttcctagagaagaatggatgaacattgttgggaataagtgggtgtataaaatcaagttgaatgcagatggaagccttcaaagacttaaagctcgattagttgcaaaagggtttcatcaaaggcccggtattgattttggggaaacattcagtccagttattaaagcttcaacaatccgagttgtgctaaccatagctgtctcaaaaggatgggaagtgagacagcttgacattaacaacgcttttctaaatggtgagctagaagaggctgtttatatgagtcaaccagaggggttcgaagacaaaacaaagcccaaccatgtctgtaaacttgtcaaatctctttatgggctaaagcaggcccctcgggcctggtatgaccagttgaagcagaccctactgaagtggcagtttgtgaactcacgtgcagatacttcattgtttcttctcaaaactcaaaggtatgtcatcatgatcctcatttatgtagatgacattgtcatcactggtaatgacacacaagaggtaaacaagtttattgacagattacataaaagctttgcacttaaagatcttggagccttgaactattttctgggaatagaagtttttagagatgc

SEQ ID NO: 233472 - DNA, 636 bp, Cannabis indica
tattttattaatatatatagttacaacattaaattaaagattatttatattttttttattgttttacataataaattaataataagctattattattattttttaataattttaataaaaatattaactaaaaattttgatctaagttttacaattgtgcatttaagtcacacgctaaaaattaatacaaatatatcataaagttatttttacaccaaatatagtgttgaaatacaagtcatcataataggatcaccaccaagcagctactcctaaccaattagtgaaggaatcaggccctattttgaggcatgctcgaaaagaggaagtactctattgtattaatcgggcaaaatttttataaatatgtgtgtttaattttttcatgttagactttttatttgggcttacattaacttttactggttttaataaacgttgattgtatatttctttgttgtgttagcccatattattagtgatttatagctaatgggcttagcatcttagtgtaaagtctagttgaagtaaaagtgtggggttttctagctaattgaagcttttgatatgcaagcattccaactagggttataagtcccctccctagctctataaatacatattgtctcatcacaa

SEQ ID NO: 233473 - DNA, 737 bp, Cannabis indica
aaatttcttataaagtaacttgtaaaatgatttttaattttctttttgcttcaggaggtgacctagtacttgtaattttcgtggagaatgaattttattaaagcattaattcattatggatgagagtggaatgaaagtaactgctactcaaataacaaagtggttggtgtacatattctagaaaattgttcattatttgatctggaaaatttgattaaaaatgaaataaacactagttgggacaatattgagatctcctaccaagtagctaaaagtgagccaccaatcaacatgttgactaacaactcgatgcttttttacacagacttgaagaaaagttacaattttatacttgagttaccattgtgcatagaagaatgcaattatacttcattccaaaatatggtaacaatttaacatatatagttttgaaataatgttatatgttaataaaaagaataactttagtttttgtgacaggttactaatcatccattaatccaaacacattgccaatattcaaaaaaaaaaaaatcaagttgcaatacacaacatgaggattggttccttggtactacaagcaagaataagaattgaaagtgagatatttgaagatgctacctcaagtaactataattccagaagacttgctgattatactaatgaagttgctgacttcatcattgaagaaactacaagaaacaagagagaaaaggaggaagataaaacaatcattg

SEQ ID NO: 233474 - DNA, 535 bp, Cannabis indica
catagctttgtggattactcctcgatgagagagtgcaaagaacaggtgaaatctgttgctattttataatcctccatgagtaattcacatgaggtttctcaagaaccatttgtagaaagactatggctttgctagatggagcggtgtaacaacctgagttagaatgttggaggtatgtataaagccaataagccaatgtctttttcaaatgtttgtagatttaataagattgtatattgttgttgtgggaaatgaatgttcgtggtgacaaaatctgatggaaatattttaccgagatctagatttactaacaagtatgtttcgttaacatcctaatacgaatttctaaaacaatgaaataaacacataagggtttaagaaaaccttacattcggtgcaacggaatataatgactccttccgttcagatatctagcccttgattcctttctatagcaaagcattatcaagatctgaacctggatctctttgtctccttcatgagcctaattctcactactacaatttgggtcttt

SEQ ID NO: 233475 - DNA, 868 bp, Cannabis indica
aaaattttaaacatcggtcgtgaagtgtgagttattttattttcattttttttatatggggagagagagattccaacttaagacctcttgtgagaagtgtataacctctaaactatacctatggcccgaagcgtgagttatgtactaattgtaatatatcccccccaaatgtaatatagtgtgttttataggcacagtaattattagagttagtcccacattgttaatgtgtggaaataaattgttatatatacaatgaatgtgctactcctcccattgctaattgattttgagatgaaactccattcattttattcctaaattctaacatggtatcagagccacttgtgatccgttgtgagtccaaagtgctaccggtccaaaaagccgtttgtgaggcccaaatacgaggagagtgtattggagttaatcttacattactaatgtataaaaataagatggaaacctattcattttatccccaatttctaaccgtaacaccggaaattaaaataaatgaatcacaagaagattagtaattcgtaaagcaagcaaagcataatgaaaatggaacgatagttatactaatgataatcaagcaattaaacaggacggccattcctctgttggatctaattttaggtttctttctctcagatctcttttttttttgttttatcaaaacatctgtgttttggagcaaaagctccctcgataagacaagaacatggcggcgatcgcggtccaccagttcgctcagagcatcacttgccatgcttggagtcccgaacagtccagtaatacttctatcacttgctacaattttaattctaatttatactgctctctttaattgttgttttttttt

SEQ ID NO: 233476 - DNA, 1689 bp, Cannabis indica
tttttggtaactacaataagtaatgaagtcgcatgtcataaacactttctcataaagatattttttttaaatatgtctagtgaattttaaaaaaataacaatagaaatatatttttttttagatttgtctagtgagtttaaatttaaattgtaatgttgtaaaaaagaacaatactttctgtttaatagccacattttgtataggaaatataaattttttagcaaaaagaagaaaataagattgttatgttcttttttattacaaactgttcaacgtttcagcgtttaaagattaaacagattccaaaattttttttaggtgagaaatttctgtgcttgaaaatacatattgaaatatttttttttaaaaaaaaaatttaatgtcgatgtttgttatagttacaacatattcttgtaaatttttgaaaaatttcgaatagtttatctaaaattaagtttgaagtttttcgaatacgcgtgctaaactgaaatattaaaaattctattttcgatactgtaaatattataagtataactgctataaaaattgaaaaaaaatatattctaacatataatttcggccacgaagttgacttagaagttgtagtacaatattctaagggaaatttaactttttatagcacgttttagcgtttaaagtttaaacagagttcaaaaatttttttaggtgagaaatttctgtgcttgaatttttttttttattaaaaaaaaaatttaatgtcagtgtttgttatagttacaacatattcttgtaaatttttgaaaaaattcgaatagtttacctaaaattaagtttgaagtttttcgaatacgcgtgctaaactgaaatattaaaagctaaattttcgatactgtaaatattataagtataactgctataaaaattgaaaaaaaatattttaacatataatttcggccacgaagttgacttagaagttgtagtacaatattctaagggaaatttaactttttatgcatatattaccttaaaattatttctctaaacctatatgtattaaagttggccatatatgtcaacattcctatttttcacataatacctctcacatttcaaaaaataaattagggctgccttctctctttccctctcgctcatactcacgacgcaccccaatagacccatgacatacccacgacacaccccaatcgacccacagcggaccccaatcgacccacggcggaccccaatcgaccctatccacgacacaccccaatcgacccacggcggaccccaatcgaccctatccacggcactcgacgcacatacaaccaaagtgagacccaacccataacccatggtgcacagaggttcctcagaaaaatcaaacacaatgtcaaaggtgagttcgtgttttgtttttgttttttagtttttttattaattttatttgtgattttactgttaaagatagattttgttagatttagggatatatttaggtttagaatgtcagatctgtaattttggggcaaggtttgatgcacatccgatgtaggtccgatgggttcaatgaatctgtaaggttgcgaagtaggagacgtagcttcgatggggggtccaatgtggggtctgacggggtccgattgcttcttgtgtattatttattatttgtccgatgtgatgtaaatgagaagggtaatttgggg

SEQ ID NO: 233477 - DNA, 527 bp, Cannabis indica
ggtttatataagaaaataaagttatattttaattagcatacaaacagtttacatttcaattggaagattataatatattgtcccttggtttctacggcaaattaggataatatggacattgattcatgttcaactaattaaataagtgttattacaaaacataaatcattattaaatggaaattttaaattttaatcacagtgacaaaatacaagtaaaaatatgttagttagtgccttgaagcttcttttgttttctcctctgacaagttcggcaaaaattgagatttttttataagaaattataaaatctaatttatttgtttttaaacattaattttgttatcaatattattatattttatataattgacatttaatataatttatagaagaatttaaatatatattcgtgttatatatatatatgtacacataaatattttttttaagctgtgagataaccactcataataaatatgggactattagaaattattttttcattcacctcttccaataaaatca

SEQ ID NO: 233478 - DNA, 1582 bp, Cannabis indica
aaaaattgttaattagccttttatttatttacaaaaagtaaatgtattcattattcaacagtaatttcgtgtcacaacaaaaactcctgtccaaaaattatacataatatatctccatattttttcatatctataatgtaaaattctacatgatataggtcatggctgagggcatagattttatctttttcaatgaatttgtctagtgaaaaacaccaaccctcctttacaataagttaatagcaacactaaacaattgcataattaggttatgtttggagagcacagttgaatttgatagaattaaataaactttatacttttgctatgaaattacagagcatattaaaaaaattaatcgaacaactcaaattagtttttaatatgagataacttaatcacataaaaaaaataacattttttgtgcactgtttttctccatccaaacaagacctaaccagttactaagtgggaaagaagacaattcattaataaattacaattaatattttatgatgtgacattttggatgtaatctgagtcttcccactatatattttcttcattacaagcagaagaaacctcagtcttctttcatctagtaaagactagttctgaatcctgattgtatttgtcaaagcttcattaaggtacctttttatcaaaaccaacgaacaactcatatagatatatcatcatcatattcatatcacatattcttatgttgcttattctctcttcctctatctgttttgtaaaaataatttttattatcaaaataatataaaaatttcaaatctttatgtgacactcacaatcacaagtatgcctttaatgattttatagtaactttttcatattcttggcagaaaaaaatgaaaagggtacatcgttttggaggttggtctgtgtgtgtagcaatattagtattagtattaagctgcaccagcataccaagttcaaattccctgaggatcaaaaagcaaattaagaccaaatctggtgttttcttatcccaaaagtttgagttgggaccagggtcagtgatcaatagattttactatgacattgactttccaagaggtcatattgctgtgaagagttttaatgcagaagtagttgatgaagcagggaaccctatcccacttcatgaaacttatcttcaccattgggttgtttacagatactatcaacccaaagatgagtctcagaaacataacatatcaaaactcatcattgctggcaacaatggaatatgccaggatgatattcttgggcagtactatggtcttggctccgaaactcgaaaaacgcctacttttgttcctgatccttatggagttgaagttggtaatcctgctgaaattcctgttggctatgaggagagatggctgctcaatgtgcacgcaattgatacccgaggcgcggtcgatggattgggatgcactgagtgcaggtgtgatctgtataatgtctccaaggatgagtatggccggcctttgaggccagattatagaggaggtctgttgtgttgctatgatcaaacaaattgtaaagtcagaaaaggctttcaaggggtcaa

SEQ ID NO: 233479 - DNA, 635 bp, Cannabis indica
tgaatttgtctagtgaaaaacaccaaccctcctttacaataagttaatagcaagactaaacaattgcataattaggttatgtttggagagcaagattgaatttgatagaattggatagattgaatttgatagaattggataaactttatacttttgctatgaaattagagagcatattaaaaaaattacaattactaagtgggagagaagacaattcattaataaattacaattaatattttgtgatgtgacattttggatgtaatctgagtcttcccactatatattttctttattacaagcggaacaaacctcagtcttctttcatcatagtaaagactggttctgaatcctcttttaccaaagcttcattaaggtacctcttttcagtttcttaagcaaaaaaaaaaaaaacactacatatagatatatcatcaccatcatcatctatattcatatcacatattcttacgttgattattctcttttcctggtttaacataacatctatctataaaaaatttaattatcaaaatatactctgcccatttctctatgtttaatttttatattttgaggatataacttcaatactttgcacaactcttactcaaaaatttcaaatctttatgtga

SEQ ID NO: 233480 - DNA, 834 bp, Cannabis indica
gcttacatgagtccggagaggttggattcgctgacttatggccaaaattacaacggttacgctggagatatttggagtttgggtctcaccctaatggagctttatatgggtcattttcctctatttccgccaggtcagacacctgattggcctactttgatgtgcgttgtatgtttcagtgagctgccgagtttcccagaaggcgtttcggatgagtttaggagcttccttcactgttgtttgcagaaggaatcaagtaaaagatggtctgtgtcgaagttgttgtctcacccgtttatctgtaaagattctacaatcgaagaaccgtaaatctaacctgaccccaatggagagaatcatattcgaaaattcatactgtttttttttttaatattgtagttgtaaaaatagttggaggaattcagattaatgagtacattttaattgggatctaacattaacgaaattgatattgtatagaatattttttgttatgattttttatatatataatttcatttttgtataccctcaaacaaaatttcaattatgtaagtagcaactttcataaaatcaattacatcttgtatttttgattatttttaatattactatttaatacttttatgagaaacgtaaaactcctcttaaaaaaattatgtcaattttatatgtattaattttattattattattattttaatctctcgctctttgatacattttgtgttttgattattattattattatgaaatggttggcagaagtattaagttggacaattaagttgcatttcataataataatcaagaaagcaatttaaaagtattaag

SEQ ID NO: 233481 - DNA, 1216 bp, Cannabis indica
tagtttgaatactctatgttaatacttttattttttttttctttcaaaagagtagatttatatatataaataaaaatagaagataaaactgagggaaattagattctaaactaggtctaccgagtaacaaataaatacctacacaaattatgttgtctagcaattatgtattgttaatatctctaattttatataatctattctgatatttgagggtgggcttaagccctccctgggctctatgtaggtctgcctatggttaaaatgtattattaatatttaacattttcctcggtgtcatattactattgatgtaatgaaatatcgggttctataaaatttaagaaaataatttttagacaatataatattgctaatcaatcgtgaggcgtcacttatgaaagatgttagacactactagtgcccaatagcaatgctcattcaattattatatgctaattactatttttatttcgctatgtatcaaatcttgttttttgaacttttcatattaaaaatttttccgaattattgaaattgttggattcaagaacttttgtctaattctattcaattttacgaatacgacaattaaccatgtaccaaatcgtgctctccgaactttgacacatttactaaatcgtagctcctaaactttcatcgatgcactacaatttgatcctaatttttatacttgaaaaaatataaagtgggattaaaagtatcttagaattttttatcacctttttgtatttagaacaagaggcatgtttagttggaccttaaaaaataactcttctaccacagttatttggctatttgccaaacacaccccttaaacattttaatagagccttttatcatgattgttttggtttaggtttcatttaaggagcatatttaactcctcaactcattgtcttatcctttagcagccacaccttttttttttctctcaagctccctcttctctcaacttcattcataatcatgctttgaaaaaattacaccaaagataaaactaagtttccattgttgcaatagatctcatttctctcatcatagtctcatctttttttttttcaggtataagtgcagaggataagcgccattacctcccgccactgtttagccaaacgatcgccttgacacttgttgaaatttattttaccaggatcttagtgttgggttttatgccctaaataaaactctgttt

SEQ ID NO: 233482 - DNA, 1318 bp, Cannabis indica
agttattaaattagattattatttacatgtttattttttttattagtatatttttattgtcatgccatttgttaattaactcgacacttaaagttttaaaattataatttaataatgagaaattgaatttaagtatttgtaattgattaatgatattttttaaaattgagatatgattagttattatttgagttatggtttcaattcttttaataaaaccttggagagaactgtatctatcaagattgttttttttttgctacaaaaaatattgttttttcaataaaagaattgttttttttaataatatgtgatgtgtgtttattatatatttattatttcatgtcatatataaaaattgtagctttcaagcagataatcttaaaaattgtgcatttcaattaaataatcttaaaaattgtatcattcaaataaatgatcttaaaaattgcatttttaagaatcataaaaaattgattaaaaacaatgtattttttaaaatctcaatttatatgcaaagttaattatgaaaaatgagatgagactaaatttatggctattataagtgtgcaaagtgttaaattataccacccaaaaaatacaaacaaattattatgatataaaaatacaagctaaattattatgaataaatttttttcttagaaaaaaatatattattaataattacaaggagggtggactttccttctatctttcaattttgtaacaaagcaacaaaatttaatttttttattttttattttaaaattatcttccatagctcacaaatcctatttattattattattattatgaaatcatgtgcgttgtacgtacgctcttgccattaaccttttattcccctcttatccaattattatctttaatttatttattgaacaaaacataatttgtttgaaagaaaatgaataagccacttatataaaataaataaatattgtatatatatatatatatattataaattagtcaaaacatgttacgtatacataataagcttattgtagtcaaaatatgttaaccatctattactattagaataaactcataaattgtatttgaagaaacaaatgtaatttgggtgtattgatggttttcaattcattttatgtgttctaacatatgttagagattttattacaatggaagaaaatcaagatattacaactctattgtaatacatacaagaaccaacaaagagattaaataaatgttataacaacataatatacaatatatatacactatatatattatatataagaaatggaagagaagataagaacacatgtaatat

SEQ ID NO: 233483 - DNA, 807 bp, Cannabis indica
ccatcagtagtcttcttcttttttggtgtaggtgctggttgatcatcttcttcattctcaggcttgtctttgcttagaccagcataattcttaccacttctcaaggtaattgccttacagttctcttttggattgacttcagtagtactaggcaagttaccttgagccatgttagtgttttgagaggccaactgctccactttgtttctaagacctcaatgaatgacttaatctatgtcatgaattgcataaacgcatctttctgagaatcagaccctccactagaagcttgttgttggtgaaactgttggctttgctgcaattaatttttctaagggtagaacccttgttattcctgattaggaaactgtttttggaaactctgccgacgaccccttggttgaaaccataattattctggtagtttctaatggcttgggcttgctccattgacaaactgtctacatctatagggcaggtgtcagtggtatgaggtcctccacacagctcgcagacaacttgagcttatttggcttgtgcagttacaagctttgttaatgcctctacctgggctgtcaacttagttattgcatcaacttcatacattcttgcgacctttttagttgggcctccctcagttgaccaatgttgattagttatggccatctcttcgagtaattcaaatgtctcattaacactttttctcataaaagccccaccagttgcggcatctacaagtgttcgggtgttgttcaatagtccagtatagatgttatgcacttataaccatttttcaatcccatggtt

SEQ ID NO: 233484 - DNA, 825 bp, Cannabis indica
aataatttccaacaatatgtttatagagttagggaggagacttagctacaaaccctaatttgctcatcaaaggtacgttttagttaactagaaaagcacacacttttgtttcaactagactttacacacacaaatgctaagcccactaactattgatcactaacaatataggctaacacaacaaataactatccaattaatccaaattttaataaaattaataaaagttaatgtagcccaaagaaaaagttaaagtctaacgatctctcacttagactacattaatttaattatatatattgtattaaaataattttatttaaaaacgaatcatgagttgaacaataggaaaatatttgtggccattttaaaaataatagctctttgatagcatctcaacatactagtcgaatttaacatttgatactgaactatgacaatcatattatttttaaatcaacaaagtcgttcataattacaaatactagagtattaaatcgacatggttaataagtttagtaatgtgataaggaattaagttcaacatgtaatcaatttaaaatgacataagatccttatcagtatcctcaattttactgatatcgtgatgcttcataaataagtcattgaaattaaccatacactcattaatagtgtcactaaatatgcttaaaaaattaagccaacaaaacatcattgtcattaagtaaataaactttaaagaaaataatcagagcaagatatgaactacatgcattcaatttcatcattcttgagaatataagaaaatataattgaaagcataaacatccaataattaaaaaa

SEQ ID NO: 233485 - DNA, 1200 bp, Cannabis indica
cgcctcgttccattttcttccttttcgaaagccaaggccacctcgattcttaggtaagcagaccttctcccaggaagacagatgcagtttacttctatttcctttcatcccacaaagaaagtcgcgataactcttataaatagctgcagtaaccttttgaggaaggataaacaaactcatccagaagttcctgatacctaacaaaactgaatgaatgagttgagcacgccctgcaaaagacagatttttgctagcctaacagtttaaattcttgtttagtttatccaatataattccacagtcaactgctttccattttgtaggtcttagtttaacccctaaatacttcagaggaaaagacccctcttctatttgcacctcatccaaaatcttcttcttgtcatcctctttaacacctccaaaataatgagatttggagttgttagcagacagacctgttgcctcacaaaaacttcggaaagcattggaaatcaccataaccgccctgatgttccctctacagaaaattagtaaatcatctgcaaagcatgagtttatcagattactctgtttacataaaggatggaagccaaaccctttctttatcgaagcatgggccagaagtctagttagataatccataacgagaacaaacagaagaggagacatcgggtcaccttgccgaagccctttttcccctttgaaggagccttgaatctttccattcaacaagagattgtatctagtacattttaagcacaccataatccaatggataaacttaaccgaaaaacaaagttgcttgagaagactttcagtaaagtgccaatcaaccgtatcataagccttgctaaggtcaatcttcatgatgcatctaacagaaattttcttcctggtgtagcctttaagaaatggttgtcaattaccttcaaaagatgtatcagatgtttagacccatcattctctaattttaaaccatccaatatccgttatgacggttgcataatgaacagtcaaatcatcagtagaacctaaaagtttatttcaccaaacacctacaacaagtctaagttttgtacaaaataggcagacatgccctgttgtccaaatttaggaagttgtgcaagtaatactcatacaattatggcaatggtgacctctttaccatttttatgagactataaatacccccaactacat

SEQ ID NO: 233486 - DNA, 1335 bp, Cannabis indica
tgtttaaaattatagcaacacacatattttgtaattaattaaaataatgtatacaaaattgtaaaatgccctaaattttaagtgttttctgttgttgtgcaattttgagctttaaaagcgataataatgtgaatttggtgcacaaaaataataatcgagatatatgtcaaagtcagaaagcaaaacgtgattgaaagaagtcaaaattagaaactagcgacgcgattattttggcacatgcgaattaaaaaaagacaagcagtctcgaaaatatggttcaggcgacatgtcgccactcttacgaaataaattaatttttgcacgtagcaaataaaaaagataggggatcctaaagataaggtccaggcggcgttgcctggccttaggtgacatatcgcctgacgatattttaaaatttaaatcctaattccaaatgacatcttttctatctttttaagcctatacaaaaaataacctatagatcaaaaaacatattaaagaacaagagaaagagatgtcaagcttaagaatcatcaactttcattagagtcttcttcttcttcttctttattttctaattaaattattgtttgtttgtttactttttaattattttactatttcgttcttaattattatttactttaaattgtctaattacagtgttaatgcagttttttgttaacagatctaagaagatcgtaatcaagcaagacaaacacaaggaatcgttaatcaaagtaaacacgtttgtgaaaaaaaaattgacaaagacgaacatgaggattttatagtggttcatcccctttcagcggtaataggctaatctacttgtagttttattgttctcaatgcttaaggatagttcttgagagttatgttctccaagagtttaatccccaagtgagtttttggagtaagagaatgtgagatcgtgaggatgagttttagtgtatattgagtgttctaagtgtgtcatttacaattgatatcacctcccttatataggtgttcatcaaggactcacataaattttcatcttcgatatcttctccacctaactattatttagttaaatttagagttcaaaataataataaaataacatttcaaacaatatctagaaaaatgatcaaagtcgaatatatcttctatccatagcttctttttgtcacgaggaacacatgctatgatcatggtaagtcacgagaagcacgtgaggcactccccactttgggccaagatgacacactgaggccctcagggctgagatggccaagtaggggcataggagatggtgtggtgttgatcacttaggcccgagacaaacgagtg

SEQ ID NO: 233487 - DNA, 2062 bp, Cannabis indica
tatgagttttcattattttgctgagggagccctttgccacttagtctttctcgacttcttcaattttgtaacatttccatggaaggagtaccgactcttagagcagtctcgacctcttctcagctactcattttgtttaagggagctttttgacactttggcttattcaacctcttttatggtataacctttattagctctgaaagcaatctcttcatctgctgagtgtacattttttacttattcttagtcgattattagatgaattagtattgattttttttaagttttgcatagatttgatgtgttttctctaagtgtgtagatatttgtgcttaagagataattttgtgatggactgaaacatttgagcaaatttttgacaatgtttttataatttccttgaagacttatgaaacccaaaatgatagagctcattcttagcttttcaaaatatgttaaaacatctcatttagagtctgaacgcgaaagttatgcatgatttactaagcaaggtcgaagcagtaaaagagcgatagaaaaaatggtatgtggtgctatagcaccaaaagtgtggcgctatagtgccgctcctaaaaaaaggataattttagcacgtggtgatatctggaagtcatgcattgcgctatatagcgccatacgtgtatttttgaatttaaatcctaattctaaataaattctttctattttgttgggcctatataaagaatgacgtaagtcaatttttggacgattggagagatacaaactagaaattttgagattagaaaacatattgaagagcaagagagaagagattctaagaaatcatcatcaactatcatcattagagtcttttttttcttcttcctctttattcttttatttagttatttaattatgaacatgattattgtggttattatgtttgtgattatgaactaaacaatttttctagtgtattgatgaaactattttagattatgaattaaattttttagattattctcatatttgttcttgctatttgtttatataattttgtggtaattatcattttattaatgcttgatcaccattaattagtatagagattttagatttacacttgaaagaggtaatctaaatttgacatagaattgcatgacatatgaaaagtgtgagatttaaagattacactaattctatgagtttcatttaaaaagaatcatattgctttattattgattaattgattaacattgaatagaaatatctgttagttaattaagttaattctatcatcactcgacagaggttaatagattatattaggattcttgaaactataaattgtagaataaattagaataattggtttactgagattcatagtttgaaataggaaaatcaatgctctatgtctttattttctaattaaaatcgttgtttatctgtttactttttcagttactttattattttattcttaatcattatttacttatgaattctctaattaaagcataaaccaaaaagtatagcaattagtgaaatttaataatcaatccatttgggtttaggaacctttttagaattaaaactatgttataacaacagtttacgcttgtaaaaattgtgcatcaagtttttggccctgttgttcggaattgaaagttattaaattattgttaatattattactaaaagtttttgctttaaattagattttatattgtttcttattttagtttttgctttgtcttttagtttatgcgaaaaaattaagttatacaccactcacaccgctgaatcctgagattgaaaagactttaaagtagttaaaaatgaagaaaaatcttgacaacaactttgaaatagtagttatattgaaatgtgctagaaaacaaagttatattggcttatgtttttttctttctaaaagctatagttttatgtaattaattttgtttgatttgcaaactctcttacataatatcacgactatagacttcccatgtctaggtttattaacatttatatcattagattaaatgattataaaaaaaataaaaattaaata

SEQ ID NO: 233488 - DNA, 2562 bp, Cannabis indica
agtgcatgcccacacataacaagtgagtcctcaatcatagtatgtaagactgtgatgaatccaaaacaacaagaaggaaaatcgagctcagaaattggtgatactctactacagaaatgatacaaatgttagagatttgagcggaaggagtcatttaattcgctgcaaccactgtaaggttctcataccttttatgtgattattttcatcgttttagaaattcatattaggatgttaaaaacatgcttgttagtaaatctagatcctgataaaatatattacaacaggtccatgaacgtattttttgtcaaaataaaatttaataataatctgatctaaaggtgttatgacaaaactatttacattttttgtgttcgtgttaggaattatcttcaagttgggtatattaataaaaaaagttgtcaaaaattaagctcaggatcctatttttaccattttagaaaatacagggtccattttgttatttaacaaaacagaggatccaatcgataacttttataaaacatagagtctaaaatgatatttactctaccagaaattgtatcaaaattcctatcttttaatcataaggcttattcaataagaatgcatctaaattcataattaactaaataattatactgctaataatttgttaatttttatatctaatcatacagttattatatattagatttgacctttcctaaacaatgtaaaatcccatagtttacatgacattttctaattttatagatcacgagagtactacttatcacattattcatacaaggaagaagtaaagttccctaaaaacaaagaaaaagaatagagtaatgtaatttaatgaagcggttactgtgatctccgaaagtaaacataatcattttctgaaattttaacatcctgtgtttgttgtgtgtatagcatagaattaggagttacaaaataaagggtgataatttctttaaaaggatatatatatatatatacataatatacaaacaagctttctttcaaaaacatataccaacagacagctgtaaagagcaacttattataatttgttttgattgaactttgagaaacaaacatataggagctccagctagcatctattaatagcgtagtgtacttcgggtactgaatttgaaatctgctacatgtatatatattcaagaacaaaacaaaaggcctacacgtatattctgcaaattcatgcacatggtatagtaaggaaataatacaaaagatcccatattgtattaaaaaataagttgaaaaaaaaggtaacaggtaaaattaaaaggaagtcactattattttttttataaaagtaaatacttctaaaatataggctgtcttggtgggaacgatatcccgaatattatcctatcacagtggcttttgtgtgtttagaatttcactcgagattaaataggggtgctatctgcatggtcctagtcccttgtgattagggacggaaccataattagatggtagcggccagtatgtgttaatcatacaacataatcgatttaagatttatttgatgattgaaattcttttttgaattagtagtgcatatcgatgtaagaaatatcatgttaaagtggagttggacagaatgtgttctgcggttgtggcaagggatcatctaggtagggtcatctggattcatacttttaagctggactttgctgatactttatgtggaaaaacggcggcttgctatcttgctctagatgtcgcgaagcatcatggtcttaagtttattattgtcgagagtgattcgagggtagtgatcaacgctctcaatagggaggttacccgatggaagattaagaactgtgtctcattttgtattaaatcttctctttattttgttttttttttaaccaaaagattaacttttattaaatcaaattagctaccaagatagcttctaaactagcagggacctaacttcttcgggaaacacagccaggaatagaaccagaagaatgagctaaaaagttagccgcctggttcccggactgtttaacaaaattaataatactaatgtggttaagtgggcgttttacccaccagaggttcagttgtatccctattttctctatcccgaaacatttcttttgtaatgaccgctgttggagaattcgagttcaatctctcacaccaagagagttcagtacacaactaagaacattccacaaacacttgatctcaaaaccagtaggcaaagccaattgttaaaccagaaaattttaactaggattgaataatagtctttctatctttattgattatgtatctgaattacaagtaaaggattagtttctacattacaattacatagtatttatagctaacgtatggtactagagaaaccgactaaagtaacggttttaactaactgaaagagttagttaaaacagttgcttatgtggcatattacaaagtcacacttagtctaacaaatctccaccttgacaagtaatatccacaaaataacatccaaacaatgttgtaaatcaatcttgttggacatccaacacattc

SEQ ID NO: 233489 - DNA, 1304 bp, Cannabis indica
tttttcaatgaattttaaaagggagatttgatttttgaacattttttttaataaaagatgtaaatttattaaatcatctattgagcaattacattaaaaatgctactcgggatagaagtcgccgagtagctacgatcagcatgtaaccataaaactctagctaagtcatgagcaacacgattaacaaaccgtttaataaaacgtaaattaacatttaccaaattagacaaaaggaattttgcaatcataaatacaactgccaaaaggagagatcataatgatcgaacttctaatagcttgaacagtgatgagactatccgtttcaacggttacattggaaacatttgacatctttagccaacttaagacatccttcacacatatggcctcggcaagacccgaatcaacacaaccaacccaagaacctgatcgagcctgtaaaacttgaccccttacatctcgaaagacccagccatacccaaatctgtttgcaccctcaaatattactgcatctacattaatcttgtaattatcacctaatggagcacagcattgctcatccccttccccaacctccatcgaaaaatgagaaggattaaaggagttattttgagcaaataacctttgttcaagatcacctttagcaaaggcaacaatatttttaaaagtattactcttcccattccacactttgttatatcgatcatgatatattgcccaacataacatagcacccatttgcctatcctccttactccactgttgaaactgattttgaaaccagacaccaaatgaggaaaacacaacattcccaggaagcaaaccaacttcacaccagcaagcagacgcaaaattgcacaaaaccaagcaatggctgattgtttcagccgattggttacacctggggcaaatagaggagatatgaacatgcctttgaatgagctgagaacgagttggtcaacaattagacaacgctcgccaaagcatttcttttacctttgagggaaccttcaacttccacagctcactccaaaaacctgagttgctattaaagggctagaggaaactttaaatcttgaatcaatttgtaggcagatctgacagaatatttacctgaggttttcttactctaataccaagtgtcaatatcacctgaagaaagcaaattgggatgctaaaaatcaaatctctgtctctactattaaaaaaaatcagccacaatctcatggtcccagcttctaggatccacggccaacaaacaacttactttttaatcacacaagcttggatgaaaggatgtgaca

SEQ ID NO: 233490 - DNA, 1006 bp, Cannabis indica
tgaagatcaccatggagaaaagcattattaatgtccaattggtggacattccaattgtgcattgcagaaagagctaagaagatcttgagggtgttgaattttgccacgggggcataggtgtcagaataatcaatgccgtgcctttgagtgtagcctttggctactaggcgggctttgaagcgttcaacagccccactttcattgtactttactttgtaaacccatttgcatccaatggctttttggccaggaggtaacttggtgacaatccaagtgttgtttttttcaagagcatccgtttctttatccatggcaagtagccaatgtcgaaactgggatgcttcagcatagctttgtggttcaacttcggaataggctgcaaggacagcggctctgaattgaggatgcaatttaatgtaagatagaaaaggctcaataggatgatgagtagaagaagcatgacagacatagtctgtgaggtgctggggttttgtaatggttcggccagcccttgtagatgtcatggaagttgcatgaacatctggtataggtgctggtttaggaactgctgtaggggcatcatttgtacctaatgcaggtgagattgtgggagggcctggtgtgggaatatttggtccaggagatgcagaaatattgttctgctgtaaagtggaatctggtatggaaataccaggtgttgttgctgattttaggccagaaatgggtgaaaattctggtattaaagttgctggtgtaggagctgtatgtgtggaatcagcaggataagattggggagaaatattgtctgaattggtagcgggttgtgcaccagatattggtgcagattgacaggcaggtgtgtgcatatttggttgatgcatgggttgtatagtggggaagcacaaggtcaggaaacaaggtgcttaccttagaggagatgtagttgaaaacacgggaaaaatcgtttcataaaagactacatcccgagagatataggtttgttttt

SEQ ID NO: 233491 - DNA, 736 bp, Cannabis indica
ataacaagtaccattaatcacaaaaatacttcaaattaataagtaatattcatatttagataaaaaaaattgacagaaatgaaagtataaacgagaaaaagtgagaagcccaattgcaggtctgtggtcccgtctacgagcataatcaccaacaaaacaatgagcaatatgttcagagaatgttctttcgtgaacaaattatacattgcttgtcatctcgattattttcaaattttatctgaaaagtaagaaaagtaatattagattaaagaaacaaacgaatattatatatatactagttaatttgatacaattataggtgtgataataaggaaactaacaaactaataactaatagttaacaaagagaaaagaccaattaattaattacattgctcaatccatctaaactaattaaagacttaattagtgttgtagtagaatttttttatataaaagctacataaaagtgagtagtttctttctataaagcttagaatttgactgatatcattactattttagaaggcaaacacaattctcttaacaaatttttatatttaatgttttttcattgttgactaagaagtaagtataatgagagtcgtcttaatcttcgaggagcctaggacaaaatttttaaatggagcctaaaaaaatactttatacaattaattatatatacatttattttctggtgcactgactgaggtggttcttactttcttcattccat

SEQ ID NO: 233492 - DNA, 1047 bp, Cannabis indica
taaggcataaaacccaacaggagatactaaggttactaaccttgaatatgagaacttgatacaataagtgaccagttactcatgggctggctatacatctccatgaccgaaggaatcgcaacagaagtcatggggtcacactctgcagcaaatcaatggagaaatcttaagagcctatgcggaggctactcaaaatcgaagatggacgacactcacactttgatccaaaccactaggagagggtcaacagcgatgagcgagtacttgaggcagaaaaagaattggtcagacatgttggccttggctggagacccttatccagaggctcaccttgtcgcaaatgttctattcggacttgatgttgaatatctttttcattgttgtgcaaattgaggctagatctaacacaacctggcaggaactccaagacttactgctaagcttcgacagtaagattgaaaggctccaaaaccttatccttaacaacaacaagactacaagttctttgccaacagctaatatggcagctaagaccaacaacaatggtcggggtcgaggttttcagtcacaaaacgctgcaactaccagtggtggccgcttctccaacagtcgaggaacctcttgcaaatttagaggaaaatgacgtggccttggttctggttcgagacctacttgccaagtctgtggcaagtatggtcatacaggcgctgtttgctacaacaggttcgacgaaagctacatggggtctggcccgaacaacccacacagccagaataaagcagggcaaacaaacaacaatcacagtgccttcattgccacccctgaaattctcgagtcagatacttggtttgccgataacggagcaagcaaccacataacatctgatccttcaaatctaacttagaaataagattgcaatggtaaggagtctgttgtattcggcaatggtagtaagcttcaaatctcacacattggtagtggtaaattgaatactaaatttgggaactatctacttcttaaagatatgctacttgttcctaaaattgc

SEQ ID NO: 233493 - DNA, 656 bp, Cannabis indica
taaaaagtacaattggtgcctagtactttccttagtgttatactgttattagttaaattaagtatcgggtctcatataatttaagaaaataatttttagagaatatcactaattaattgtaagataccacttattaaaggtattgggcatcactgatacctaatagaaatgctctttcttaagtaattatatagaatctgatacttaattacactgataaaagtatgacgcgccgagaaaaatattaagtactaatagtacttttttaatatttctcatgtaataactattagaaaatatattaagggtaaatactattttaaaccttgtgttttgtaaaaattattaattagaccatttgttttgttaaatgataaaacaaaccctctgttttattaaatggtacaaataggacattgagctcaatttttaacaattttattttttgatataatcaactttaagacaatttctaacacgaataaatacagaaaatgtaattagttttgtcataacatttttagatcggattatcataaaattttattttgacaaaaaatcagtttaattaaggtcctatttgtataattttagaaaatatatggtctattttgtcatttaacaaaacagatgatctaattgataacttttacaaa

SEQ ID NO: 233494 - DNA, 657 bp, Cannabis indica
agagtcaaacgaacggatccggtgttgggatagcaatgatattgccagacggactccgcctctagacagccctgtgttttgcattcccagcttctaacaacgaagctgaatatgaagccctgtgtttggcaaaagctgtgggagccgcaagagtagaagtcttcagtgattcgcaactggtggtcaaccaagtcgcaagagaatatcaaacgtgtggagagaaaatggctgcgtacatagctattatccgggaattgctctctgggagttgctccatgagtttagggagtataaagtggaaagaatccccagagaaaagaacgctcacacagactgtttggctaagttggccttggacagtgagatagagagactgggggtagtgcctgttgaacacctcacagagccgagcattagaattaaagatacggtggttacaattgagcaagagccaagttggatggaccccatcatcagatacataaccaaaggtgagttgcctcaagaaagggccctatcgagaaggctacagtatcaggcgcatcgatatgtgatgatggataatgctctctaccaaagaggactcagcatgccgcacttaaggtgtgtatcagaccctaaagctagacagatcatacaagaggtccatgaggggtt

SEQ ID NO: 233495 - DNA, 1031 bp, Cannabis indica
ttggtgtaaaaatttctaatttttaacgaaaataataatacataaattatattattgtaagtttatatatagctgattgttaaatgttaagtaaattgttacatgataatttttgattggtcaaagttatgaattttttatcttttttaaataaattaatttaaatatactaattataaaatagcacgtgaatttcaaaaatacaacctaagtattagtaccgtcaaaaattaaatttaaatatttatttacgactgtgagttcaacttagaaatttatgttgcaaattactctattataagtataagagtatttttggccactaaaccctcctaactgttatttcacttgtatttaaccttcaagtttaaattaaggtatcatccggttaactgtcactataggcagttaattgttactatagattatttatgcgtacacttttgtacacataacacatttatttatattagtacacttaatattattatttaaaaattattttcaaaaattattttaaaattaaatacaaattataaaaataaaaaataaaatatttttaaaaaataaaatatcataaattttaaaataattgtacacataagcaatctaaagttaagtagaagtagaatgataattgagaggatttaattacaaaaaatttcttattaaatataaatatattattattactactgtgtagaattatctagtgtgttttgcctcataatttattatggttattcaaacttcatattacttgagtatcgagttattagaatggagtttatagagttttgatgatttgaaatggtagagaataacatatttaacaaataagttttttcttctatggtacttttattttcattaaaaatagttcttaataatttttattaattgttaatttttattgtattttatgtaattttggatcagttgattattttcatttaaaatatttgaaaaaattgaaacaagtatctactgttaatttgagagtgaaaaatagaacttttcagtaattcaag

SEQ ID NO: 233496 - DNA, 741 bp, Cannabis indica
ttgaatagttaaaaagtttttgtatttgtgattgtgaggatagatttgcgtcgacgacgttgtttttataaatttaagtgtgtcagtactgagtacgtgtccgagatcttagccggtggaaccacgtgtttcatttaatatcctcactattttcaatattaattattatattttctcacttaaaatcattatacaccatcacatttatttttttatttttatgaaagagattgggcattcttttcttttctttctttcttctactctcttcttacacctcctttttattttttattatgttttgtgtgattaaaagtaagtgggatttttgtttgattagactatagaggatgaggcctagtatagtatatgctaagctttataattggattggaagataaatatcttgatatcttcgattggaatggatattgacaacataacatccattttttttcttttctttctcttttaggggttaaggccattttttgccttattcgtttactattttcaattttttaggatattaatgggattttttttaatatttacaattttaattaaaaaataataatattttataaattttttatattagaagttttttttaccgctttttataaaaaaaattcaaaaaataacctaaaagtaacaaaaaaaaaatatcatctaaataacaataaaaaaataaaaataaattaataagtgtacaacatcaaaatacatcaaaaaactata

SEQ ID NO: 233497 - DNA, 1145 bp, Cannabis indica
aagctgggtagaaagcttcaattaggaaattgtttttgcgtagcttttctacttttcttttagggctagtgctcggtctttgtccaatagccttcgcttttgttgaactggccgaaaattggaatcaatattcaagacgtgcaaagtgatagaaggatcaatttcgaccatatccgcatgtgaccaggaaaaaacgtctaggtttgctctcagaaattttatcaatgttgattttacttcgagcaccaaaccttttttgatctttagctctctggccgggatatctggatcgatcttgatctcttctaactcttccacaggtccaacattgctgcttgggtcccaaagtcgaggatccacatcttcatccccgccttgggagattccgtacttgaaaatattttttcccttgtctgtgctcttgctggaggatacttccttcttaaccttggccacttcaaggttataacgttcccaagcagtctgctggtttcctctcagacaccctaccccattcgttgttggaaacctcaggctcgagtggaatatcaatgtgatagcctttaagtcatacaaaactggacgacctaggaatacgttaaaggctgaaggaacatctaataccaggaatcgtgccataatagtcatgctcgtcggagcttgtccaacagtgaggggtagacgaatttgtcctagaggtgcgactgcttaactagagaaaccatagataggcaagagacatggggctagatccttgagctggagtcctatcttttcataagcagttttgaacaagatattggaaggggctctgttatcaatcattgttttggccaccatcttgtttgctatctgtacctccacaaccaatgggtcattgtgtggaaacctgattttgaagacatcttcgtcgttcaaggttatggtaggccctcctgcccatgggattttgggcttcctttcttctatggccaggataacttcttcttgttcgtgttgtgctgttcgggcatacctctcccgagctttgcccgaatctccagctttgtgcagacctccaatgataacttacagatgtgtgtctaccggtggaggtggatcgcctggtttgtgcttgacttcgatcaggtctcctagatgcaacg

SEQ ID NO: 233498 - DNA, 1238 bp, Cannabis indica
caatcatctcttctatctcaacttttcttttcttatcgaaagaagttaaacgagttgagatgagtttcatgagcaccttactactagtacaactgcagccgctatgatcttcatgatgaccaccttccaattggttttgccatgcttcagtgtcgatcttgtaaaccaagtcgtctgcatcataaatggcgtccttgagatcatcaagccacttcctgactctggcgtctttaataagcttctcctcagcatcaatgagcagcagatcagccgagcacaacaaagttttcaactccatcaccagcttgagaatggcatcttttcctctaaagaaatccttgacctcagaagctaacttttgcaccaacggatcaaggaaagctgacagaagcgctcctccaaccaattcagcagccataagatgagatgagatcttccaacaaatagtaattgcaaaagagagaatactaacagaacaaacagtagtactgtgtgagagtagcagtgttgtgttgtagtgatctttaattatgaaatgtagatgttaattatcacaataactgctgatatataataattcattgattgtaatatatcatcatccatcaaaggcataatccattattgagaatcttgcttttagtaaagtagagttatcttgagagcatctttgaaaacctttctttttctgagagtggcagacagatatatggttaaagataatattgagcaccaacatcacacttaagcaacaattaattgttattgttagtaacaaacagaaaatgacaactaagaaaaaagattgatagagagaggtttggccaagggcctactaatatgagataatagaaacacaaaataaatggtgtcacaccagatcatgggacctaccttatcacagttactcaattagtgttgataaatataatcgtaaatcaaaaaaaaagttcttttagtgatagtctatgtaatataaaatatacatatacatattagcaacatcagccttactaaagtacttttaatgacatcccatctgctgctatcttcatcccaaacatcatcgagaacaatgagaaacttcttcccagtcaaaacctttttgacttcatttaaaacttcatactcctcttcaatttcacatttggcagatgtgaccttcccaataattgttttgatcacattcgagctgttgactttgtcatcgtctcccacagtaacccagactctggtat

SEQ ID NO: 233499 - DNA, 1807 bp, Cannabis indica
atcacattccaaaatgtttcacatttatcttcagattcaataacccaattagaaacttcataaaatttcttttgcaacctatcatacctttgagtttcaacatttccactcacatcattatagtttgccttgatccttgtatgacatcgctttatatctttcctccatcgcgctagaagatacttttctggtacttttttgacatgttcctgggtcaaaattgataatatatgcctacaaagaatccctttaaattcaaatagtcgacaagcacaattaatctcacaattctctctattgaacttaacaatataagtcctttctttttgttggtctccaacaaataaagtctcaattacgttaaagactttatcatcctcaccattacaagatacattgcaataaagcttcccaggtagctctgtttgtaattctttaaactaagaatgagtataggtcatttgaaattgccgctctatatcaaaatgagttacacaaggaatcaatgtactatattgctttacaaattgtttcaatgatgtcttagaattcacataatcatcaaaaaatgaattcatacttttactgtgctgagtagttgacataccagcccaaaaagtatcttttacaaatgaaggaacccaatgatgtttttccttatataaatcacttaaccactcattctctgaaagattaaattcattgagaaaatgtcctccatttttcttcaaactcttctattgttaaagaatcatagaccacattttttcaagacattctttatatgttcatatgctttgtatccccttaacttttcaggttatcttcttcattatatgccataaacaccaacgatgtcgagtcttgggaaacacaacttttatagcattttttattgctttggctttgatctgtgattatagcctttggtgcacattcattcatacatattcaaccatgttttgaacaaccaaataaatgtactaagtatcctatatgataacaacccacaccctaataaaattgaatgtccatgatggcaaacggtgcaaatggcaaatcatatttatttgtcaagtatgttgtgtcaaacataactacatcaccaaactcttcatataatgctctactcctagcatctgcccaaaatacattttttattcgcccatcattatccaaatccatcatgtaaaagaagccagaattcttaggctgcatactcataaaataatcatgtattgcttaagcatctcctacccctaatcgtaaacgtctagctttatcaacaaaatttctgcaatctttttctaagaatggaactttacatgacctccagcttcaactacaaatgtttgaaaaaattttgccacactaatcccgacacgatcatttaactctaactttctttgagctcttatacctatttctctgttgcatgtatagaatcgtgatttatggggacttaaatcatgattatgttcgagcatgacagaatttatcttgcattttccatcttcatacaaagtagcattaattcttgctttgaaattcgtttttgtctgtggactaggagaaagaaaattttgtttcgtgggttgtggttttctagctcgagaacatgaaatgcaaacaaacttcactttactagatcatgaatttcgacttgttttctttttaacagcaaaaccttcttgtcttccatattttttgtagtatataaacatatcttcaaatgaatcaaaatgcattcctagcttaggtgtttctactattttattcaaatttattgtacttccaacttcctcac

SEQ ID NO: 233500 - DNA, 854 bp, Cannabis indica
tctctggaacagaactcgaatgagttcttgagattgcatattgagttagcaaactcagggaagaatgaggcccttaagtgatgagaatcaagcaattataattctcaattcactgctagaatcctacagggaagtcaaaacaaaaattaaatatggaagaactgatattactcttgaagaagtaatctcacctctgaaatccaaagatttggagctaaaggttgaaagacctggacattctaatggggatgtcaacctgagtaggggaaggcctacacaaaagaaaccatggcaaagcaggggcagaagcactagtagaggttctcagaagggaaataatcaccacaacaaagggagatcaaatttaaaaggcactaaggatcctaatgggtgttatcactgtggaaagctagggtgtttcaagagagaatgctacttcgacaagagaagtaatggaaaattaagtatagatcatcaagaagaatcaaacaagcaaaataagactaagaatgactatcaaaatgcaaacctaagtgatggctatgatagtggggatgtctatgtggctgcatcatcttttaaagatgattggatcattgattctggctgtacatttaatatgactaacaataagtcttatttgtttaattacagagaatctagaggaggtaaagtcattattgagaatgatcaaacatgcaacattgaaggttcaggttctataattttaaatgtttgatggcattattagaaccctaactaatgttagatatgttcctgatttatttagaaacgtaatatctattagtttacttgattgatctgggtatttttagcaaaattgaggcaggagc

SEQ ID NO: 233501 - DNA, 870 bp, Cannabis indica
tctcaccttggaaggtttccatcaatctcaagctgactatacattgttcaccaaaggttctggacccaatttcattgcattactggtatatgtggacgacatcatcatagcaggcccaaataaattgcttctgcatcagcttcaggactccctcaacaaccggtttcaactaaagacattaggaccactgaaatattttctgggattcgaaatagcaagatctcaagaaggcatattcctctctcaaaggaaatacactttacagctgctcacagacactggttttgcaggtagtaaaccagctaaaacaccaatggaccccaaaacaaagcttgatgatgctacaggaactgctctcgatgatcctactgcctacagacagctcattggccgattgttatatcttacactgtccagacccgacatcacctatgctgtaaacactctaagtcagttcatgtcctctcctcgtactcctcatatgcaagccgtgcaccatctccttcgatatctaaaaagatgtcccggacaaggactactttacagctctaattccacattacatcttagaggcttctctgattcagattgggcctcctgccctatcactcgcagatctacatcgggtttttgtatctttataggtgattgtctcatttcctggaaaaccaagaagcaaacgaccatttctcgaagttcagctgaagctgagtacagggctcttgccactgcaggcagtgaagtaacttggcttcaatacttactcaaagacttacaaactcctcaagatactcctgcatttctctattgtgatgataaccaatccgcaattcacatagctaacaaccccaccttccacgagcgcaccaa

SEQ ID NO: 233502 - DNA, 1247 bp, Cannabis indica
aaaaactcattaaaaaagtgttaccaaacgccacctatatatgcgcgcttgagttgtgaatcaagacttcttggaacttggaatgctcttcttactgctactcaagaattctttaatcttggaaggggtgtgctgtttgtgagggaaagagaagaaaagaagttcttactgaggtttcagatatgatccttgctatcttagataacctggaactggttatgctaatgcattttacttgaaagtgatccattgatttcgttttactcttgaaggtttttgaaaagacagtttttgcattttaatctttcattttccttgatgattttacattactcacggtttcataattgattgtatagaaagggataggaatttacttgggattgagaatttaagcatagaagaaggcatattggtgataatggaaagctttagtaatggttttcgggagattctttaaataatatgtttaaaccaagattaaactactataacataaataatgcgtgtaaaggatttatgtggcagtgtgtatcattatgaatgttattaagttcagttcagttcagttttttttttggtcaaaataataataataatgagattgtatttattttagtcatcagcaagttcttcccttgtgttgtaaaagtattttccacgtcttaaattttccattatatgcctcataaaaactattctggataggatgtcatcactcactaaatgaatgttggtggtcaaatctggtatattaatgtcttttctacctcccatggtgatgtcttagaaattaggggttggggggataggtatggtgctgaatggttccaagattggagcaagatttcttcttttacgtatacacatgcaactgtatatactattttgtatcaaaaactgatctctgtggatttttattctgcctcagtttatgccttccccactcatatcttgattaatcttaaaagtaatgtttgccatttattacggtagccacagtacattatatatatatgatcctgttctgaaagtttctcttttacatattctcagtggttcaggctctcactgtttcaggtagcactaagtgaatgaacgtaattcctagtaagagaaacaaaaaataaaacatagattgaccctactcataagtctctaaatcaagtggtataattaagttaaatagatgaattaatatatctcttagcattctaatgttagaaataagtttaaatatggttgtt

SEQ ID NO: 233503 - DNA, 784 bp, Cannabis indica
ggaataaatcacaccaatgatcagagcccacaacccaattaaaacgctcataagtagagccgtatttccaagtaaatttatttccaacatagggtagaggaaagagactaaatttatctaaaaagctagcaaaagactccatatcaatactggaatggaatttactatccaacttatcactatataaaagataactattgaaatcacgcataataaaccaaggaaggttaggagaattatagaagactttgtggagaaggttccaagtatggtgcctttgattagaaacaggggatccataataaccagtaaagtgaaacatactattatcatttaagcttatattacagtcaatatgattacatgagaaagttaaaataataacatagacattggacttccacaaaagcataagtccccgccaaatacatttgagggaccttgtaatatcccgaaaattttattgatatttatttggccatattttattaaatatataattatgtagatattagagtaatattacaaatcttacttaatctaattacgagttaattagtaaaatttgagtaaatgaataaataaagcataatttattaattacggaaattttattagaatatgtgggtatcgtggataccatttttgaaataaaatatcttcggcttcggcgatcgtggggatttggcggaatggttggatatgtcatgataatgaattatggattagaatgggaattatatcggactagtttaaaattctaagttgtcggttttgtggaata

SEQ ID NO: 233504 - DNA, 886 bp, Cannabis indica
caaataacttaaacatatcaagaccttcacttttatttttcgaaatacgcataggtaaaatcagaacaatcatcaataaaagtgataaaataatattttttgtttcttgttaaaacaccatctaattcacaaatatccaaataaattaattctagaggctcactttctctagttacgtatttatgtggtgtttttgtgatcttagcctggctacaaagtcacattttttttaaaattattcaatgataatttagggattaaacctaaactactcatattttttattatgaatttgttaacgtgaaaaaaaaaatctatcatgccaagtattaaaagaacataacaagtaaacataaatattcactttattaacttcaatatttaatttaaacattccttcagtagcatatatttttcccacaaaatttccattcttaatcaaagtaaatccgcccctattgtgcgaaccccgccttgttgaagagatagcccgagaccagattctttctcatctctagagtatgcatgactttctgagaatcatggcttttccagaggtaaactttaatttcatatcaccagtaccaggaacaatagtagtgagagtcacctagcaatactttcttatcatcggtctcagccgtgtatgttttgaacatagcacgatcaaataaaacatggcgagaagtgtcattttctacccaccacccttctgatccaccaattaggttgatctctacattcatagctgtataaggcagctcttcagtcaagttagcctacgcagcataacaagacctgtgctgacacttgcatgccatatgacccggtttgttacaaagaaagcacaaaaatggtgccaattcattcttattagggggttgct

SEQ ID NO: 233505 - DNA, 501 bp, Cannabis indica
tgactaatttttggtggaaggatcttctacgacttcccatcaaggaattttggggatgatttgagagaggatggtgcgtagtaaggaggttgggggattggggttccactctcttcatgatttcaaattggttatgttgggtaaacaaacttggaggttcctgaccaagcctgatttggtgagtgtacaaagctcggtactttaaaaataagaactttctttctgaagaacttggtaataatctaagttatatttagagaaatcttgttgtggtaaaagatttgattcagaagggggcgcagaaggaaattggtaatggagaggagactcttttatttgatgctccgtggcttccgaatgggtcaattccgagtcaaggaaatttggatcctgattttggttaatgaaaaggttagtagtctttttgtggtgggtgagaaagcttgggatgttgatgctgtcaaagatttgtttgatcaggaagtggcggtcaatattctt

SEQ ID NO: 233506 - DNA, 1278 bp, Cannabis indica
agagagagagagagtagtttagttgatttgggaccaggtgggaaaatggtagtggcgaatgagagagtttggagacttagggtggcgtcgtgtcaacattttagtacggctcaagatgctatatatatagtagctgaaaactaaagaggagcgtactagggtcacacatatacttactcacatcgcttttctttttcttttaatttttctttttaatttatttcattgcaaaaaatatttttaatgagactgtattcttttcttcttttaaatttgttaaatgtatctgaattttgtactgtaataatattgtgtgtcttaatggtgtgtaataaataaatattttggaaagaaattcaatactactaccagttttgtttttttctttttctttttttaccttattactatgatgtagtcatttgctgaaattttgattattgagaggcgtacatatttatatagatatgaatttaaagtttccttaattggagaatttggtaatccataatcaaatggattgttatgtagttgttgacaatatattaatgaggtaaaccaacaaactttttggtaggaatatttaatcaatgagataacaaatataaaataataattgtattaaaatttttatgtaaaaggaaagaaagctaaaatggatgataacataaagtggttactgtaaaatctatacatttgaacattatcttcttccttttttgtaaaacctataaaagtaaaactaaaatcaaatcaaatcaattcaaatcaaatattaaagttttcaaaatattgtgcaatatataattagaagaactataatttgacgctgactttgtttcttgtataaatttttcattcataatcgtaaatataatttatactcttgtgtataatagtaataataaatgaaattaaccatttctatatgctaaatgatataattatagacccagctcatttttttttatttattttttaagttttttttttttttggtaaaacattattattttaagtttaaaacaccaaaattatgtagtttgtcttaatacataatagccatcattcttgtacctgttccatttttttaaaattatttatttttgtcatgagattatacttatttatgaaaaaagcacaaaaagaaaattctttttaaacttcaaccaaggtggctttctagttaaacaaaaacaaattattcaagcctatgatttttaagtggggttagcaagttagcttaacgtgacacaaagatatagagaaaaaaacact

SEQ ID NO: 233507 - DNA, 2701 bp, Cannabis indica
gttcataatgcatgccctttctacgtgagtttttactttttaacatcgtacatactctgcatgcatggttgtgttgtgcttctttcattgcttgtggctgacacgcgtccttgtcattctgtaaatgcttgtggttaacacacgtctttatgagctgtcataattttcttaagattaatgtttttccttataaatttatgattatctttttaaactctcttttgtcttatctgtcttggtttcgttacctattgagttgtagtgtgccttgttgatgttttccctattttaccttagtcttatctcgacatggtgttgttagtgtcgtccttggtcttatctgagtacggtgtcgttcttggtctatctcggcacggtaccatccttggtctatctcggcacgatgccatccttggtctatctcagcacggtactttctttagtctatctcggcacggtgtcgtccttggtctaggtctatcttatcatggtgtcgtccttggtttagtttttagtgctattagttccttgtatctcgactgaagctttgcatgtcttttgaggtatgaactttccttacaatcttatttcttttaccatttaatttcttatggatttttaggctgtcctttctcttctttcaagcttaaatcttattcgatctattagactttttatattagaccttgagggtttttatctgtatttatttattttatttttttgttttttctctcctaacacgcaccacgcagtttaacaaaaatacaaaccacagttacacattaaaatatttcaaactgtatctgttatgtagtatggtttggtgcaaatggtttgattaacaaccctaaatagaattacctacaaaagtagcataaaatatcaagatagcatatatcttgagtagttggcaaaaattatatttttggttggtcggagattatagagatatttaattttgtactaaaatgaatgtatacggattcttgaaaagaaaagaaacaaataataaataataataataataacaaatcaaaacaagatgtttgtgtttgaatgagaattgaacactcatgaatcatcatgacactgatggtagactcgtccacatattataatttcctctgatccccaaatatccataatttatctttaatttttgagaagtgggcagattcataggacctatatatataaaaagttggaatctgcgacacgacacagaacactaaaacgaaaagggtcagtagaccacctcttcgtcctcgtcttcatcattatcgccatttctctcacccaactccattcaacaaccctatatttccatttacacctcatccggatcttattcatttctcccacctaaatctttgctcctgattccgatcaccatgggttctctacctaactcattttaactctttttttttcagaaatgaaaaatccattattaccataaagtatcgatttctgattgttgttttgatttgtttcagcgagtcaaaacccgttcaacgccattttgaagggacttgagaagcccgatggtggtgaattcggcaaatactatagcttgccggctctcaacgatcccagaatcggtctgttctgttttttggccgttggattttggttttgtttgcttttagatgattattttttgttgagattgatgtgttgtgttgtgttgtagagaggctaccctactcaatcaggatccttctcgagtcggcaattcgtaactgcgatgagtttcaggttaagagtaaggatgttgaaaagatcattgactgggagaatactagtcccaaacaggttgagatcccattcaaacctgctagggtgcttcttcaggtaatctggctatttctagatttacggtcccatgttattgattctacattttcgcatttagtattttagtgattgtgattcaaattgtgttttcttaggattttactggggttcctgccgttgttgatcttgcttgtatgcgtgacgcaatgaataagctcggaggtgattctaacaagattaacccattggtgagttgattcgagactcggaagcttaacatatagttattacttaagttcggatagtgaaccttagttcttagaatctgtttttgtttctctctttcaatgcaggttcctgtagatcttgtcattgatcactcggttcaggttgacgtggcaagatcagagaatgcagtgcaggcaaatatggaacttgagttccggagaaaccaagagcgttttggcttccttaaatggggatcaaatgccttcgataacatgcttgttgttcctcctggatcagggattgttcaccaggtaattgcagattgtagaataaatctcacagtgcttttcacagagtatgtagcctttgctgtattgactaagggtttttctttttcttatttctaagtcctgtgcacaagcttgggttgaattaaagttctaaggcttattatttgcaggttaacctagagtacctcggtagagttgtgttcaacagaggtggcttgctttatcctgacagtgtcgttggtaacagattcacacacgacaatgattgatggattgggtgttgctggctggggagttggagggatagaagcagaagccacaatgcttggacaggtaaggactgttaactttaacaattgtgttacttgcatgtcattgatata

SEQ ID NO: 233508 - DNA, 1323 bp, Cannabis indica
accattaataactaatacccatggtcgtctcaaggtattgagaggcctaggatgaaaattgaataataaaactttttttatataaaaatttaaaataaatattgtttaaattttgacacaatatcaattttaattcttttatctcatataataaataatttttctcaccatatgtaagctaattcaaaggaatatttaattataataacatctctattgaagtgtttaatatctttaagtacttttgtaaaaatcgaaaaaaaaatacaatgtcaaaaaattagtcaatttttttttttttaatttatgttaatagttgtataaatttaagtagacacataataattgataaatatactttttatttaaattataatattgtcattatttttgttataattttgtcattaactttttaatttataatattcttgttaatattagtttttttttttgaaatatttgatttatttattagagtaattttaaaaaaaattgtactaaattgtataaaaaatgaaccctaattatctctataaatttaaactaatcactaattatatacataattatttattaaaatataatgtatttatatgtaaaactttgaattttgaaaaaaaaaaacaaaaatgactgaggaggatcaaacctttcacccataattaatatataccttctaactaaccacttgtgctacaaaatttttatgcaatatattaagctaaaatttatatattatattttatttatatataatatataaattttaatttttaggggcctctaaaattatagagcctcgtgcttaggctctaactgtccattctgtggacggcgcccgtgcacacattaaaaaggtgttctataaaaatattggtgtgtaaatatatatatataagagtgctaattacagtctcctatcacaattttttagtccacttccgcgtccgaaatcacatgctgaaatattttttttcataacggtattcgttatagttacagtatcatacctgtaaaattttgaaaaattccgaatagtttatagtaccgaaaacagagtttctaatattccagtttaccacgagcattcaaaaaacttcaaacgtatttcggcactgtaaactattcaaattttttcaaaaatttatagggatgatgttgcaagcataacaaataccgctgtgaaaaaaatagaaaaaatattctaacatatgttttcgaacataaagattaactaaaaaattgtaataagaagtcaacaataacactcctcagtgtatatatatatactagtaaaaagttacgtgcgaggcacgtata

SEQ ID NO: 233509 - DNA, 804 bp, Cannabis indica
ttaaccaagtttctttctcttcacaacatctttaaccattactttaatggagttctccttgcaaaatgaaaaacccatcaatcttttctgtatgagatgtatagtaaattatacatacatatatataattctatcattcatcgtagtatcctcaaagggtgaatgatctctttgtaaacagttcgaatggaccactccatttttaagaacaatggtataataacatgttagtttgtactttgtacagatgacaaaaattagtattacaacacttcgatttatcaggctctcattgcacctcaacaatcacattcatttctccaccaccaagattttggatataaatgcttccactggggtatatatatcagtcacattccatatgaagcgccaagacatgaagaactccatataccaactccaaatttgcttgccctgcattccctgctgagaacatataaaccttcttattcacctcaatccagctttgcccaggaactttcttcaaaccctttgtcttcgctgagatcctcactttagcagattcctcccacttcccacttgcagcataaatatttgacagcagcatgtagctcccggtcgattccaagttgatctggtgaaaaatgtgctctgtagtttcctctgtgacacatgtgttcttgtacattctacacgagttcaaaagagcactccaaacgcaagcatttggtttcattggcatgtttttaatgatgttgtttgcttcttgaagtagcccagcacgaccaagaagatccaccatgcaagaatagtgctccatct

SEQ ID NO: 233510 - DNA, 1107 bp, Cannabis indica
atctaaatttgtgcataacattccagttctagaataaacacttaaagagaactagcattcgatccattaggaagtcaggattccataattgtgaatcatgttcctagccatccatgttattatcttcccaaaataaaagttgtaagaattatcttctctgagaaattttaatgagtgaatcaaagaaactaataacatgaacagaagttcatgattactcaagatttaggtcaatctaccataggtcatcgtttaaatatgaattaggtctttatagtaaatggcatgttagaatttatattatatacaacactttcattttgatgtcatactaaatccgtaatccaaactgagattacttgcctcgaagaacaggcatttgtgaactgttttagcaaccattgattaaagattccatctttaatatgttactaactattttattcatgactaagtgatcttagttctctgtgcaactacaagtcacggtctcatatatgaataaagacttttctgatatttatatttaaattattcaataataaatattaataatttaatattcatgcatatatcaaaatatttaactttttattaataatcaaaaatgtctttacagactttttagagtacaaatcctaacattaacaagaccacatctaacaagaaactttcctaaataagatcttcaatcaatcgaagaattttttgattctgtagctacaaaatcatgaattgtatgtgcaacttttcttttatagaaaagaacatcttattttgattttcttcacacatatctgattaaaccaattaggaaactaatataagatcagaatacaataagaaacacgactggacaaataaagaaaatgaaggaattgttataaaataatataaaataatataaagtagatgagaagaaagaagaaaaagatgaagagagaaatataaagtgaatgagaatttctgagttatttattccaatggggtgaacccctatttatacaaatacaagagtgagatattaagaaactaagaaaaagggaaactaagaaaaagaggactgttgattacaattaatggtaataaataaaagatttggacatc

SEQ ID NO: 233511 - DNA, 1036 bp, Cannabis indica
caagtaagataatcataaaaattagccttacataacataaagatagccttaatagattcaaactaaacaagaagtaccacagtgatcaagaaactcattgtttatgagctctaaaccatctatgtcacacacacttgtttgcaaaaaagtacataatcatatgcttttctccgagaaaaagtgtgtcgacgatgttaggatgacataagtaagggctccccaactaaaggggtagcaatataattgaaattaaagcggcctcaagctcagttaggcaccttttaggcgtcgaaatctacttcgtcctaaacctcaaccgcttacttaatgtgatgtagtaacctatactaggagtaacttttatgcgagcattttaatagaattgcaaggctcactgccaaactacggtttgtgaagccaacgactagagtttcaaggctggcttaccccctcctagtttcggcgatgcccatttcccaagtacctaatgaagtctaatacttgagagataaaacctatatgtaaaggggaaaaaaaccctttaacatgagattcagtttacttactggcatgtgtaattgtctctgtacaatatatttttacgactgagattactcttaatccttcttcgcttaactacttgcagtaaatgtggaacctgaaagcagagtaaaaccacatttagattaagtaaaatcctaatatggaaaaaggtttgttctttcttttgtaaggttgcaatagcagaacaataagcaataaacaacttcattcacataccctcaagacagctggtatgtagaaagatccacttggggagtttacggtctgatcataatattctagtacatcagcctggaatagcagtaagtttttaacttattcaagagcaatttctttatgtaaatgaacaaaaactaatgatgtttgagaagttggacataactagacaccaatatttaagtaatacatatctgagtataagaaattctacaatgatagataagatagcctcaaatccataattatcacactt

SEQ ID NO: 233512 - DNA, 2655 bp, Cannabis indica
attttccgtttacaatcaatactagcagagatttggacaaaaagtccattccgagtataatatcaaactcagccaatggtaactccacaagatcagcgctcaattctctatcttcaattctaagtaacactgatctaacctattttcttgagataatcaattccccattaggcaatagggttccaaatcccatctcaaaaacatcactaggcctaccaagttgattaagaactctagatgatacataagatcgtgtagcacccaaatcaaataaaatagtaaagacaaaaccattaataagtagctgacctgtgaccactgaagggttggcagcagcatcagcctgagtaatagctaatacacgtgtaggtgcaggttttgcttcaagctttggttcctctttcttcaattggggacagtctttcttgaggtgccccactgatccacactgaaagcaagctctccggttgcaagtcccgggatgatgtttcttacagcgcgggcactaatgataggagtaagtctggcgtccccctttattctggtttcctcgaaaccttttaccttgccctgaagtcccgaagatgggaaagttctcttcttttgctcgggagagtacgtggtcccactagcacctataatctctcgagtttcttgtaagaacttgactgccccttccctcaatgagccttgtcaaccatttcagcataggttgtagtgtcatttgtagtgataaccaaatcgtgcttaatcttggcattcaaccctgccaagtaattctcctttttactgaaatccgttggtacaatcccataggcaaatttagccaaacgatcaaacttggttgtatattcagtcactgacatattctaaccttgtaccaattccacaaattccttccgctttgcactacggaccgcctcattgtagtattttgcattaaacaaatcctggaattcctcccaggtcattctagcaacatccttggtaagggataccatctcccaacacaccaaggcatcctcctggaattgaaatgtggcacattccactctatcatttctgaccactcccatgaaattcaatattctttcgataacagtcagccactgttcagcctttagtacataaggacctcccagaaacactggaggtgcttgcttcttgaacctctcatataaaggcttcatacggttaccagcaacgtgctgctcagctggcatcgcaggagctgcaggaaatgcagcaggcggttgcgggggaagttcaacaggagcgtcctattgcctgagtctctgaatctcatcttcttgctgtgctagcctggcttgcatctcagcaaacctttgctcccagtcaaccgaggcctgaggtggttcctcctgaccacctcttggaacacgaccgcggcctctaccgcgtccacgggggttttggggatttctaccaccccgaccacctttgatctcaaccatttcaccctgccttctgacgtttcactgggcgtccattattaggacttagcctgcgaacccacaaggcatgcaggtcaaacagtggtcaaaatattttcaagaccgcatttagggtttttttttaaaaaaaaaatcatcaatttactcatatatgcaatatatcttaaaacaatttgtagaaaataaagcttacggaaccgtgagttgagctcgacactggccttcattgtagatatcttgacggtcttgagtgaacaacctagtggctctgataccaaattgtaacgcccatatttgaaactaactaaattctaagttaattttataatataatcactttataaacatatgggtcgggatcccgaatttcaaaatacagttaaaagtattattatcttattttttactaatacaaagtgtactagtatatttttttgcaaacaacaggcaactaaattatatttcaaaatgcactaaagtaccaactctgtactcgtattggtagagccattatagtactccgaaaagttagtaagtgttgtaccacatgcacgacgtaccccttggtactcgtgttggtaacactgtaactattttaaaacctacactatactaacacccttaaatcacataaacatttagtgttagtagtgtaaatagttaaaacgggcatatattcatatatatatatatattattatgctagcttacctcgctccgtgctcaagtgtgcaggtcagcctgagtggaaacgcagctcgacgctttacagggccctaaaccataacattcaaaacttaatgagagacacgctaaaacacttattggggatctaaaattgaaactaaggataaccctatcgataaataggatgctaacaccctaaattatgcaagaacgagaaaaactaaggttcgggaaaaagccccaaccggcagaccggttcccaaccggaggcccggttcctgtgtaccaaccgttcgaccgttctaatggtcccttagaaccggtcggcgagttctatgctaggaaccaaaaacacgaccccttgacctcaaatccaacccactttgtgaaactctctagtatacctgtacatactcaaataaacccaaaccaaccaaaagaactcaacaaacatctcataaaacaaaatcaccattaaagctcaaagttgaag

SEQ ID NO: 233513 - DNA, 876 bp, Cannabis indica
gttgcaaccatgtactctgcttctgtggaggacggctacaaattttttgtaaactggctttccaactaacacagcctccaaatacaataaacacaaaaccagatagagatcttctggtgtccaaattcccaacatagtctaaatcaacgaaaccaataacattatcatcataattgctatttttttcaaatactaggccagtcatgagtgaacctttgatgtatctaaggatccatttcaatccctttcagtgttcttcacaaggatcactgatgaatctgctgacaacactcatgatgtgtgcctgatcaggtctgatacacaccatgacatacatacatgagggtgccaactctatttgcatagggtatactttccatgagcttcctctcagcatctgtctttggtgactgattctaagacagtttgaaatgctaagcaaggggagtggtaaaaggtttggcatctttcatgccaagtttgtcaagtaccttcttgaggtaattttcttatgataggttgatagtgtgaggtatgtttctctttatgcctaagattttattggctggccccaagtctttcattttaaattcaacactcagttgagacttgagattgtcaatttggttcttttctttcccaattattaggatgtcatcaatatacaatagtcgatagataccattttgaatgtagacacatgtactataattgttcttggtgaaaccaattttcatcataaaatcgtcaaatttaaggttccattgtctaggtaacctattttaatccataaagtgatttgtttagtaaggcatacctaaacccggttttttcatcttacatagtccttcatgcatctccatgtagattttctcc

SEQ ID NO: 233514 - DNA, 944 bp, Cannabis indica
atatgtaatatatattatattaatatgtatgtgactgaaaattaatatttattttgtttattcaatcataccacaccacaatagaaaaaaattaggaaaaaaaattatatttatttatatattttatattatataaatgattgaggttgaatcctcttttctttcacagtgaatagtttgaatgataccatttaatgtatttggtatcttgatttaaaaattgtttttttaaaattattttttatcttttctaaatttatatgattaaaatgatttgcataatcataattcttttaattgtgcagaaatttattcattaagttacaatattttttatttattaagtcatataatttttttaaatgttacaggtaatgactactaaaagaaaatacaaatctggagctctaaagaggaaagagaaatcaaagaaggaaattttgctcaaaaaacaggttggttccctcaacaagtattttggtaacaataaagtagagacatctattactaatgcaattgaggatgaacttgattgtgaaaataatgtgaatgaagttaaagatcaagtggtaaatgacaaagaagaagaaagtcaaaatgttaatgagaatgagaatgtgaatgagaaatgttttgatgataagaatagttttcctcttgacatagatgatccgagaaattggaataaaattgatcataatatgattgattttttagttgaaagaggtccaaaaagagtcaatgatgtcacatatattaaggatgcttttggtagaatttttcttcaacacattacactagagatttgccaaatagggagaaacaagatagaaagtggttagtatattcagtttctcaaaacaaagtattttgtttttgttgtaagttgttttcaacaaaacatcatgtgtgtcattttgttgatgaaggtataaatgattggc

SEQ ID NO: 233515 - DNA, 566 bp, Cannabis indica
tttttttattgtgtattggaatgatctttttttctattttaaaatagaattgacatttcactagaatagtagaaaggtcatctcattggaatgtcattctaatattttaatatgcaaccaaacaaaataatagaatgaatatcgttttctttccgtttcattttatttcattatctcaaaccaaacgtcaacttaggccaactccaatagaatactaaaatatcaaatttgttaagatttcacactaaattcattccaaccacactgtggatctgaaaaatctcatagttattcaaagttatcatataatatctactttgaatgagatcaacggtaatcgagatctttagattctttttagtgcaaaactttttatctacttattatgcataattttctttgacaaagagccataactttttatttgaatattatttattaatgcatgtattattttattgttcactattataattacaaccttaaaatttttatactatattccacatattattggtttaaaacaaaaattttaaattattaaattaatttaaaagttaaattaa

SEQ ID NO: 233516 - DNA, 1238 bp, Cannabis indica
gactgttaaaatgggctacaaaacatagccaatttgatatctaatatcagccatgggtgtcaatcaagggttaggccctagctgactcatagtagagtgttctggaatgaatgacctaccagacaaaccagtcctaaaactaccagcctggaaggtctaccttgatggagtattgaatgaaaaaagagccaaagcaggaattatattaatttatccgcaaagacatcagccatagaacaccctctactttgaatttacggcctccaacaatgaagcaaaacacaaagctttgattgttggcctgcaattagctaacaaagtaggagcctaaagtatctaagtgtataactattcccagctattggtgaaccacaattttggggaatatcaagccaagggtgagaagatggcttcctgggtatcacggtccagggaaatgttgcacagatttaaaagctacaatatccaccatgtcccgagggaccaaaactcatttgtaaacatgtcggctaaactcgcaatagacttggagatcatgcaatacagagtagtgcctgtggaccgtctagaggctccgagtattgaagcactaggggtaaatatcgtcattgatcactcaagttcctggatatgcccaatctattagtttttaagtttaggggaccttcttactgacaaggctgctgctaggaaaattaagtatcaagctccccaatatgtgattctagatgggaaactttactgcaaggggttgtttgtttcgtatctaaggtgcgtagctgggactgaaataagcacagtgatccatgaggttcatgaaggtttttatggagatcatgcctttagaccaagcctatcaaaaaagattcttcgtcaagggttatttttggttgatgatgaagaaggattgtgttgagtacgtccacaagtgtgaatagtgtcagagatatgcgagggttcgacgtgcaccaccaactgagatcactctcatgcatagccctagccttttacagtatgaggaataaacctagtgggatcgctactcactagaaaaggaggagtaaaatatgcaatagttgttataaactacttcaccaaatgggtagaagtcgtacccatgaacacggtcaccctaaaaaaggccctgggctttgtcatcaagaatattgtgtgcttttttgggcttccacaaaatattgtgtcttataatgtttgtgtttgaaacactaggattatct

SEQ ID NO: 233517 - DNA, 1268 bp, Cannabis indica
tacggttataatttctaaacggtcggttacggttttcgtaaaataaaaactgtaaccgaccggtcggttataaaattgtaaaaactgaccataaccgaccgattttcacccttacttacatgcagaggaagaagagaggcaccaccgccaactccaaaactaagtcactttctttcttctctcccaagacacctggctccgacgtctcccaagcccttgcctctcttcaccttcaaggtactattttattattatcatgaatctcataagccccttcttagaattcttattagggttagagtttggtactggttgatttgatttaatttgatctgttattttttatttttttaaataaatagaggattatggactatcaacgaatctattttctctctgctaggtttacgactctcagcgaactgttgtggccatggcaggtcgtggccggtcgagaaaaatggagatacatggttttcgacaaggttttggtaagaagaagaagaagaagaaaaaagaggtctgacttcatccgatcaaccgaagaagacttggcagatggatgagttgtttggtatcgaacccatagatttctctaatgttggaacggacattgacggagtggtggatgggattgatgattctattgaaacggagcttaagggggcgattctttctctgagatcgtctctaaagatgattcgaaaacaggaggaggtccgacaatatttctcccactttcttaaggcttctcaacagtgccaattggaggttagagaaggttaatcacctatccccctattttgcagtctgaatctgtgattaagagtctagatgctaaattttctaagtgttttaaacaaaacgtgcaataattgtactatatgtattaattactattttctttacattaaaatgttgtttatatatatataattttttaattttttataaatatgtgtatattagattgaatcagttacttttacatgtcaatcaacgtccaattcgcacaactacagattttgaatttttcaatccaatctaatccgtacaagtgcaaatatctttgcggattggattagattggatcgtgcgaattagattcggctattttatgaacactcctacaaaataaccatcgttcaaaaatatcataattattttagaaatgctttttatttctttatatttttatgtatttgatttttttaaaagtgaaaataatattgtttttagggaaatttgcggcataaataccatatgtt

SEQ ID NO: 233518 - DNA, 1491 bp, Cannabis indica
tagtgataataagtttattttttaaaagcacacactcgtggcgtccctgaggtttaggacgttacagatgacctcctggaaagttttcccaagaagcgtgcgaatgaggacaaagcacgctgaaaatactcgtgttggtctgtagggtctgttgtcaatccaggaagcagctagagtggcgtactcgtgtatacgagccattatttcgtaggtgtaataaggacctaatggaggcttgaagcagggacttttacaggtttgtttctcactctccattctaaccaattcttgatcactaataataggcatatagagcttaattcacactaaaaaaaataagtgtgttgctgtctcaacatgtcctccatagaaaaaatagattgtatcttgacaaaaattaatgaaaagagaacaacctgtctttggtctgtaatccattttgaatttctagccatatatgtcgataaaactgtgtttaagaacattgtagtgattccatacctctcgatgccaagtcaccttctcttgctcctcataaagcatgtctctgatttttgtgctttagtatagtgtatcagcactagcaaactgtccagcagaattgttcaaagaagtatcagcatcgttggaattagcagatccaacaggtccagatgtcaagcttctttgtctttcttcttgaataactgcagcataagctttgttcacagtaggaagaggatctctcatcaatatctgtgaccttacattgatgaaagaatcattcaaaccaaccaaaaattcaagaagtctatcctcctcttgctgttcgagtatagctttcatagcaccacaattacaaacaggttgtggtctaagctcacgaatctgatcccataaagatttcaatctggtaaagtagctagtcacactgctcgaaccctgcacaagattctgcatagtcttcttcgcatcaaaaattcttggagcattcctttcattgaacctctcatgtaactcagaccaaatatcagctgcattatcaagatacatgatactatcagcaatttctccagaaattgcatgaagtatccaagagatcacagtactgttacatctacaccaagcatcaaaatcttcatgttcttcatctggttgtggaatcttgccattaacaaacttcatcttgtttctagcaacaagagcaatcatcatagatcttctccaggtactataattttcactgcctgttaagatcttcggtaccagaacagcagctggattgtcagcattcgatagaaagaaaggattggatagatcgtttccagtgctggatctcgaattttcaccaagaacagagtacctgttcgaatcgttggatacattgccagtgtcacgattattacgagtctgagctccaccaccacgtgccattgaagaatcaaagaattgatgaaacagaagcaagagaagaatgaagttgaaggccaaccaacaatggtggctctgata

SEQ ID NO: 233519 - DNA, 1089 bp, Cannabis indica
gaattaattttttttaaaaaaaaacaattcggtttgggcggtttaatccaactaaaccgagattcaaaacgatcgttttaatataggttctggattggtcggtcggttttcgaattgcaccaattcaaaccgaaaaccgaattttggatttttatgtagaaaaaaaatcgaccaaaccgaccgatactcacccctagaactcacacactatttaaaagagtctttttgtaatcattctagttgtacgcctcgagaacatgttcctccacaattccccactaataattaataaacaaacatcaactaatttaagtacccttaacaacttttataagccatctggatcaactggttcacacttcatattaacaaccataaacaaagaaaaatttagaagaaatttaattaaaggtaaactaaaaagtaccaagaaacaaaaaattaatatctaaactaaataagtatgtgtatacacaaagtaaccacagtataacaaagttctatttcaaatgtcataataatagatgaaaccatttttttacccaaagaataaaactaagcacacccaaaaggcaaactctgttacagtaaaaaaaaatgcatacattccttattgattaacaaaatagtttggcctgacaggacaggacactcggcaccaaactgagtcgaacaaggtatacatgaattatcaataaatgtatttactttgtacaaagcttctggctttttaccctatatgtctcacatatggatttttcactttatataaagcttatgattttttcactatatatgaaaagtaatgaaacaaagaaaatcaactactactggaaaccaacctagtatatttttaaaaagataatagttgaagagttttagaggtcatacagagataaatttcttgtaaatctgagcagggtacattaactatatggatattagaaggtaaaaatttccaagatacacatcttcattgtattcatcttcatacacttctggggccagtgatcctgagaaaataaaaaagagaacaaacacaagtgaacaaaatcaatctcatagtgctaaaactctaacaaatcaaga

SEQ ID NO: 233520 - DNA, 931 bp, Cannabis indica
tttttctggggttattttgggggacttttagcaataggagaagaagatgatcgggcaacaaccattgttaatgagaaaatggggaagtagggctaggaggattatctttcaaactcttcttacccattgatgatcgtgttttgtttggctggggctgttttgggggatttttagcaacaggagaagaagatgatcgtgcaacaaccattgttaatgaggaaaaacaatatttatagaagaataccaacaagaaaagaggaaaattagaggaaaatttaagatgtaaaacagaaaaactgcacaaattaaaaaaaaaaaacaaccactacacaataatcgcctgtaaataaataaaaaaacaggaggaaaaatatgaacggtacaaaatgggggaagtgtgaattatgtaataatttttaaatatgaaaaaataataaataataataaaaaatacatttaataaaataaataaaccgtcaaaaaaagtgacatcccacgtcaaatcagctcttttatataaaagagatttttaagtttgatatcttaaaccgacaaaagttatgtacagaaaaggcagtgaactgccgtatcaaacacataaaaatacacattaaaaaagtaaaaaatatcacttcacagcatttttgtaatgaagggaaaaaaaatcaatatattgtgtaattttccctttattttcacaataacgaaaactcctcaacaataaatctcagatattttccttgcaaacaaacctaaaattctaactcatttggctgttgaacctccctcaacagcaaaccatgaatgagttggaaatggatactatagtctaggatacgtaaaaaatgaccaaacacagtttttgaaaacatatttaattgggtttcggtaaatttttttaatatcttcaataacagagtaataactagag

SEQ ID NO: 233521 - DNA, 1419 bp, Cannabis indica
taagctaaacggtctttacatctcttttgtgcattgctactttctccagcgaggtgtggccttcccgagataactaaaatgtcatctccctcaattggaggaggttgttatctttggttgcccatgttattgggtagatttggctggtcttgtccattaccttatcgatttacatattgttgaaagtaaccacttgagataaggctctctatctcatccttcaactgacaacattcatccgttgtatgcccaaagttcttgtaaaatctacaaaattttgttgcatcccgtttgtgcctcgcatgtctcatgggctcaggcttgtgaaatgcaaccttgtgctcatatgcaagaaagatagtttcccgagttttattaagctcggtataaacggtgtaaattggcacgtacttatcatgcttctttgttttttcttatcttaggctgattccttagaatcatcctttctctttgtgctagagccccctggattgtcagccttcgtcgagacggtgcttgctgagacattactgggtttacttcctaagccagtctttatcaatttcatctcgttccttgcttccacttttcgtacgaacacttgagctctttcattgaactcactaatgtttttgacagggcgaccctgtaagtcatcccatagctcgcctccaactgtcaagagatcagtcgtaatccctacttgaagagcagtaagttgtatactgtcattcaagtttctaactctagcagcagctgtacttaatcgactcaagtatgccttgagtgacttgcctggctgctgctttatgttagtaagggaagaagattcaggccgcctatctcttgcttcttgaaattatttcttgaaatctttagacagctgttcccaaagaggtaattgaatgatgggtgtattgattgaaccaggtgctcactgccccaatcagtgaggtgggaaataaaatacaacgtaagttatttgtgacattgctggctcgcattattgtattaaagttattaaggtgagcgactggatctgtagtcccattgcatgacgagacgtgaggatttttaaatcattagggaaatttagcactcataataattggatggaaaggttcgagttcctcatcggagtcataatcaggcagtttcccatcttgatatttcttgatttttttttctaactcactaattcacaattggattagatcctcttgctttagattggaattgagttgtttgcgtaaatcgggcttcctccgattcaattgctcacgaagatctggccgtcttcgatcatagttgcttattgatcttgtgcctgagtaactctcagattggctactccttgtatgccttatactttctcgatcattactatgtcgaggtctatcccctcctcgcgtagattga

SEQ ID NO: 233522 - DNA, 732 bp, Cannabis indica
aatcgaccttcggcttaaactatttgggttagagtttcaatttaataatgactaagagcatctctaaataaatgattaattgcaaaatataacttattttattaaaaatttactctaatagtgcgctaaattatgatgtaaatatatcacataataaaaagtgatttaaatttagatcacaatataacatgatgtaaaatttacatcacaataaatgcaatacttaacattgtatcatttttaatattttattattaaatttaaattaacatgttcttttatattaattaaatgacttgtattattattaatttttttatttaccattctattattattttatatattttttaaataaattattaagtaaacattaaataacattgaattttgtattaaaatttacctaatagtataataataaaagttgatgtaaaattatcacaatttttttttatatcaaatataactcaatttttaattttctcattgaaaatgatctaatgagcagaaattcaccatcagccccaaatctcccttttcatataaaataaaataaaaatagaagggtaatttttaatagactaattagtaattttttcccctgaattttgacatataccaaatcatgccccctaaatttttttggccgttaaaaattcccttaaactattgagattgttaaatttaaggacttttgtctaatttcattcaatcttactgtttcaggta

SEQ ID NO: 233523 - DNA, 1153 bp, Cannabis indica
gaccagggtccaaaggttttctttcttcttctttgagaaattatcaatttggcaatgtattgtaacttgtaaccactaaattaataagggaaatactttgaaaaatacttaaattttatattcggataattggataaatatatattaaaaaaattgctgtaaaatattaaaatgttacctttttttctatattcggtagatgccaacggttaagttttatattagatcagaaaatttgcctctaaaatgtctaaattttgtgtttggttgccagtacacaattaaataaatttaaaattgcatttcaaaaaaaaagtaaattttaaaaacaactaaaatataaatactaattaaataaattttaattgatttaaagattaaaaaaataggagaattacttcatcaactaattttttaactttttttttttttttttcttcaaattgctatacagattttggttgcgatttaagttttttaagttagttgctataggagtttatgtgtgaaattccgtaaaaatacaaaaaaaaaaatattttaattatttgaagtgtaaaaaaaaaatccaaaaacataacttatcctaaagaaaaaaaaaaatagaagaagaaagaagggatgtgagctacaagaaaaaaaaataaataaaagaatttgaagaaaaataattagttttatcgtttaatttctattttagttttattaagttaattttaagattccttacagaaaaaaaattaaaattattataaaattcaagaaataacagtaataaattaataataataatttttaacatttcgttagtttactatcaaaataaatggtatttaactatatataaacacaaaatttaaatatttcagtcccaaattttcttattgagtgtaagattggtacctacgtacacaatttcttttaaagatgtaccaacataacataatgaaagaaaaattaacagcttagtgccatttttatttttaatatttatacgtaagtaaacaacaaaatttagatattttaacggcaattttatttatttttttttaaaggtagaactgaaatttttctatataataatcaagcaagcttcttctaacaaaaaaaaaaaaaaaaaaaaaaaaaaaacaaaaaaaaaaaaaaaaaacaa

SEQ ID NO: 233524 - DNA, 1744 bp, Cannabis indica
ctcctaaggattaaatagtactcctagtatggaacctaataataattctcgtcctatgaaccaaaaagagttgaccattttctcaaatccttccaccatgattgaagcggagacagatgagtattcaaaggcggtttttggaagatcaatctctaagaggtctattaataaaggtgggctgatgaatatgtttaatcaactttggcaaaataaagcatgtgagaaagttgaagattatacggatggtatatttatccttaccttagagtcaagggttattaagaatagagtcttgagggggcaaccatggaatttttcaggtaattatctaatctttatagatcctactggtttggaacatatatcggaagagaattttcaaggtatttctttttggattcatgtttatggtattccttttcgtaaggttaattttgaaatgggaaaagaaattgctaatattatgggtaggtttttagagtatgattcttctaccaaacgtccttttatgagattcagggtagagttagatgtcactaaaccactgataaaaaggttgcaggtagacttgagtagccttaaagattcaatttggatctctttcaaatatgagcgcttaaataagttttgttttttctgtggatgtttggatcatatacagaaaaattgtgtgagctttttagaagagctacaaaaagggtttaacccaaaccttgaatatgatgattcacttaaagctgctcctttgcctataccgcacctcccctttaataataatctaactgatgtggaggttgccaaacataataataaagcttttacacatattggttttgataaggtgcgttcagggtctgaagtttccaacacggataatcaaaataagagaataaaattagtagaaatagataaggtgccatcttcccggtatgttgagaatatgcaggactgttcaaaaaatatccaacagaagaagttagatggaggagacagtaaaaaggcagctaataaaggagtgaaggagtaaaatggaaaggaagttttatttttcatctacaagggagttgttcacaataatggtggggctatcagaatgttatggaagtttggatgtattcagttttaaatttgtgatgttgcttgtttttggttttaattaatattctagtttggtcagtaatttaatttgtctaaaggtggatgtaagcaatgacattttgaggaagaattattttttcaataaattatgtttgtgcttaatttaatcactgttatgaatactttaactattatgattattttttcatgagatacatctacaaaagttcttacagtacattttcttccaataatattatttaagtttatcaacaataaaatattaacaaaaaactgaatatcattaaaactgaatatggttgataataaaggaacgttacattattattataagtttagtaatattaacaagaaatggtcttcaatagctgtcattgttgtagaagtaatatttgaaaaaactgataatattgtaaagtatgagttatattggtatcatggtaattaaattaaaatggggaataagttcactatactataatgggtggaccttcatgaaaaatattaacatacaagatatctattttaagttaaaattttgatcgttactatttcttaatttcgtatatttagtgttgaattaaagaatttaaatttaagttttaaaaatctttatgagattatt

SEQ ID NO: 233525 - DNA, 1432 bp, Cannabis indica
ctaacatttcgaggatctgcagcaaaatctttatgtttgagatcaaaagtcatccatgctggagaatctctagggtgtctcatacaatcgtcatttctatgatcttttttatgatgccaagtcataaaatcagatgtttttgatgacataaataatcgttgtaatcttggtattaaaggaaaatggcgcaacactttagcttcactcctatttagataaataaaatggtgttattctaatctacatgtgaattaaaagaatattatatatataaatatagtatatattgaatggcgtaccttggtgtagagcaaacttcacattctgtgtcatttgcatgtccctttctatacaacatgcaatcattacgacatgcatcaattttttcataatcaagtcctagctcgttgattatcttttttgtctcataaaaagaattgggtaatgtttcaccttttggtaatgctcttttaaataactcaagtacattttcaaatgatttgtcactccatccacttatgcacttaatatgaaataattgaataacaaatgagagctttgtaaaactcgtacaacctgggtaaagttctgtctctccatctttaatcaaattgtaaaattcttttgcttttgtatttggctcatcactttgactatgaaaatcttcaccaatattatgtgtaaatgcatcatgtataactccatcaatatcaatgttataatttgactcatgagtatccataggagtactctcagtattttgtgtagcatgcaaagaagtttctccatgtaatacccatttagtataaccctccacaaatccattacatatgagatgttcataagcaattgcacgattgacaggtgaaattaggccacactttacacaaggacatacaattttgttttcgtgacttgcatttttaaatgcaaaatcaagaaaaaaattaactccttcttgatatgaatcacttaatctagaatgatacatccaactcttatccataactgtttaaaaaaatatatcaaattaatacattagaagaaaatattatttttattaaacacttatcaaaaaaaattgttatgcagaaataatgtgactcaactatgaacaaactaattgatataaatcctactctatacacaaattaatatatattaaatttggactaaattgatcaattaatcaagtaaaatacattctttattaagaaaaaagcaaagtacatattttaaaaaaagtttagaacaaattatatatcatgattaatttataaagtaccaaaatataaaagcaaattaaaaaatagtggcttaagtatacaccgaaagttgcattgaagtagtgtgttgcacgcgtgatattttattttatacgtacgcatgtaaaataagactgtttgaacattgctttctatattgtaaatta

SEQ ID NO: 233526 - DNA, 965 bp, Cannabis indica
tcacctgacaagcctcttatttcggacataatagctttcccttttccgagcacaggagaaggcggtcgagcaggcgagatggactccctaatgtgaattgcatgctcaataggcctgggcggggccggaagtttcttcctcctcttgagcggagtcacctgctcttcctcagcctcatcttcaggattcaagggctcctgagcatactacttggcccttgcacctcccttcaacttagccttgcgcttcaattgaatcagctcattgtccagatgagctcattcggcccgtctagcatcagatttcctcttcctccccttcacttgtttgggaatgaagtcctttggatagagcacgtacttcacaaagttatcctcggaggtcaactacataatattctgatcttcccccagcagtcgatcaagcctttgagctctatctcggagagtaagagtaaggggagggcggtgatatgttggaatctactagaaccgggtacgagtgatgcctgcgccatccaccatgaagtacttatcaacaaaacgcccaattttgccaatggccaaataattggtgcccgtcaaccacttgaagtccggttgagagaaataaaagtaccccgacctgccttgcttaggagaggacttcaaatcaaagaaccagcagacttcatgaggagaaggcataccccacttctgggaggcatagaggacgaagagggcaaacagaaacttaatgcccttaggagtgaactgggtcgggcaaaggccgaagaagtccgccacattcttgaagtattgatgcaaaggcatcaatgccccttgctgggcatgggcaccagaccaagcgcacatcccctttttagggtttatggcacggttattgtggtcgggaatgtagcagtccaattcgcccaggtatccaccctggtcgagagtgtgcaggcgcacctcagtaaccctgga

SEQ ID NO: 233527 - DNA, 699 bp, Cannabis indica
atcgttttagaagttcaatattaggttgttaaatcaacatacttgtaagtagatctaagatcctggataaatataataccaacaacataatgttcttccaagacccgaaagcctccctagcctttcgggacatggaaggaatgaaaacctcctaacaaagataagggcacacctagaggcaggccacacgagatactcctgaacgcctaccacaagatgatgctcggaagcctaccacaggtcaagaatcagaattctaccacggggtgaataacggatgtctacctagagacaagaggcaaatgtctcccctaaaataacgtgtccacctctttgacacaagactagatattgtcccctatgtcaaaacatgatagtgcgggcaccactacaacatttgcatacaccacttttgtctgacggctcccttgacacctttgtctgcctagcatgacccccgtgtaacacgtgtcctgcaacaaacgatcccccttttagtacggaaccgtcgccccatgagctagacattcttagcgggtctcatagtaatgtatttgtgtattttatcccattatggggcttgcttttacaataaaatccaaatgggtcataggtatgcccaaacccgaactctagcctatataaaccccactatcccttcatggaagggggacgcaattttagccgaagctctactag

SEQ ID NO: 233528 - DNA, 1799 bp, Cannabis indica
tgatcacaacaaaatatttaccggaaccttctcgagaattatcaacatgacaaaagttgtaagctagatgcatataacattaataacgatcatctcacatataacaagatagaaagtattattgacaaaaagaggaagaccaaacttattgcgagactaagtgtctttcactcaacttgcacaagagatacaatatgaaaaatttacttataaggagaagaattactcatacatattaaccacaaatgacaacgatcaccaagaagaatctatctttcaaattccagtgatccgggagtgccaaaaaatagctcagagtgccaaggtcttggagagagaattgagtatgaggggaagtgataagttgagaaacaacacaggatcactatcagtgaccaaaatgccatcaacataaaccaatattagacgagtagatgtaaaaatatgatgtacaaaaagagagtgatctgacttagtagagacagacccaagagtctggagactaaattttaacttgtcaaaccaatctgtaagagcttgctttaaggccatagagagccttatgcaacctaaaactaagtgacttgatttgggaacctctaaaccaaaaggttgcagcatataaactttttcttcaagatcaccgtttgaaaatgtattattgacatcaagctgtctaatgcacaatccctgagataatgcaagagtgagaagaactcttatcgtgacaagttttaccaatggactaaaagtctcagtaaaatcaaaactcggttgttgatgaaactctttagtcacaaatctacctttatatttgttgactataccatcaggattctcttttatattgtacacccacttgcaaaccaaatgcatgttgtcctacctggtggaagaagaacaagggtccatgagtgatttcttgccaaagctaacacttcatctgacatggcaccaatcaattgaggatgtagtaaggcttctttaactgttgcaaggaccagggggaagtctgctataattggcaaggaagtgtcaggagacatctggtcagtgagaataggtactccagatggagaagctggtgtacgagatttagggacttgacatacatcagaaacaacaacaggatgagatggatcaacatcattagttgacaaacatcattgatattggtggtggaaacttgtgaggtgcctacattattagtaagaacataactaccataattgataggagcatcagtgtcaaaaaattagctatcacaacatgttgatctatataatgaataggtgatgtatgtgaggaggatagaggatctgaagcttatgttagaggagtagatgatgtacttaaggaacatcaaagattggttttcttggggtagggaaaaatgtgttcgtcaaacacaacatctctatagatgtacattctacctagaatcaaggcactaattataccctttatggttcaaactttaccctataatcgtgcaaggtgaagacttgaacagaagtttatgcttgttgtatgctctaatattggggtaacaagtgcatccaaaagctctaagtgttgagtaatcttgagatgtaccaaaaatcacttctatgagtgaattgttgtgtataacatgtgagataagtttgttataaaggtacacagtgattctaaaagtctcattgaagcttgggcaagaagggtgatgccaagttcaataataagcatgtgttttctctcaattaatctatttttttgatgagttatatgacatggatttctatgaataactctaattt

SEQ ID NO: 233529 - DNA, 2903 bp, Cannabis indica
atatttaaaaacaaaaatattataaaacaccatctaattaaataataattataaaaaatgttggctattagtagtgtttggcattacaagtgcctagtaataattaatgctaaaaaaaatctccaattttcttatgcctatttgtaaagatatttattactaatttccaggcacaacaaggaggagaaattggaattgttgttgttggagagtatatggagcctttaaacaacacaccagatgacatagcagctgcagaaagatacttggaatttctttttggatggtagtataataatacagcttctaattaaattacttttctttaattaattaccatgttaattagttttggtcaattataaattttgttttacaaatgattaatttaagtaatgtttaggcatttggaaccactgatatatggagattatccaaaagtgatgagagaatatgttggtgagaggctaccaagttttactttggaagagaagaatttggtaaagggatcattggattttattggtgtcaattactatacatctagatatgcctttaaaactgataaaccagaccaaaataaacactatattggagactccttagtaacactagcaggtatagtacttacaataatatttatacataaataaatatcacatatttttataatatatattgtttattgatctcaatagttttgtgttatattgtttcagttgataaaaatggagttctaataggtcccaaggcaagtattttaatatattaaacaaaaattaatttctccatatgatttttgctgaatttgttaattatttaatgatttgtacagtctgaagggagtggatatgtgtacagttatccacgagggctacagaaagttttggagtacatgaagataaaataccaaaatcccattatttacatcacagagaatggttacaatttaattaattaattttaagtttttgacggctaaatcatctcaattgttattttacttgtacttaattctttaagtttaaattttgacggtaaaaccctccaaactattaaattagtaccaaatttaaggtgtcacccatataggctacttatgtgtacacttttatacacatgacacgtttatattagtacacctaatattattatttaaaaattatttttaaaatttaataaaattataaaaataaaaaataaatatttaaaaaaaataaaaatattatatttcttaaataataatattaagtataccgatataaatttgacacatgtaaaaaaaaagtacacataagtaatttatattaataattaattgtgaaaaataaataacatcttaaatttgcaagcagtttagtagtttggagagttttaccgtcaaaatttaaatttagaaagttaagtgcaaatcaagtgatagttaagaatatttagccgtaaaaaaactcgttagttttcatttgtttttttttaaataagttttttttttatttattttagtgtaatataatgtattttaatacttaaatatgcaggatatccagatggaaatatcccagaaagacctctgaaagaatcacttaaagacccagctcggatcaactatattcttcagcatttgtactacactaatcaagcaatgaagtaagtaaatgttattttgagtctaatctatagttaatcaattaggctttgttattggtattaatggttttttttcttcttttaatttggtttaggaatggtgtaaatgtgaaaggttacttctattgggcactattagacaactttgaatggggaagtgggtataaagtgagatatggattatactttgttgattatagtgataattgtagacgttatcccaaacaatctgctttatggcttcctacattcttgaaaggatctgtaaataggcttacacaaaaagcccattacccggcccaacgtgtaaaacctacccgaaaagcccattttccagcccggcgcatgagacctacccgaaaggcccatttaacggcccgacgggtaaaacccaccccacccgccttttcaaaactcaaaactcgcccgagttgaatcaactcgggcgaatctcactacatccaaaactaatgtgtctcttcacccttgcatctcacatctttcaccctaggattcgcaacaaaaactctcgttcgaattatcattttcaccgttgatagacccgacaaaaaaccgcaccaccatagtgcgcacggtagcaagaaactcacctccgccaccaccaccaaggttttttaactttgttttgttgttgcatttacgaattgatgttctagtgttctacaaataaaatgtaaataggtatgtggtttctctatattgaaatgtgtacttattactttgttacaaaaaatacgtctttgtaaaggttggcattgttcaaaaaagcccactattatgcactgaaggcccaagtttaaaaacttctataaatatatatttaaatggaactttatcaatctaaattagtattttctaatttttaaattgcttccgtttcttcaaagaaaaaaaatacattaaataatttttttgagtaatttttttgtaagtcaagtcaactatcaagtaaatttgataaggtctcgagcaaatttgatagtgtgatgtgtaaattgaagaagatattaagaccacttttttttttaacaaatattaagttcacttttggttgggaataacaaaaacagaaagtaaatttggtaataaaattagagaaaagaacattttttaatacaaataaaatgttcacaaaactattcaattggcattctaacaaaacaaaacaacataatagaaattaatagaagtgtttatataattcataatttgtggttccaaactctaattaattt

SEQ ID NO: 233530 - DNA, 615 bp, Cannabis indica
ttgacaagtgttgtttcgggtatagcaacagatggaatggagcagtagggactgattgtagttgcttgtatatgtatttgtgactcaggaggtgtagcggtggtgtctattgatggatcattgtttgtgagcactggtatggaagtggatgattcagtggctttattattggtaggtactggtgtagcacttggttgagaaacgggtgctgagtctgagtgtgaaaaaactgggatcgagggcatatgatctttaatggttgtagcagtatgttgttgctgtactggtgtaacagtgggaagaacaacatcggggaataagccatggatctctgagatagatgagtgattgaataatggaaaaatgtgctcatagaaaacaacatctcgtgaaatgaagatttgtttggattctagatcaaggagcatgtatgctttcatcccttgaggatagccaatgaacactgaagctcgacttctaggagtaaatttgtgtcttgttgaaggcaaagtagagccatatgcaagacaaccgaacacccttaaatggtcatactgtggtgatttgttgtgaaggagctgatatgaagtggttcctttaagtaatttggacggt

SEQ ID NO: 233531 - DNA, 734 bp, Cannabis indica
tttttttttttttttttcacaacaaccagctggaataagattgagtggatgccatatgattgctgatgtggacggatgaaaactcctttgtaactctgacatgtcactacccataatgctatagcattttggcagcatttcctcccaaatttcaagtgtaaagctcctgccttgcatccttttatttggctgatttagagggttttttctaacaaaaaaatagacaactaataaaataattataattaagactaaaaatttaatagacacctaaaattaacttgctaaattagaaagaaagataaagctaacaaaagtaacaaataacacactctttcactactcttttcatcacaattgaagtttaaagatgataaaaataactctataccatagagttatcacaccccaaatttcagatattgctcgtcctcgagtaatgaaaaatagaaagaataaaacaacaaaaacaaacatgacaacgacaacaaaacactagaaacaaagaggatactattcattcaaatttggtttagtaaagaaaatgctctcaaagttatatggaatgaaagtgaaatgatggtagtgaatatgccttgaacctgcgtgtttcaatcgagttttgcatgttatttatgtccataatacttaccaagagtaactcaatcactagagtgtgaaaatgcttcccaccaacaccttgaattcctataacaactgttgggttttatgcc

SEQ ID NO: 233532 - DNA, 1385 bp, Cannabis indica
cactttgtgaaataatcaactgcgataactgcatactgcactctgtccttgcccttgggtaattgtccgatcaggtctattccccaaatagcaaaaggcaaggactttacatctgaattagctcgttgggcggtgcataggggatcttgaaaaatctctggcatttgtcacatttctttacataagcctttgaatcttccatcattatcgggcagaaatatccttgccttagtattttctttgataggctttgtcctactgcgtggttgccacaaaatccgtcatgtacttcgcacaggagtcgtgcagcttcttcttttgttacacatctaagtaatggcatggaaaaatctattctatacattacaccttctactatgatgtaccgtgcagctttcctcatcatctttcgagcctcatttctgttatttggaagttctccggtgttgagataggctgctatgggtgccatccagtttggtgttgtgtctatcattttgatttcttcagcacaattgatactgggttcttctaagaattggatagggactaggttggccttatctgttactgtggtgctcgtaaggcgggcaaaagcgttagttgtgttttcttctcttggaatcttcctgagggtgtaacccttgaattgtgcgagcaggtcttgtatctcgcttagatacaccatcattttctctctctaggcctcgtactctcctgaaacatgattcaccaccaactgcgaatcactatagacctcaatgtattcggcatgtacctcccgagaaagttttagtccagtaatgagggcttcatattctgcttcgttattagaggccttgaacccaaatttgactgctctatgtaagtgttgccccaggtgtgacaagggaaattcttgcaccagaaagctggtctgtggctaacccgtccacgtgtaatttccaggtaagtcaatttttgttattttcttgaaggagttctcatactagcttcgtgttgtcccttatgttgccttcttctttgcctctactctcaactaaaaagtcttattgtgcttcacttaataattgatgtaaaattcaacaacaaatttattgcatcaattttataattttgccgacatcaaaactaataccaaaaactatatttgtagaagtgaataagtttataataaatgaagtgatattactttaaaataattataataatatagtttataataattttttactgtcaatatcagtcctatccttatgaagcatatacatccaactcaatattctgctgatgccttggagagtcatatctattagaatattttatttatggaaattattttctaattaaggaaatgattttctatttaaggaaataaataaata

SEQ ID NO: 233533 - DNA, 916 bp, Cannabis indica
tatagcagcaggaagcaaaaagcgtaagcatgatcaaaatattcacagaaaattgtatttacaaacaaagaatccattatattcacagaaatggtctctctatttatttacttttactagtactagtaaactaaaagatctcttaataagaaagatcaactccttctaagcaccaaagaaaacttgtagcggggacattacagacatactacttaattaaactataataatataacatcttatgatcataccattaaaattttttaacatttcactttttaagtgacagttttattttcagtcagaaattttattataccaaaataaaataagatcttttgctagattattcaaataataaagctttagaatcttttgatgttggagtaagaatccaaaattgaaaaagaggcaataaatagaatacaacaaatggaaggaccacatcatgtacagttaaaaatggttattggtgaattgtaaattattttaatatatatatatatacatatataatttctttgttatagtttattcacgtacaaagtgaacaacatgaatcacgattcaatttatatcccatcaaagttcatatagcttttggatttttttaatgtagtactgattaagaaagaggaattaagtaaatttgtgtatggtgaggtttgaatgtatcttgtagcaagaaagttaagaatgaagagagaagaacaactgagaaaccaaagggaaacagaaatcttcaagggtgttttctaagtgttcatcatcattccgatattgctcaagaaaagtttgatttaaatattttatatatagacatatttttgatagtatgtgcaagaaaaaatattgtttgatattttttgtaattaagtagataaatttagtataaaaattaatttttttttattat

SEQ ID NO: 233534 - DNA, 628 bp, Cannabis indica
tgatatcaagttgtcgtatcaaccaaccattaggaacagcaagagacaacatgagtcgaagagtggttggcttgataactgggctgaacgtttcagagtaatcgattccggatgaaagcctttggccactagtcgagccttgtacctttcaatggtattgtcgggtttgtatttgatacgataaacccatttgcatcccactacattttgggagggatgataaggtactagtacccatgtaccattgcgaatgagagctgccttttctgtgttcatggcgtcatgccattgaggatccttgagagcttgagtgatatttctaggttcacaaggtgaagaggcagcagtagtaagatgatgcacatacttgggattgggttttgtgatgttatttcgtaatcttgtaacaatagtacgagaaggaggaggaggaggtagtggtggtggagatgttggaggtggagataatgatggcagagaagatgaagaggaggcagtaggagaggcatgtggtgatggttgtggtgccatggcttgtgcaagtggagtatttgtatgattttcattaagtggctctattggtggaacagtgggtggagtgggttgagtaaggacagtgagttggaca

SEQ ID NO: 233535 - DNA, 927 bp, Cannabis indica
aagcttccatcctattgttggcttcttcaaatatttctcaaatgcttgccatgaaacatgccatcatggaacacatgccagatgttacatagcatctatgcgcttggcatctcaatacaaatgcttccaaaaagcttaaagatccgatcttcttaaaaacatttaaagatctgatgtacaactactatgtgtataaagaatttgaagcaagatggttagacgtcattaaaaggaaacaattaacagataatgaatggtgtcaaacaacattcgatacaagaaaatagtgggcataaacttatttaaggggttcattcgttgcaggaatgagaactacacaacgttgcgaatcgatcaactccgctctaaaaaaattttagagaagaattattgcttgcgtgaatttgtaacaaccaaagatatgaaagtctcaaagctcaaacacaacgagactgcaaatgacttcaaaagcaaatgcactcgacctcacccacctaatcctacatgcttgaccacgtactacaactaatgtgctgaattctacataagaaatatgtaccacaaggttgctgagcagcttgatttagagaataattattttgtcctaggtcatgaggatgaaggaaagtggtagatattcaccattggaaagtttcagcattcagaagtccaatatcgagttcattactgtgaaggccaatgagcactacacagtagctgcatgctttatgaaattcaggggtacccttgtagacatttatggggtacaatgaaaagattaaacatgagaagaatacctaatactcttctcatgaagcgatggagcaaaactgtgaagacaaatctctacctacattttaaccacccagcacacaacaacaacacatttatgagatgactaagatttggatccctcagctcactaac

SEQ ID NO: 233536 - DNA, 1462 bp, Cannabis indica
aaaagagagtaaaaataaaagagtacactataaatataaaaaaggtatagagtgggatccaaatctatatggtaactcgtgtaaaaaaaatatcaaaccaattattgaaacaacttaagtggtaaaaataaaaaaataataataaatgaaataattcctctaaaattaattacataaatttacataataaactaaaaaaacaataaaataaaacaaattttatttttacgctttaaattttttatttacacaaaataataaattatgttttagttattttatagtttattgtgataattacataaggcgctattttttttgtaaaaaaaaatatatatttttatgtttaaaataaaagattaattttacatttttacgttttttcataaaaacaacacgaaaaaaacaagtaaattatataaaagtaacatgaaaataacatcaaaacaacaacaaaaaataacatacagataacaaaaaattaaaaataaattaacaaaagtataacataaaaagacggcattttctgtaaataaaattaaaaaatcgtaaaaatatttaaaattctgtgaaaccgtatttttataattttttttgttatttttgtgtatttgtgttagactttgggataagatgaatgaggttctttctcaaaatcaattggcaatgggaggagtagctcattcattttatatgtggtaatttatgtccacacattagcaatgtgggactaactctaatacaccctcttcacgttagatcctagaaagtgtgggtataacgaacgacttttaaaaaaccacagggtcgaacataacatttgaaagaatcccacaaggccaaatatcaaaaaatttgtaggtgtacacatcaggaaatttgtgaattttaaaacaggtcaaagacatcaacattggaaactagcacactattagctgagaggtcacaaatggaggtttaaggctcatctttttggaaccggcgatactttgggctgacaacagatcacaagatgcttttttctggaaatcggatactcattagagtttagtttgactctgataccatgttagaatttgggataagatgaatggggttccatctcaaaaccaattggcaatgggaggagtagctcattcatcttatacatggtaatttattttcacgcactagcaatgtaggagtaactctaataatttgtgatataatccctaatttatttatagttgtattgtagttaggggtctaatctgtactattttgctcgcactaagtgcggatttgatattttggatacaatccaatccgcacaatagttcaagtccaatagttcaatccttaaaagtggggatttgatcgattactttaaatttgttacttttaatattaagttatttaatatttattaaaaaatatttttttcacataactaacaacaaaataaaaccaattattatttttt

SEQ ID NO: 233537 - DNA, 1100 bp, Cannabis indica
tcagtgggtgaaattgaagctctactcttggcttcagaatcaagaatcgagaagtctgaaaaagatgtggagccgactcttaatctcgccattgctgactcaacatcacgatcctctgaaaatttgctgcaacttgaagcaaatcttgctcaattcaacaggaatttcagaaatcctatgccacaaagaggtcagtattatcctccatactcaaattttcaccctcccaattttcctaacttctcttctaatcgagctccctattctggtaattcctttcgaggatcaccttccttttacaactctgggagaggctttattcctggcactagaggaggcaaaccatctcagcatcacaacagaattcaatgccagctatgccataaaattggacatactgttattgactgcttttatcgctttgataaaagttttacaggtgctgttacaccagctgagtctactccaatgcaagccaatattgctcaatcgactcctattgatgacaatcattggtatcccgattctggtgctacaagtcactgcacaccagatctgcaaaacatagtgactccagctgactacaatggccaggatcagatatttgtgggcaatggagcaggtctgtctatcaaacattgtggtcaatcctttgttacttccaataactgtgctaagcctctacttcttaagaatttgttgcatgtgcctgagataactaagaacttacttagtgtttctaagtttgcttatgataataatgtcctatttgaatttcatgctcaagcttgctttgttaaggaccaggttaccaaggaaattttgttgactgggacactccacaatggcctgtatacttttgatccaggtcatttcaagataattccttcatctcatcctactgtcagcacagatactcattccatcaaccaaaaatctgccttccttgcctctaatgattctgctacttctgaaccaagctcccagtcatgcactcactgtaatacatccatagtttctgattttaatctgtggcatagcagacttggccacccttctccaaaggtggtcacatctgtgttgcaatcttgtaacattcc

SEQ ID NO: 233538 - DNA, 1329 bp, Cannabis indica
aaaaaaaaaaaaaattgaattaagtatttagtaaattatgattataaatacaatgaactaaattataacattatatcattatattttaacaactcataacatgacaaaagacaagagcgatataatgatataatgagtttcgccaaacgtgagttttgcctaaagattacaagacttctgaaagaaatttatatgtatgtcaaaaagatacacaatcccctcctgacattccattctctcatgcataaataaggcgatttctgttactttgccgaatactaaccatccaattgagtctccctcttgtataatgttggtagaaattactttatttaaaatactgtaaacaatcccattagatggttaagactgtttaattaagtttcttaattaaggatgtcattacccatatatagagcaacaccctcactataaagggatcccaatttttatgtcttaaagcaaaaacgttgcaaaaatattgaacacaataacacttttataatatttacttgtagactaaaatttatttaaccaaccacgtaaaaattttctacaaagctctaaacatttaagttttcatattttattctaattgttaaaaatctcagtcaacaacatgaaattaattattttgaaccatatttttaaaattgtaaattatttaaaatttctaataattacaatatacattttcatatcaaactaaaatgagttataatttctttacgtatcaaaaacctaaacgatcttagatgcccctaatataaaagtctcttatatatttatatatgatgatttagatgcactaatagaagtattaggcattatcttttggttgcagccgaccttaattaatttaaaatatattaaagctaagcattttacccatgtcttatactaatatatttgtttgtgattagggagagaagttggttttcaatatactaaaataaaaatcatttctctaattaaacaaggcaacattttataagaactaatcaataaatattagaaatatatatatagttcattgtagtagttgactttcattttttttttctatatatatttctttattattcatttttagtattcaataagtttctatagtatgaccaagccaaggttgtgactatattatatacattgtacaagtgtctttgtcactaagtcactaacttaatgctatgtcacatattaccaacaaaaaaaaaatataattaatttaaactaaaaatacaatttaattaaaaagaaaaagtagaaagtagacttggctattgtttatgtcttatttatttatttttttaattttcttaattttgt

SEQ ID NO: 233539 - DNA, 835 bp, Cannabis indica
acatttttttagattttgattttgctggttttggaagaaaaatggttgagaatgggttgttggggttggatcgctgggtcacgaagaaggatgcggctgggtcacgaagaagatggagtttccgttttccttggccggcatttttgtaattaacaactttttagtttctatttttgtttatttccttttttggggtcataaatgtaaatttgatccatttttagtttattatagaaaaaatctctaaattcaaggatgatagagaacatgggacttggttcctttatatgtaatttgtacaaataaaattgttatgaatgaaattcttattttgatattttctaatatttatgcacatcttaatttttatttggagaaaattttagaggaccagaataaacataatgtttaaaatttattcgcttaagtacattactacataaaatatattgttatgtactgaatatatcattatatatggaaaataatactagtcatataataagaacttatcgctatgatttatatgtttattatgtaatgaggaatgttgagtttaagtggtaaatctaaatactgaccaagtgggagaatattagaatatttgtagtaatagtacaacatcattcaatttgattttgcattatcttgctgactgtatttgatcacaaatcaatatgtgagaagtatgaattttctaaatatggtcagtttacgatttaccgaatcattcatttcccgatttaattttttaaattaattatcaaaatattttgacaactaatgtggaacagatattgataaagtatctcacctataaatatagggtctcggt

SEQ ID NO: 233540 - DNA, 926 bp, Cannabis indica
aaaatatagtttgagtacatttaggaaaggatggcctagcttaaaatggccacaaacttgattcattgacagaaacttaaaaacaagactcgacagactttaagtgtggactaacactagagcttttgttggttgactcgtgagctagaagaccagagaacttgtgacttgcaaaacatgttgctggtggtgttagttgatacagcccattgctaaccttcactttatgaaacaccttcttcgaatccatgtccttcaaaacacaagagtcagcatagaatttatcataggcattattatcttttgttagttgggaaacacttaaaagtttatgagaaatatgaggcacacataaggtagtatttagtttaataggtttggaagcatcactagttttaatcatagagcttcgattgtgggatatagggatagactgtccattacctacagtgagtcgtgtcttaccattgtactcagcaggggtgtgaagattgttgacattgtctgttatatggtttgatgctccactatccacatgccggttgctgtcattagtcgaggatgttgtccagagttggctaggaaggcttgttgggtattaccatgtggggaggcaaaggaagacccctgagatgtgttgggagaattatttggagggacaaaattggcatcaaatcgatagtaacatttgattacagggtgcccaggtttgttgcagagttgacaaacaatgcgtccttgattcctcgaccttgatcgcgtcctcaaccgtggaagttagaggacctactagaattagagggaacaaagtgttttttttttcttatttctagtagcgaaattagtaaagggattagcaagatcagtagtaggggaaaaattagcttgatctatacgcatttcttggcttcataacatgtattgaa

SEQ ID NO: 233541 - DNA, 970 bp, Cannabis indica
gttattattttgtctgtatttgttttaaagtttaatttctgctcttagctctagtaaatctcgctttagccgaattaacatatgtttagtcgcagttcgtggcattcctattgttagggcattacaatttggtatcaaagcgccaaggtttttaaacttcttgtagactggctgaacatgtataatcatcgccaaagacaagctcaacttgtggtgcagtaagtattgagagtaaatgcttaactactgttgtgattaaatgtttaccgcattctgttataggcagcatatgagcatctagaaaataaaatgttatatgaaaaccaggattagtaattaaattgataaatattttaaaaaaaaaatagtatgtgtgagttagggttaaggcattaagtgcgtaagagtggtttttggtgcctcactcactggggttgttgattttagggctatttgagagaaaatagaccctaatcaatcagctagaccacggggtgagtttgtagagcctagtattgaccaaaccaatccgttggcaccgcctgtgcctccgtagaatccaagggataatgcgggggttaataatgctaatccacttggcgactggcagcaaatgttcctccaaatgcaaagcattatactttgttaggaagatgagttgcatcggtttaggcagctggcccaggcagttccagttgaacaagtgttaccaccagctcctgttccagtggtgggtaaccctggatttatactaccacatcaagactcggtttttgagcattttgtcaagctacaacctttgacatttttgggaggtacttatatcattaaggcagagtagtggatgagcattgttattcgcatcctggataacatgggagtaacgagaactgaacgagttaattgtgttgcattcatgtttcaagagcatgcccgtgtctggagaaatattgtgggacagacttaagat

SEQ ID NO: 233542 - DNA, 1141 bp, Cannabis indica
aaaaaaaataattagttacctttacataaaaaaattattttatatcatataatttaatatacattttaattatctttaaaacttatttctatacatcttagtaattagttagttattttagaaaatatctatggtggagatattagttttgtctctatggtaggaatattattttagcccttgattgttgatccaatagtaataaagttgagaaaatatgataataatagtggaactggaacctagctagtaatatttttacacattttttgtcttcttcttcttcttcttcttcttcttcttcttctttagttaattagtaattttttaccttttcatattcttttaattagtaagcttgttgaggattaaccgtttttaaaatttattttctaaaaattatttaatgtcttttttagatttgtgttctttataaaatctattaagtacaataattcataataaaatataaattaatatgtatacattaacatgtatttaaacagggttaattgcggtaaaacatctaatacttttattttgtttacatttaacccctaaaactcaaatttcggcggtaaaacccccaaaactcgtgttttgttaacaattagcaatttccatctattttcatctgtcaactgtcagattggttgtatccacgtgtacaaattttacatgaggcacaattttattagtccacgtaaataattattaaaaaaattaaataaattattttaaacaaataaaataaccaaaaattaataaaataaaagaacaaaataaaattaaaaaaaaaaacctaaattctatcttcaaccttctcactctctctttcattcttctgtctttctcgatggaagctactgcccaaaaccaacaaaaaatctaacaatcgatggttgaaacgagccacaaaatcgaaatccttgtcccccaaaacctttagattcgtccctctctctcattttttggtagaggcgagaagtcgcatgtttggtggagatgcacggagaaatcgccggtgctggtggagatgcacattggtgatgtgtttggaccacgaaatcgagatccacgaatcccaaaactcagatcccccaaaaactcgccccctctcgttttctctctctctctctct

SEQ ID NO: 233543 - DNA, 516 bp, Cannabis indica
tagttaataagcttagcatctgtgtgtatagagtatagttgaagtagaaatgttaacttttctagctaactgaagcctttgatgagcaagcccagtccaactagggttatgtagttaaatctcctctcttactctataaatacataattgaatacttttgataatcagataaataaaactacttttgatttagagagctagagaagaaaacttaggtaatagtattgtcctatcaaattgcgttaattgttatggatcaataaagtatgtatacctaattattatctaattattattgtgttctagattatatacaaaatttagatcttggtttatttaatttttaaacacactggtgttgtaagaagtgtgctaaatttgacacatgctaaaagttgtatgttaaatttagcccacaataagtattacttttttatttactataatgccactaattattatgattcattaatttttactaagctttacattatttatttatcatattaccattat

SEQ ID NO: 233544 - DNA, 5094 bp, Cannabis indica
gtaacaaaaaaaaaaaaaaaaaaactaagaatataactaagtatacgtacattacacataacattacctagcatattttaaatatatttaacataaaatgtcatttcaataaatcattaatctaaaatattatcaagctaaaggacgtaactcgccacacactattatgaataacccatccctaactaaaaacacagaatcaacgctaaggaaccattcccaatagccatgtgagggcattttatggaggctactaggtagtttgggattaaagatgaacatagatgcggctgttaaatcggagttaaaagtcttagggattgggcaattataagagatcattaaagatatgtggtagctattctctctaaactagtacaagagtgtttcagatctgatgaaatagaagctaaagcacatttctatatagtcttatattggggactgcaattacaactgccaattactcaagtcaacactaatattctgcgagtttcaacagctttaaactctacatttatgaaattatcaagtttttctatttaattttagatgttcgttatcttttattcgtttttctttaaatttattgtttttcatattaagagaaatgctagtgcatgacttcacaaaatatactctaaagttaatgaagatatttattggataattgaaattctcaattctattttctctatttttgtaaaccaattataagttttaataatagtaaaatcttctccaaaaagaaataaaaaacatataataataataataataataaacgattaattaaaaaaaaaaaaaaggaaattgaaatgtatggaggtacaaaaatttgatcgtgattaatgttgacttgtgcaaacgaaatttgtatgtaattataggaaaaagacaataaaaaattgtatgaaataagattaattgagttattgtgaatgtgaaacgacattgatagttcatggaggggagtatgtggatgtcattgtatagttgaagctaattaagataggaactgtttgccattttttcaaacaagtttcacctaaaatacttgatgcctaccctgccagatcgcctctcattcaatacttaccatctgtcaattttaaccagcttctacaatgaatcctttcaaagtgatgcactaataaatcttttatttattttgggtatttcaaacaaatttttatttaattttcttttatattcgtatatattataattatttaagatattttactaaattttgagaaatttaaaataatttataacacagaaaacaatgttcaaacaatctatttcacatacgtatataataaaatagtcacacgtgcaaaatattgtttgagctatgtttttgacatgttaaatttgtccaaatttcttaacattttgtaagatatcttaaacaactatagcatatatgacagtgagaaaaaaaaattaactaaaagattatttcaaataccaaaacagataggagtgtatcagtgcattccttttaaatggagtacattgcaaaatagaaaatttgactttctatgcatacattagcccaatattagttccctaattcaatattgacgggtattagataagtggatatacattatggtggactacccaagatacccctccgtacactaaccgtcattctctccatttctctctttactctcttcactctcatctaatttttttttccattctcaatatcaaattcacactaatattttacattttgcctctccaagctactagaagttactacaactaaataaaattagtgtgatactctattctttgaggcactgaacaaagttgtggaacaattaatcgacaagtaattttttttgttattggttctttaatttagtttagaatattgttttgatgctcgatccgtgggttgttgctcttttgtgtgttgaaatggttattgtacatgaatactgcatttcttcttgtttctgcaatttttttcgtctactttaatagcgctcgatagtggcttgatgctagtctaatataagatttggttccaaggatagggatgatggcctgatggacccgatagggggcccaattcttgtccaatgtcatatggaccagattgtcaggtctgatggatccgatgggcctatgtcgggcccgatactagtttgatagtcagcttagacctaaggccaagaatgaatggcctaatagtgtgcccaatggggtccaatgcttgatagatttatggcattttgaggatttttttttataacttttccattagatttttgtgggaccaatgaggtctgatggtgttcgagtccgatggttgatagatttttggaattttgaggatttttacaacttttctattagatttttattctaaaattttaatagtatttttattaatgtttgtgacaagttcaactattttttgcgttcgttatgtatattgttgtttgaaaacttgagggtagagattgagtttataaccgagccaaaattatgacatttgagatatatacgaatgtaacctactcacttttggttgatattttgtatgaagaactcgaagttgacaaagtgtagtatgacttaaaattgaaagtgaattacaagtacatgaaaggtttaatatatcaccctgaagttattagaaataataagcgtgtaaggttaattttatttgtaatgatcgcatgattagattatgaattagtaaaggcaattaacattaattattgacatcttatgatcatccacaattttatattttctgggtcccattttatgaaatgggcattaaagttgtaatttctcagttatggagattttattaaattctaagtgtgttatttatgtcatatgcaaaatttacaatttttattatttttgctcggtgacaatagaaaatgcaacagatggccaatttagtcatgtgagttagcttaaaattgttttatttaacggggtatcaatcagttgatatttagaatattggatttaggcggggttataattttggaccattttatccctagacctataggatgcttaagtgtcaaacaaggggcaaaattaaaatttttctattaagtctctttaattaatcttctaaaattaccttagtgtattaatcttattattacattagaattaaaaaaaatattattttatagataaatattaaaacatcaattaatcaaacacacacactctctctcatgtcatttctctgtttcttaacctcacccaaaaccctaaagaaccaaacctgaattcatctaagtttggcaaaattcagcaagagattgaaggtagctagttagccaagagcaaaggtaaaaccctataacataattcctttaattttcagcatgcaaatttttgagataggttctgtccaaaccctagcttgtcttgagttattttttgagttagttttgagttgtgtgatgcttttttgttatattttgaggttcagttttggtgttgtgcaagtttgagtttaagaactcaaacggctcaacaatggtgatttttgaattactgggtattttaagatgctattgcttggttttgatctattatgatgattataggtgatctggagcttgtggtatagtttaaggtcaatttgggttgtttttagactctaattttttgtagtgaaaaatagcagactgtttctatgaaaacggtctaccatttttactggtgcagacccaaaaaaactacttgctatttttacagaaatgacctactgtttttaaggtagtttttctgtttagtcaattttctcatgtttcctcaatatttagggtttttccgtgctattgatcaatagggaaacttttagttttgggtttggatccccagaaaggttttagaaagttgtttacccgttttgcgtgattgtgacataggccctccgttcaacgcataattttccattcaggtcgatcaacacactataattaaaaaataaggtaagaccagcatagaatatatgtgtatagtatatgtgtatatgtattatatgcatgttatatgattcatatgctacaaaaaactagtgcagtaacaatactgagtgcatgtggtacatcatataatgtttaagagtacaactcggtgttacaaacactagtacggttaggtatgtagtgcatgtggtacaacacttagtggtacttggagtacggttcaaaccctaccaacactagtacattagcagtacgcagtgtatgtggtacagaggtcgtacctttattaagaacattcttaatcatctgttaagccttttggataggtgtatgggcgcctaaatacaagtcgtagtatattgtatgttatatgcttttcttacttagttagtcgacttttattgcttgcatgtgttagtaaaggaaaggctaaggttgaacagcaatgagtttggagcttgaggatgattgtacatgtcaggatggtacgacctagtgtaacgccctgtccaacagggatgccacgtgtatgcttttataaaactcctataatttataattataccaaaaagtgtggctaattaaaattttacaattaaaacgaacgcataattttataatagataagtattaatatctacgcagaccccctgtcaccaaaatatctacatttggaaccaaaagtgcttatacaaagtacgtttatacttcagaatacaatcaaaataggttatcctgtccactgggctgtggcaccgcgactgatatgtacattgctgatgcgacctcaaactcatagtcgtacaaccttgcccttccctttacctccactatttagcacccgtgagttacagagactcagcaagaaaagtgaataaatctataaacaatataaaattcatttaatcccatcacatattaacatgattacacaattgcacaacatcgtaatcacacaatcttggtacttcataaagcacccttaccactcgttagccattattatgtcactatcgttgctcgatgtagcgaataataagtaagaaacctatccgcaatttcaagagtaattacgtgtaacagtaatgacccatttccaact

SEQ ID NO: 233545 - DNA, 1039 bp, Cannabis indica
tagggcataaaattccaacaatattatggtcactagtactgtccgtttgaacgttcttgacttagtacattgtaggacacgaggaagggttacggttaggggtatgggcgcttaatcttaatcctgtttatatctatgttatgattatacttttcttactgagtttgttgactcacaattattatgtgtatgtgcatgtatgagctagaaatcgaaccattgaagagtctaaagctaaggatggagattgtacatatcaagacggttagacttggagcgttcagggtcttcagaacaatgttggctcaattttgttggtcattagacgatgatttttaaaatataattagtttataaatttatgtaaatttttaaacgggatctcgaattatgtaatttattacgtttaaatattaaagtaaggctatttaataaagttttaatcattcacgtttttgttataccatttgattagcaaatgcatgcacagtatttagaaagcactgtaatacacctaatctaggagagtgttacatggttcctcttgagttggaattttatcttagcttttcactattcttatgatttttagtcttgttatatctgctttgtggtcttcctttggtaaacaagccttcaccattgtcatcttctttgtcatttgttatcttgtgcatttctttagaactcaatgcaactctcacctcagacatggtgagagtctctttatcatagagcactgggtctacaaaatgctcataagtctttggcaatgaattgatcaagattatttccaaatcctcttcttcaagcttaaccccgatgttacatagaactagagtgatcttgttaaagtcatcaagatgctttctgagatctttgccttcatccattatgagagtattcatcttcttcttcaaatacaatttatttgctaataatttcttcatgtaaatcgtgccaagtttattccatagccaaggcctttttgtaaagaccgcctatgactaatactttgaaatgataaataattaaggtt

SEQ ID NO: 233546 - DNA, 485 bp, Cannabis indica
ttttattttaatttttttttgttagttatgtgaaaatattttttttgtgaaatataaaataattcaatattaaaaaataactaatccaaaatagccgatccaatcagtactttttgcgaattggattgatttgaatttgagttattatgtagattagattggatcgatccaatatatgaaatttgcacctagtaagaatcagatgcactataaacaaaataatgcagattaaattgaataaacacatcagtaatagtaataatatagatacaaaaatattattgaaaactttcctaaatttaattatgtgctataaaatttttgtttaaaaatttagccttaatatctatatatattaattatgtggctagtgaatatttacccacaatcagtttggtccattttttacctctgccattcttaagaacaatatattgtataataaccacaagatttaagatttctatttgatgaacgtttttttt

SEQ ID NO: 233547 - DNA, 2232 bp, Cannabis indica
gaaaactgatattatttcaatgcatacatgttttaagagttatttttttttaactaataatggagttttggttctgaaatctgaatgatatcaaataattgaaaattgagtttataagaattgaattccgagaataatgaaagcttgtatcactcatggattcgagtttgagtattgattggatctgtacatagtcgataaagctctccggtcataaattttacagagttgctttatttcatacttttagcttaagtaaagtgttattccatttaatgaaaatgaaacatttatttggagaggttaatacagttggaccacttaataaaggtgctgtattaagatcaatagaaactagaaacccagctgcatattctattgttgatataatttgacgttgctaatttttcttagtgactttaaatttaactgattttagcatattgggctagttttaaagtaatgatctcagtatgtactttgaaacaataatagttgaactaattatgttgtaattgctaattaggttcatatttctatcttggtatgcagtgaactgcatacaaaaattagaaaacatagaggagaagtccatatagaaatggttgttcttttggcattttctccttgtagcttgcttaagaaaaatctgcaagcataatgagatgaaaatggtatcaccacgccctgcttctgccctgatgaggcaaattttccagcattgtgctttgtacagaattgattggagaaaaattttctttgctggggctttaatgaccataactggtgttatgctccaaactcttacacttccttatccactaaacaagtggttcctctctcctcctgttaccgtttcattagatgaacccttcaatgtcactatagagttgactaataatagagtgaatgaatcaagggtccaacagtttcaacttttagaagctgtccccaacgttttgttaaattcccctgctgagtctaatttctcagtgtcagttgagccaaaaatacctgcagtttctgttcaaacaagaaagtctttatcaagaaggagaaggaaaagtattgatgtaggttccaagccaaaccacacagctcctcctactgctcctcataaaacggtacctttccgattgcaggtatatcatacaaatcattttttttcttttacttttcttcacttcttgatttccttgggatgtatgtaaaaatgaaatttcattgagtcttcctagactagctctcttttataattataaatatgtgtggtggccgggttttcctagctatattgtattggattttggctgattccagccgtttaatgaagctattttacctgtaataaaagaaaagaaaagtatgtaaccaatgtttttgtatttcagaagtttgtcgggtcctttaaacccaatcaggcacttaagtatgcaaggaaggagatcaaccatgccccactggttactgatgatcctgaactatatgcccctctgttcctaaatatttccctttttaaaaggtaaacatttcacttagctagctgttactttcaacttataaaaaaaggaacaacgcgtttgtatattactgctagaaaagcaaagataagattagattagctttaggtggtcattatgtcattccttcctctggatggtctatgaaggatctgaaaggagagaggttcgttgttacactcacagtgaaacatttagcttttcattcctaatagttttttttatcaacttttaattcctaatagttggttaagttgtttatatagagactgtaaaatcctaagaagatattagaatttatcacaataaatttatgtactgttacattcatgtgaaaatgatggatttctagaagattttatatgtatgaagggtgctaagggtgctttggggttgtatggagttttactacttatggattgattttgatctatctatggacaaacagttcttatatgttgttttctgattacgaaaacattaatctttataggctgaatattaattacgacaaagacactttatatactaactgcatatttttcccgtttccgtacggaagtattctctgcaaaactgaaaagcaatgtttttcataaatataggagctacgaactgatggagacggtacttaaagtttatatttatcctgatggatcgagacctatttttcatcacccacatttgcaaggaatatatgcttctgaaggat

SEQ ID NO: 233548 - DNA, 1494 bp, Cannabis indica
aaattgcatacatttcttataagggtctttcaatacatgagtcttttggggcctgtctcactatcaatataagatacttgattcaaatcaaaaatggtctttgataaggaacaaacatatataaatataagagacttaattccatagaatgatatatgcttcatctcaattgaataaaatacctctttagagccctgattatatatgctccatctctattgacaaaagacgattgagacggctagatgctccaaagctagacaataccaccatgccggtaagaccattgatcccaattctactaaccaattaaggaattgtaaagaaaaatcctgcacaaataaattgagttagaagataatgtcactgatttagttttgctctttggtatggcttcaaaataaataaggttgaagaatagcaaatttatacttgtcatcatgccaaaatgagtttgcatccaactctagtagcacgagcagagttgcattcatttgtgtaactaaaccgaattacaaatctatattatctaagataacaattgagaagaaatatcagttagtaagaacagaagtgcaacttgaaaataatctttactaatttaaaataaaaataaaataagagaaagctacaaactgcagtttgttgctgattgagaacagcattacatcgcattcataggtaaccaccattgcttccaattgacggtgctctcacaaagtgaagaaataaattaaattaaattctacgtctcattactttagtataatatttttcaaaaaaataaaatgaacatacaaaggcattcagtctccaaccagtagaattagcaatttcacaagattcttctacatttagtagcacacacaaggtaagagcttgaacaaaaaaatttaaactgaacttatacaggttaataaaacataaatacagttgttgtatgtattatttactaaagagaaagattataataataacattgacaatgtaatatgatcaaaaccttctttgacaatgaccacaatcatggtcacaactgttctttttattaattgaaccctattagccatattgaatgtgaatggtccaaaacttcagtagtacgctaactatgtacaacaattcctcccaaaagactcaaattttgaagcattaaactgaatcattcatcctaatccaccaatttttaagtttcctaaacaatcaaatagtaacccacatttcccaagtagcgataacatacctaaatctacaacacaatttgaaaaattcaaaaacatgaagttttaactaacctgtgaatggggatattgtctacaatgcgataaccacattgctggtaaatttaaccaagaaagcgaaacccaccttatttagtgtcaactgtgaaacgatacccactgatacattgttgattcacttaataatgaaaattagaagttggcactgcaataatccattttaaaaagacgtagaagagaaagtgaacaaaaa

SEQ ID NO: 233549 - DNA, 1052 bp, Cannabis indica
ttatttcttagtgggaaatatttttgagaaaaaaaaatatcgaagttgagcggggttatggtttttgaccattttacccctagtcttaaaaatacttaagtcttaagtaatgggcattttggtaattacctttggtttggggttaggtggctgccttgtttgagtgacgccaagcattagtaatttcagcaaggattagttaggaaaatcctttcccttttgaagaaaaatcataatttaggaaaaagacctttttttcccttgaagctctctctttctctctttcggctggggcaaaaaccagaggatatcacctcttttcagctcatttttctagaatttcagtaaggattcaaaggttcttgaacccaaggtaagccgtagtagcatccttctttaattctcaagtttctagttggtttggttatgtgattttgtgaaatggggtcgttaggttagttttgtttatggtttcatttttagggttcatttgaggttgtttcaagttcttgcagctgattttaatgtgttgtgtttgatttatgcaagtctgagctttgagttcaaagctttgatctctaatggcataaattaattttgtatgtttttctatgaaatatttgttggattatgttgtgtataccctaattaggcactctggaaggtttggttacgtttggtggagttttgaccaagtaatgaaatttctcgggtgaactggtgcaaaccgggtaaccggttttggtagggttccccgggcctttcgatttcctcaattcttgtccattccgtgtcgtggttgggtgtttccctatttccaaagttagattaacccctagaaagtataacagaaacaagggttgtgggtttgggtttctcgagattaggttttgatctgtaactaccggtttcatatgtgattagggcatccatctagcacgagactttccgttcaggtcggccagcacacttgaatctgaaaaaagaagtgagaaactgtgtataatgtgtgatatcaatatctgagtatataatgtatacgttatgtgtat

SEQ ID NO: 233550 - DNA, 1181 bp, Cannabis indica
ggtgttaaatattgagtcttccatattttaaattaataaataatgcaaaaaaaactattaaacacttataatttaccataatatatttaataaagcgtgtcatagcaatatttcactattattgatgaaaaacttaaatctaaccaatttatcaattgtattaaaattcaaaagttaaactcaagtggttgacttattatatttaattttattaatccatcaagaaagcgtactttaaaatttagtaagtcataagaaaaagaaatatttttagattcttacttcaataaaattaaggtattatttaaaattaataaaaaaatagtattttttaaaaaattaatattcttaggctagctaggagaactctaaacacaagcctaactcgtctacgcccaaagccgcacctatccatcaacctaagataatattatttataatcattgacacatttataggttaattaattaatatattcataatctatttaattaaaccaatatagacaacaaatagggtaaataaacatattataaatacttattaatttttttagtttgttatggagcataaacacaattatactttttagcaacttaaatacttaatatttataaaagtgtaaattttcgtccagtttaattagtaagtagagtctaaaagactgttattactagtgtcttagtaagctacatattctaaatcatttgatctagacaaaaacaatgtagtatgagttgctttctaactcttcttttaataaatttaaaatggagtccgtgttgattgaattgaatgaaaattatagttttaagtaacatgtagtacttatgctgcttgttgcctaggatttctccaaaaatacgtggtttgttgttccaaagaactaatgatagattattcatctccaggaaggtttggctggatgatgacatccttgtccttttcctctccgcgcacggaaaaaattgacccagaggagggtaataaaagattggcaaagtataacacattgctcgaggattaaaaacaatgtatacgcatttaatgggatatgaagaaaaagtatatagacaacttacgctgacagacatgtttgagggtttaaacccatcattccacgaattcataagacctcatttgtcaatcgaatgctgcataaatgagtcgatcaagtcata

SEQ ID NO: 233551 - DNA, 1482 bp, Cannabis indica
aaatcacaccaattcaagcttaacttttccaaaattaatttaaaaaatgaataaggaacagagagagggggggaggtcagctagggctagaaataatcagaaaatggatttcaattttctcaaaaattggatttttgttgaaaatgtaatagttggtcaaatgaccaaaatgcccctaggaccaaatatgaacatatccttaaaatcaagggtaaatttattatttcaccacacacatatatataacacataattttagatttctcatttgtcatattaataccaaaattaaatctcgaaaatgtattttaggtccagaacccgatttagcccaaaatacccagttgtgactatactacactgacttatcagaaaatatctgcagatagataaaatacatatactatataataatatagcctataagcacaatatatcataaaattaagatttaacccttctttggtcaaaattacgagaatacccttgacacaccaacgaggtcttaaaatgcaatttatcagtatagtttcacatattaaattatataataatataagtctacattaacacataatcaaactagttagggttgctaatccgagttcttaaccttagggtattacattgtacatgactacccgagctagtccttaccacatagtgatgttgaatcctctgagcaggataacgcagaagaaagaaatttttaaagatattttccataaatatggtcacatttacatctcaatcaaatctctatttttattggaatgtcacttgttaaaagagagattataggaaactgatttagtttttctttttattcctaattgttttagaaaacttaattcatttttttctataaatagtggagtcgttttattatttggggatccagaatcaaatattctagagagctattacgctgtcaaataattttaaacttttcttgaggattattgagaaactcacttgctcagctccttgtgatcttgataattcttcgaagtaatacaagtaaaaggagagtaagctattaccgtaatcaaagggccaaacttctatgaatcctggttttttattgtaattgtattaattattatctattatctcattgctttaaagactcagtgttcttggctaaaagcaaggtcgacgcacacacacaatacacatatatatatgagttcaagaattgatatgtgagaataagaacatatataatatatataaataataaagaagaaaaataaaaaaaaagttattaaaattattttagttagatgagtatatatatggctcaagaattttaacaaaaaaaatatttatcttgaatagagattcacactgataatgtattataaaattattatgtataacataaaataaaagaagaaaagaaaaagaagattaagagagaacgagaacgtgaataaagtttttaaataagattaagagaatgaaaaactaaatcaatat

SEQ ID NO: 233552 - DNA, 1405 bp, Cannabis indica
gaattggaaaattgccaactccgataacgtctggccaaagcaaaccaacgaaacacagagttggaaagagaggcaaccgcagctagggcgactcaagaaaacgctgcacaaaaccaacctgatcctgtagtgagaaggccaagtggtaggttgttttgtgaaaacaaatgaagtgatgacatgtcaaattatataaaatacaatcacaataaaaattatcaaacaacatatcaggagaatctaaaccgttttatcttagcataattggtctttcctctaagaaaatagacaatgtcttctgacctaagttagtctcatattggaagaccctcaaaaataaattttactaagcacacacactttaacatggtggtgtactggaggaacgaagtagtttggacttctcactatgtagtttactttatctatgtaatatgtgctaaggtacttatcctggtataaatttaagaagtattggtcgaacccacccagatcagtattacttaaatttgctaaggatggagctctaattacacaaaagggtgtctcaccactttcggaggtactcgctcccagagtatccttgtttcagactacatcttaaaaataaatagtgagctcttcaacctcgctcatctcttttggaaacttgctcctccattcagccaaccactgtttgtcagctttcatagcctttaaggcctcctcaacaaaaatggccgcaatggcctctttcatgtcatcaggatctccctaaagaaattcttggatgttctccttcaccgacatcgtgtcgatactttggtggggagaaatttcagagactttcggtggttacaaggtgagccacctacaactttttgggtgacaaggaattataaaaagtaaggttttcctccaactctggattcagaggtgattggaaaatgaaatctagaaagaataaaatagacatctgaacatgaagatttgtaaagacgagaagtaaaataaggacaaagatcgaatacttactgaatatgctaaagtccaagctgagtgttagaactctcctcaatgggaagtcaagagtatagaactaatagtctcaaaaatcgtgagtatacttcacgtaactgattgggtaggccacttttttggagtatctttctagcctgtaaaagctagtcttctccttgtgacctctcatgggttgagatttaatcttgtagaaatacaagatccctttaggtgttggtactgctttcttgtgtcgcaaacaaagaatgtagcatacagataaaagatgatacacatgtgggatgaactggaagggtgcaactctggctactgcacaaaagttagcaaagtaaaaccttagcggaagtcgtgcactcatcttcacatgggcctagctctagatgac

SEQ ID NO: 233553 - DNA, 4028 bp, Cannabis indica
aaaaaagatataatgaaagctttctacccaaaacaaaacaacaataaaaataaaaagaaacttttaaacttttatataccttaggaatggcaattgtcattcaaagtctcaaaaattgttatgcttatggtagtttatccttacgcagaaaattttaatatgatacaattatgatataaattttaataaaaagagtgcctagacatatacgctatttctttttgaaagaaaaaatcaactaaaaaagtggtctagaattaattttaaactaaaataattatatggctaaaaaagtgttaggaatattttttaaaatggttagccatattttaattaaaattttaaatataaatttattatgtaagttatgtgagtatagggacttaaataaaaaggataaatataatatattaaaaaaaattgatgtgtagtttataaataataacaaatactactcatctagcaaaataataataataataattattactaagcaattaaaaagatattggtaaacagattatattttactaaaaattttcttcctaataacattaagaggatctcggtaattatgcttatatactatctcttcattaccataaaaataatgctagctttacctatatttgacattttttattgtactccatcaaactttggtaattttattggatactattggattgggcttagggaagtgtactccaactccaatattatagagtagcctccatgaaaatcaaaagatgataggcataataatgggtaagaatattaggtgtttaggttatgttgttttaaatttttcttttaatgctacgttagaagctttttttaattaattaatatttataattttaaagtaacgaatgagttgttttaagattagatatttcattttttttattggaaaataaaataaaaaggaaaaaaattagagaaaataaataaataggtaaaaagaaagatagttttaagtctattttagagcgtcatgttaccgtcttatacttcttctttatatatatatatatatatagatttaattaaagggccaaaatgtaataaatttgtttaagaggccaaatatttattagttttttttttaaaaaaacaaaaaatatttataatatataattttggaatgtggaatttttggaaaaaaagaaaggataggagtgagataataagtgggaggagataaagagtagagagtatatctctaagggcttgtttgctacgccgaataagggttgtattgtataaaataataaatagcattatgcttagataaaacaatatattgtattaattattacgaccaaaatttttaatacaatgtatgttgtattatttaatacataacaaatatccgtattagcttgtattataatatttacaaaggattcagggtcaacactaatctctgacccgaacccgaacccgaaatcgaacccaaacccgagacctggactcgagacccggacctggacctggacccgaactcgagacctggacacagacatgaatacggacacagatccagacccagacctattcccggacctggaccctggacccgaactcgaacttggacccgtagttggtgttgggtttggtgtattgtattgaaaatatattataattttacacaatctatttatacaagttaataccaagcattgtattgtattaaaataatactaatacgatacaacacaatataatacaatacaatacgacgtacgtatcaaaagagccccaaattcaaaaaaataaatttatccaaaacaagaatgagacaaaaaaaggataattaaaaaaaacacaaaaataataaaaaaaattacaaaaatataatctatacaaaatttttaatatttttacgggtttttacataaaatagggtcttttagtatatttttatgttgtactctttattttgttgttgattttttactatttgtataatatatattttttatgttgttttaatgtttttttttagaataaatgctcttatattaaaaccagagttaaaatacaatagtcattaggggaggaggaatttcctccaaccaagagcaaatagagtccaccaaaagatcatactttgctaaaacatgagcagcagtatttgcagatctattaacatgagagatctgcactctagagaaattagacgctaagtgaaaaatattcattaacaaactatggaagtctgaaattgaggcttgggaagattgtagcccatttaccactaatagagaatcaatttcaatataatgtactggtaagtgatgatctttaagccattgtagaccatacattggagccaaagcttccattacttccggtttaaaacagccagatagtggcatgaatattgctgcaacaatgtcaccatttctgtcacgtagtattgcaccaaggccagaagtttaattaagtttgttaacatctgcatctgtgttcaatttcattctgcctgatggagggttcagccatggttgattttttggggcagaagccgagtgttggatagatgttgcagtagacgatttagtagcagcccgtgccaagtgatattcctccaagtaattcaaagaaaaatagagcaaaacatgatgtgactttggttttgtgccatggatttcctaaacacaccaaagagttgcaatgaattgtaaatcatttcatatattagatacattgagtaataattcttttagactcatttggcttgaaaataaattattaagagagaaaggagaatgtttccaaactttcctgggtcattggcaaaaaataatgcatggttggttgttcctttatcatagcgacacaaagaacagtgaagagaatcaacaatatgtcttttatggagaattgcagctactaggagacattcatgaattacacgccatataaaaatttgcacctttgagggggtggaaagagactagaattttccccaaaattgtgaagtatgagaaccgaagaaccatagggtgttaatcttccaagtgagtagcatgaaaatattcagatttgaccgtgtataaaccattagattcatggttccaaatgtaatgatctgggtgagagtacaaggttaaagggatgctttttatttttctacatcagactgaatgaatagagtcttcaacaagggagaatgtgagactttcaagcttctgtcaatgccattaaagattaatggcttgaaattagacatacttggtagccaagaattagtagcacaaagtatattttgtccatcaccaactttccatcttaagcctttggatatgagttctttacccaaatgatcccttgccaagtgagcgaagggtaagaaccatgaccaacatccaaaaaggaagaattcttgaaatatctagccttaagaattcggttcagtagtgattctgggttggaaaaaatcgtccaagcctacttagctagcaaagcctagttaaagtgcataaaacttttaaatcccataccaccttcaacatttgcttggcatagtgccttccatgtcttccagttaattctcagttaaaaaattaaaaagtaaaaacaattatatagaatatgtttttagaaaatattttaacttttttaattaaaaaaaaaaaccaaaaacttaattaaaaaaatattaccaaacacattcataaagatatataatgtttcaattatatatacatattcttatttattaaattttatttttaattaatgtagaaaaatatttttaaataattttttaaaaccatataaaactaacattatgagtgtaatatttattttttcattgtcaaacaaactcattttggtcctcctttatatatgtaaaatataaagaaacaattgataaaatattgttttttcatacgttgctgtattattatttatttatttagtgatttttatatcaaaatttttaacttttttattttttaatgtaagaatttttttttccaaaactaccacgtaagttttatactgtgtactgt

SEQ ID NO: 233554 - DNA, 1272 bp, Cannabis indica
agtgagtccacgtgtcatttttataggagtctggtctcgagtatctaggggagaaattctcactataacacatgcgcctagtttcgagactgataacttatgtcatgagagaaactataagcgagaggcaggcaaaagggtgtcacgagatggtgacctttggttgtctaattgagggtttcaaaaacatggctgtaagaattttatttaacccatttgggatgccacgtcatcaaaactcttcggagtccgtataggcgtggttatggataaccattggattgtgagaccttaggcattctcttgccacgtgtctccatcccaattaatgagggataatggtattaatgcttctaatacgaatgatccttcattttttcccgctcatttttgtttctctttctctcttattttcaaaacctcaaaaccctctttcacatttcttcttttctttcccagaaaaggtcttggaggcttctgattcttacagaattgactgaggaaatatcgacactttcaaggttagtgcgaaattgtttgcaacaattttccttttatattgaaaatcaatctatattttgcgctttagaaaatgcatgagataatattaagtacatatagcactttatttgccttcgatcaaaactggacatttctctgggaaatatggacctgaaacttgagtaatcacaggtttcagaaagagcaccttaagtattcgcatctttcttgttgagtattctgaatactcgcgagtttcaagatgaacaccgtggatactcgcatatacatttgaataatttagcaaatctaaaatttagcaattttaatccctgttagaacttagggtttatttttagccttttgatttatatatgcttttgttgcgaagactggatgagtcttttgaatggtgggtgtgtcatagtaacttaatgttcatgcgagtgtacggatgttccttggttcactgtgatacacccagccatttgagacatgcgaccagttttgacttttcttgctttttagtcgcatgttggaactgaccagatttctcaaaatggtggggtgtcccagtaactctatggccatgctaaaaacgcatgccccttgggtcactaggaaactcccagccatttttttaagacataatgttagttgcgcatgttcaacttataccttgggaggattaaatgagttctcaaaatggtgggtgtgtctcactaccttaattctcatgtagcggcacgatcattatgttattgagataca

SEQ ID NO: 233555 - DNA, 1172 bp, Cannabis indica
gcataaaacccaacacttcctttttatatagctccaataatatatctgaaaaaaaaattattagcaattaaaactatagtgaaagggatgcataattaattaaaagatggtttaaaacttacgtgaaggtaaatagtgcaacccaggagataatggaccttgcccttagctttcaaattattaagtcgttttttatgtgcttttagattctcgtgtaaaaacttaaagatgaacgaagcacagttcaacttctttatccgcccaacatctaagagtgcatttatgtactcctttcttacgtacgttccagatgtgggaaccaagaaggatcccaatgctaccaacataaaatgtgcaacgaacaaaacatcagctactttgtgtcaatgtcaacataatcttcaaagttgatgtcctcaccacaatcttcgattttcataattgccttaaacgattcaatagtgaaaggataagttaccccatcttagactagttcaaatttgtcaagattcatatggttgtacaagtaccatatgagggaaatatgcactgacagaatttcttgattaaggagggacccgaagcctatatctgaaatgactttattttgtgcttcgttcaaaccgatcacaatttctcttaatctttctggattgcatttatattggaccctacaacgatcttcgtcattgtcattctgtaatgttggctccttaatcttttcttttgcagtgatcttccctgcaattattgatgattttgtttgtagtaaacgttgcagtgcacgttcaagtgagttgtttatatatttttcctgcaataatgtaaaagatcaaattatttataccttttacacataggtcaagtatatctagcaatacaatacaatgataataattatgtgagagcacacatttacgtatacatgttaaatttacctcattcgtaattacatttttccccttatcagaggcctttgtgcgcttagcatttgacttgtcatcatccctgacactgtgcttcccgaagacatctacaacaaacatttaaatcaataaaactaaataacaacaaacatttagcccatggtgcagagagatagtaaatactagatccactaaataaactaaatacaaaaaaaatgagatagtaacaaggatgtaaaatcactt

SEQ ID NO: 233556 - DNA, 1278 bp, Cannabis indica
ctagaacgttcgtatgatagtactattgaccataatattagcctatactcggtactctactcgtactgatgtgatagcgttaatcaataattagcccaacatatactgtcgatattcagtgcatctctatgtatactaatatcgctactataatatatctaacaggcattcataaacatgcacgctaaacatgtaatcacatatgcatatcattatactagtcttacttatatcttgaattcaggtgtgccggtcaacctgagtggaactgctgctcgataatttacaggccccaagagttgctaccttcaatccctaagaatttacccacagaaaaaaccttctcaattgttgacgacatgcaagaaaatccaagctcctatgaatctaggtgagaccgaccccaagagagagagaaaagagactttgtgtttctaatttattctaaattcaatctcaaaaattatttccttattcagcataacattaattaaattaatggattaataaaaatccttttgtcactaaaaataaactagggtaaaattactattttaccctttgcttcaccaagaagtaatcttgccacttaagggtattttggtcaaacttatgaccctaaatattttcgacattatcaatgtctatctaaatcgtcccgctattcctaaaatatcaaactaaaataaaataactttataggacatacgttgcattccactgttattgggcataaaataagaaaattgtaaaattcataaatagcataattagcatacctaaaattcaaatatatctccttattttcataaataataattaaaagtataaattctaaactcaacacatgggtgggattcgaaacgtatttccgtgacataaaaacacgagatacattatgaacggatgatagtgttggaggcaaggctatacagtaagcttccaatctaaccttttcaagaatctcaaaaggccctgtaaatctagggcataactttccctttttcacgaaacatttaatctccttcattggagatactcgtaggaagacatgatctcccacctagaactcaacattcttgtgttttggatttgcatagctcgtttgcctactctgagaggcaagcattctaacctactcctctattgcctcactgttctactgtactgattctggagttaaatatttcctttctccaatttcatcccaatgaattagagatctacatttcctgccatcaaacatctcataaggagtcatccctatagtactttgat

SEQ ID NO: 233557 - DNA, 1020 bp, Cannabis indica
gaaacacaaaacatatgaaaaacattaaaaaaaagaaaccggttaaaaaaaagagtataaaaactaaattacaataaataaacatttgaaaacccatttcataaagaaaaaaaccagctataaatagtataaaaactaagttagagacaataaacttttgaaaacccatttcttagagaaagaaacaagttaaaatacaaaaacaagaatagaacataggaaagctactcaccttcttcttctttgcacgagattttttaaattttggtttcttagaatcattaactggaacctcagaaccggttccagaatcactacatactgaatgaacattaacaggcttatcagaatcaacctacaaagacaaagacaagattaaaactggttataaaacagttataaaaacgacaagattaaaacaaaagtattattaaaaaaaagaggaacgtgaattaacaccaaaaaatgaacaagaaataaacaaggaaactagttatatacctaatcatttaaatttttggacacactaataggttgaggaacatcctgcagttgaatagatgaatcaacataaggaacaatatcctgaaaacattgatcagaaaataaacaacacaagaacataaacaacaagtatgacatagaaaacaaataaaaaaagaaagaacataaaaatttaaataaatacctttattacttcagccctctttctttttttcacataaacaatactatcagctttcttatccatgatattaaacctaaacaacacaaagtatacagagaaagataagcaagtaactaagtgcacataaaagactgacaataaacatatataaccaatcaaaatgtaactgccaacccacatcacaaacacaaaacaaaaagaaaactgccacaacatggcaaaaacagttaccacagccactaaaaacactaacaaataaaaaaatattttaaaaaatgatttaaaaaaacaagatcaaaaacaaaaaatcaaaaaatcaaaatacaaaaatc

SEQ ID NO: 233558 - DNA, 531 bp, Cannabis indica
tagttgatcttaggtcaattgatctgaatcttaagatggttaagttctaacttaattgtactatacgcgttctttgacttgtttgttaaagctgaccaattggaccgacccaatacttacatcttgagaactcaatagtttaattgagtgggaacattaatatatggaatctatagcttctaatagaagtaaaatgatggttttcttagtgcttagttaaacgcgtttaaatgattgaggcctcatttcagcaattatattagtttcttgaaatatcatttacaagtagctaagtattttaaggataaaattaattgaagggtaaaacggtatttcaatctctattcaatgtagaccatctatagaggattattgattgtttagattgtaataattgataattcataacatatctatatttagtatgtagagcattttatataatcaagaggcaagtctgaatccatagtagagccaggaggaattgataagctaggaaatttacttggtaaattttggatcttcttatta

SEQ ID NO: 233559 - DNA, 1206 bp, Cannabis indica
accacgtaaaaagtcttcatctcgctttcgtacagctcattattatattcatattttattggttgccgaaaacctcggtcaacaggttctgatcctaagttcaatgtgaacttggtcatacttaagtttgaaagtattgtcaccaatctttattgataataagaataagagatatcaatctcaggagctacaaggaaataatcacagcaagtcatccatggtgtaatctctcaacattcattaactcactaacccgagccaacataatcagcaatgttgctcaatataatttcccaatcatagctctctctctctctcagatatctctctccatttctcactctaacgtattgtgtctctctcctttcttcttcttgtgtttgacttcttttccccttgtgaaatgagaagagtagtagtctactttatataggccaagagacccaatatgcaagttgtcttttttgatagttaagttagttaaagactaactaactaatcgactcgtggttgggggtaaaaaggaataaagatataagtacactctaacaatttaaaaattagattaatttaattattaaaaatcacttttagtatttttttttctaaattttcattttcgtattatcttgtatattaaactcaataattatgttaattttattttatactttctaaaagttatttataatttttttactttttgataaaattttattaatttttttaaaatttttttctcttaatatttaaaatatactttattttaattgtatattttgtaagaatatatgaaggaagaacaaaattaaggaaaactagtgtaaaattaaaaacctaacttttaatataagataaaaatattaaattaggggtttttataaatttttaaggtgtcaataaaacattttgataattatgtatatgaaaagaaaaaaaaacaaaattactttgttaggctattataagcacacacgacattcatccaccatatacttgtatatatcttttttaataattgggcagctctctactttaagttcatgacaacgactttatccattgtaacgttaccttgcttgtttatctttacaacccatgtgtaaacaaaataataataataataataaaagagtaaatactattttggatcttgtgttttataaaagttactaattgaattctgtattttgttaaataacaaaa

SEQ ID NO: 233560 - DNA, 1163 bp, Cannabis indica
cttcagtggtgacgggcaccatggattctaccgtcagcaaaattgggcattttattgatgagtacttcatggtggacggcgtgggcatcacccatactcggttccagtagattccaacatatcaccgccctccccttactcttactcttagggatagagctcaaaagcttgctcagttgccgatggaagaccgaaatatcatccaattgacctctgaggataactttgtgaagtacgggctctatctaaaggatttcattcctaagccattgaaggggaggaaaaagaaatgtggtgctggacgggctgaacgagctcatccggagaatcagctgattcaactgaagcacgaggctaagttgaaaggaggtgaaagggccaagcaatatgctcaggagcccttgaatcctgaagatgaagccgaggaagagcaagtgactccgctcaaaaggaggaagaaacttccagccaagcccaggcctattgaacatgcaattcgcattagggagcctagttcccctgctcggccaccttctcccgtgcttggaaaagggaaagatattatgtctaaaataaaaagcttgtcaggtgatgactgacttttgagtcttgctcgggcaatcttgcatactactctatcttgtttttaagcttcttgactattatgccttatgccttatgcttctgaattctcttttctctaaccatgttatttttcttctgtgcagacatgtctcagaagattcttgatgctttgaagaagagaattggtggaagctccagtgcatctcctccggccaagaaatccaaaggcagtgagggggcctgtcctaaggaaaagacgcctgctcgggaggtcattgatctttttgaggagctaactgttgcaaacccctctaccccaaaagttgctaagtccaaggattctcgaggaggaagttcgaacaggcttgaataaccaaaaggtgggtctaagctgatcaagagtgggcccgagcagatgcgggcccctaccccacctttgccagtgcttctagaggccaaaaaaggcaaggaaatgctcgcccactatacgaaccggttggttcctgaggttagtgagcaactcgccagtgctgacaacaactcttctctagagcagctaatgggaggagtcttgaagg

SEQ ID NO: 233561 - DNA, 1431 bp, Cannabis indica
cgaaattcactcgacaacaacacttagatccaagaaaacaagctcttgcttccaaagctgaagatccttcagcagttcagtgtgaactctcctcagacaacgcagattcaaactccttctttaacctcttgaagattcactgaattttcatctacatataacatagaaataccagagaaatatttttccctagcagagcaagaataaaaaacgattttatcaaagatgagagtgttagttagaaaaagcaacaacaaaatattatttactaagttgaaagggaaacgactcggctaactaacaaccacagctgagtccagctggcactgactcaaacaagaaaagaatataaaagctgaaatctgacatgtcacataataaaagtcaccaagacaaaacaaatgaaactgatgacaacttatatgaccaatgtaaaaagctaagacatcaaacatggaaagacagaaaactgaacaaccaatgtaccacataatttgcgaaacaaaaactattgcacttacagattaaaagttgttttctttaccattttattcaatttttattacctcaaaccaaacgtcacctcataaactttaccatcaacttttgataacttcccaaccatttatattatcaatagtgtttatcacttaatgaattctcttaattatgaaactaagcaaaagggtaacaaagcaaaaatgttgtttacgaaactgagcaaaaagctgatgaagcaaatattgtttatgaaactaaataaaagggtgatgaagcatatgttgtttgtaaaactacgcaaaatgacgatcaagcaatttttgcttacaaaattaaaaagtggtgatgaaacaaatgttgtttatgaaactaaacaataaatgataatgaaacaaatattgttgacaattgctcgtgtaaaatcataaaaaaaatggaaaaacaaatagaggaaaagaaacagcctaagaaaaacatacatatgaagaaaaaaaaagataagtctatccctaaagggatttatttaaatgttgggaataatatttttccaataacaataataataattgtgtaaaaatttctctttccttcttgttaatttattttctcgattttctctcaataaaccctagatttatattgagggcttgtcaagatgaagattgtagtttcatattatttatgtttgatattgtatccttaattataatatggtgtggtgctttttattaagtttggctgaaccaccgaagtgtcatggtaagaaaattgaactcatcaccaatttgtgtattaatatacaaatatgtcattaaggaataaatattaaattaattttcttttttttttggctagaattacaaactaagcaaagggaaaaaattgataactctccgtggataagatgttgactctcctataggtggctca

SEQ ID NO: 233562 - DNA, 1367 bp, Cannabis indica
caaaataatgaatattatacattgatacatgggcaaagccacatagagcacaagtagggcggttgccccatctgaaatttgagttagttctaagttatttggagcttatacctaaataaatatttttgggtctttatacaaataccaatctgctcaaatagtacttaatattattgtttggtgtagtggtaaaggtatatttacaggtcaaggatgtcacaattgtgtattattttatactttaaatttttattaaattttagtcacataatataaaaataagtattgctattaagcaccatggcatttagcactactatgagtctatgaggtagcaccctatacataattattggttttctataatcattattaaaattaaaataagtgagattcgatattaaattgcaccaatagcttatgacacttcatagagggcgctaggcaccatagatgcccttaagcatttcactataaaactagataatagcttcatttaaattttatttgcccaagctaataagaactaggattaaacattacactaataagaaaataaaactacatgagttgatgcctgctgtacctggagtgagtcctcagtgtagctctctttgactttatttaagtttgatatctccattataacagagcttccagttgaataacccagcttcccatctagtgtaacctttgcactaggctcaaaaacaccagcattagaacttgatccaaacacacttggagcaagttggctgcttggagaatcagacccaccagaagctgcagtaatgctgttatcaaataatggaacaatagcccaggcaaaggactctttgtaaggcattatttgggaccacacctgcaatttttgcttctctctctcagtcaagtgaacctatttgggtggatttaagttgttagttatataaatgagaccaaattagaacatggatactacacatgagctgaccccacccaaataaaatatagcataattgtctatttcagctgaaaaagaaagagagttagttttagttgtcatacattgtctgtctccactctccacaatttactatagattccgatcactcaattttttgtgatagatagcctatcaacattgttagacaaatgaatgataaagcaaagctttctttcttccttagtataattagacaagtttcatgagagttatattggataacaactcaacattataaatgatattttcatgtcttaatgaccattcaagctttgaagataaaagttgcagcaacatgtcttatggcgtcaaattcttttttattggaaagaaaaccttagcatgtgcatagccaaattccatgcactgagactcgtagggt

SEQ ID NO: 233563 - DNA, 1391 bp, Cannabis indica
taccgtcaatctcttattacaatttttcagtcaattcggatgccataaatacatgccggaatatttcttgtagtactttttttttttttaattatgttcgttatagttataatatattatattttttaaaaattttgaatggtttataatgcaagaaataaatttaaaattttttaaacaatcatagtagattataatagaaactctatttttagtattgtaatttatttaaaattttttaaaaatttatagaaataatattttaactataacgaatattaaataaaaaaaaatattttaacatcattctctatatatatataatataatgtgattgatcataatgtgattgatcattgatattgatatgattatgtatatcactttataacattagtagtggaactttattaatgttacatataatataatgtgattgatcataatgtgattgatcattgatattgatatgattatgtatatcactttataacattagtagtggaactttacttttcgagatacactcagtttttgaccgctatgcagtgctaaattcgtaggtatataaaatatatcgtagtgccaaattcataggtatatgtaatatatgatagtgctacgtggttgttgatgtggtattagtgtttgttttttcactctaaagaaaaataggtaccccggcataatctgtctaatttttatcttgtcgacaaactgtctatcttaagttcacacctaataaaaccacttgagctaagtggctagctcaagtgactataggtgaatgtgtgttagaggtcttgggttcgagtccaaataaaatataattgtaatatataaacgctcaaaaaaataaaaattcacacctaataatattatatgttagcagaattatgtatgcgctctcatctttacttataaattaatttggcttagtatacatgtagaagaccaaactaactttaatagaaagatatatttctatatgtaggaacgtgcattgaattgtatgaaagttagtatcaagactctagaaaaataaatatgaagagttgattttattgtttaaaaaattaataatctcagtatataaatttatatatttatataaaagagatatgagtcgataacataatttttttagatagtactatttcttctgtaataccccagatttatgaaatggattagcaaaaccctaattagataattatgaataattgaggaattgtataattatatagttcaatatatgaaaatttatttgattaattatatgttaagaccccgttggtgagtcagaggcattttagtaattatgacctgagaagggtaacatgatgaaattaatttaattacgtgtttaatagaactatattattatatag

SEQ ID NO: 233564 - DNA, 779 bp, Cannabis indica
aaaaaaaataaaacgtacgtttattttatgtcttgaaatgtacggctctttctcaggtcactcgtttaacttgtggtggattcttgttcgcgctaagcttaaaccacacaatgtgcgacggatttggattggcccagttcttgaacacaatggcagaaatgatacgtggtgcacatgttccatctatccaacctgtttggcaacgagacatctttaacgctcgaaacccaccaagaatcacttgttcacatcttgaattcgaagatgtaccacttgtgtctcctatttccgaatgctcaaacatggtgctggacccaaacaaccacattcaacgaccattctttttcagtctatatcaaataaactcccttcgaaaacaacttccaccacacctagcaaaaacttgttcacgatttgatttactcactgcatgtctctggaaatgtcgtacaatcgctcttaatctaaacaaaaactgaagttgttcgtttttcctgcttaacaagtatacgtagaaagaaagaggaaatggagaaattaggttgccattgggatactacggcaactacttttgcatacccagcagcaatgtcgaaagccgaagttttgtgcaaaaagcgtctttgggtgacgttgtggagtttgagtcaaggaaaagcgaaaagacaaagtgaacgttgagtacatgaaatcagttgcagatcttatggtgattagaggtcgaccgaggttcactgaaccgtggaaacttcattatttctgacaatactcgtcttggg

SEQ ID NO: 233565 - DNA, 1105 bp, Cannabis indica
ggtttacttcccgagccagttttcaatagttttatttcagtcctcgcttcctctttacgcacaaagacttgtgttctttcattgaaattgtttatgttcctcacagggcgaccctggagatcatcccataactcacctcatgttgtagataagtcagtggtgatccttgcttaaagtgttgttagttgaatactatcattcaagtttttgacttttacagcatccgtactgaagcgacttgaccacgccttaagagattccccaggttgttgctttatgttggtcacggatgacacttcaggtcgacgatctcttgtagcttgaaactgctttttaaattccctcgatagttgttcttaggatgttatggaatgatgggtgaatttatcgaaccaagtgctcgcatcccttcttaaggaggttgggaataaaatgcaatgcaagttattgatacattgctggctcgcataatagtgttaaagttgtttaaatgagtgattgagtctgtggtcccatcgtactgcgagacatgtgggttcttaaatccctgaaaaaattttgaatattagatatcttgatggaatggctcagttttcttgtttgagtcatattctggcaattttccatgctctccatcttgatatttgaatttgtcctctagtttaattattcgtagctggatgggatccacttgttgctgattttcattttgattaacttaattgcacaaatcaagtgcatttcggtttaaacgctcgtgaaggtcaggctgtctttgatttgggtgcacgcgaaggtcatgctacatttgttcatagttacttacaaatcttgtctctgagtaactctcatattgataacttcgtgagttacttatgctttcttgcttctttattcatgcgagatgattctggcatgtcaattcgttcattcccttggtcagcaaatttatgagaagtttatggaacatctcgttgatgttcttgattcctcgtgttattaggatttggttgctttgtttggtccataggagcatctctggtattcccaggttgttcctcctgggtatttgggggattctctggtatacatcaatattattttc

SEQ ID NO: 233566 - DNA, 812 bp, Cannabis indica
aactactctctctctctctctctctctctctctctcctccccccaatttgactctaaggaaagcataagaaaccagggtttctccatcagtttttagtgagttctagctaaaattctaggggaattatcaaaggtaagatcctactccttttccttaagttatttgtaagttttctttaggttgaacatgtaatttttaagatttggttctatttgagttggataagtgtggaattgattttctaggttgattttgtgttgtttaaagtgtagttgtgataaatttacggttaaattgtagttttgagcaagtttgagttcaagagctcaaacttggctcaacaattgtgatttttgaatttttgtgtattttgtggttctgttgtttggaaatggtctcttatgatgtgattaggtgatctggagcttggttttaagtttgggattgttttgggcaagatttgggcttttgttgttttttgtagcagaaaacggcaagctgtttctgtggaaacgttctaccattttttctagcagagaacctagaaaaatggcttactgtttttacaaaaacgacctgccatttttcaggcaattttctcgtagtgttgttttttagcgttttctcaatacgtagggtttagtcatgctatttattgataggaaaactttagtttcaagtttaagtccctgaaagtgatttagtagatcacttaccaattttacgtaaattgtgacttagggctttaaatcaacaagcagtagtttccactcagagttatcgacatgcttgaatttagaatcaaggtaag

SEQ ID NO: 233567 - DNA, 649 bp, Cannabis indica
acttcaaatttcttatattgataactaatcagattgtaaagagtttttatttagggcataaaacccaacagtcgcttccattctcccagagggtcgtacaacatactcacgttttaagcttccacttgatgccaacgaaacaacctcgtgttccgttagcaaacaaagttcccttgcaaaccttctacgagcatcgaaattaataatatgggatgtggctccaatgacaagaaatgctacgagacataaatgattcagacacaccttttggtggaaaggtaattatttttggaggagattttagacaggtattacctgttgtccgaaaaggaacaagacaggagcaggtaaattctagcttggttcactcatacttgtggcccaccttcaccaagttccacctaattgaaaatatgagagcaagactggacccaatattctctgattacgtattgtcggtgggcaatggaatgccaccaatcaccgtcaatgacaccttacaaatcccaagtaatatgctcattccttatcacgacgacaacacatctttaaacctcctaatagaaaatgtcttccacaacatccatcactacccagaaaatgtgtctaccatgatgaatcgagctatattaacaccaaagaactcttt

SEQ ID NO: 233568 - DNA, 1323 bp, Cannabis indica
ttaagtggaacagtgaaggctcgagctaatccaagatctgcaattttaagcatcattgtcttccgatccatgaggagattgtgaggcttaagatccctgcaaaggcaaatgtgagtacactcacgttttgaaaagagaataacgaaagagatggattttgacctgtgtaagatcccatgaccatggcaaaaggctacacctttgcaaagctggaacatcagagtctgcaaaagaacaagttcatttcaatttttttctactgaataatgaatgaaaccacaaaatacatcaagaccataggaaaatgattattactttgacaatatcgagagggactttgtctgtagtttgacgaaaagaacgaatgaatttcttcagatcagtgtccatatactcaaaaaccaaatacagaactgtcttcccttccttattaaacccttgtttcacatccattaacctaattcaattcaaacaactgaaaatcaaaaaccctaaatcttaaaaaaagaaattaaagaaagcaaagaaagagactttacctaacgatatgaggatccctggagagcattcgcaagatggagacctcacggagagtagtgggaggaacgccttcctcgtcctcatggagacgggttttcttgagagccacgatctttccagtaaccttatctcgagccttatacacctttccataggttccttctccaaccttctctagcttctcgaaagcatccatggccgatacagtggctgtggcttccagagtttccatcttcggattcttgggagggaatttttaccgttatcacaacgcaaaggtgtttttcaattttcaaattcaaatatgggatatattacctcctcggtttgctattcaaattcaaattcatttcttattttaattttagttaattaagaattttgcccttaaattttaatatttaccaattcatatcttttgaattttttttcttattaaaaatgttgacatggttgaattaaatattttttttttaatttcattcaattttactaaatcaataattatttatatactaaattatgtttcttagattttgatatttactaaattatatctttcaaattttgatatataccaaattatggtcctgaattttaattcatgttaaacttccttactaaaattaaacaaaatttctttaaaaaaaaattgtgtcaattaaaaaaaaaaatcttatcattgtatttcaataaaatgtgttaaaaaaaaaatactcatatctaaactacaaatcaacatatatacaaccaaaaacaattagcaggaagaaataaaaaaaa

SEQ ID NO: 233569 - DNA, 946 bp, Cannabis indica
tttttttcagattttaaaaggcaataagaagttccaatggaccgaaaaatgcgaggaggcctttcaagccttaaagacgcatttagggcaacctccaatcttgtcaaagcccatgaccggcgaagtcctatccatctacttagcagtgtcagaatatgcgattagttcggtactaatacgcgaagaccaaggacgacaatacccggtgtattatgtcagtaaacgactactagatgctgagacccgctatccccaaatggaaaagttggcgttcgctatgataatatcgtcgagaaaattgggaccctatttccaagctcacagtatcgaagtcttaacaaactatcctttgaggcaagtcttagcaaaaccagagacgtcggggaggttgttgaaataggcgatggaattaagccaattcgacatcaagtataaaccaagaactgcgatcaaggggcaagccttggcagattttatccttgaattccccagcaccgaagtggcactcatagatgacaaagtcgacacttctataaccaatggagaggcgtggacgttgtaggttgatggaggctcaaatagcgaaggctctggtagcgggatcctattaatcagtcccggtaattttaaggtacacgctgctttacgttttgaattttctacatctaacaatgaagccgagtatgaggctttaatcgtagggttaaagctagctctcgagatgaaaatcgagtatccacaggcttttagcgattcccaaatcgtggtgtgccaggtgaatggagaatatctggccagaggcgggaggttggttaaatatttagccattgtatgcgagctaatgcagaaattcaggaaagtaatcgtgtttcgagtacctcatgctcgaaattcacacgtagacgcactgacccgtttggcctcaactagagaagccgaattgctc

SEQ ID NO: 233570 - DNA, 817 bp, Cannabis indica
atttatttatctgctagggttttgatagcggtggctgtgagtgtttgaaaggaaaagagattatatatatgtgataaatgctttagggtttcagaacatttaatatacaacctgtagtacaattcaaaatgggctgtcgtttttcttaggtgcttaaatcacagagtcaaaaggtgggtttgagtgggtgtaaaaggtcttaattgaccttggctttaattgctttatttgctgtgtgtagggtctgttagggggttacaaagcagctacactaagtaagctcacacgtctttttttatgctaactcaaaaactcgacgaaggagttctaaaaatgcaatgttagattttgtatttataattaatgcattgtacgtgactttcactttctttaggtgcccaaaagtataccaaaggagccttttctcagttgtgtatagttccacttaaaaatagctcatgtgattggagagacaacaacagctcgatgtggttattagaggtattagttagttcctagaaaatttcacatttaaaaattcacaatgattccttagttatatatatgaatgttattgccattaagaaatatggctttagcaaaaagaaaatgtggtgtgctctgattgtttaacagctattcaggctttggcaaaaagaaaatgtgtgcctgactggcagttttttaatatttccctagcaattttagacttagttaatagttttagactttgtaatttcagatatgttaaatcgctcgaacatggtttatgtcgatgggttggccaaaagtgcgagaacttctgcactttcagctg

SEQ ID NO: 233571 - DNA, 2335 bp, Cannabis indica
aagggtattttgggaaattttaaagtcccgaccaatcccgacattcccaatgtctaataaactgtcccaatatactaacatgctaagttgtgattctactgagccaaacaccgagttccatgttgccggcaccgaaaatgcaaaaatatgaaatcttactatatgacataaaaatgcattcggaattctaaaataatagcataaataattatttaaatatctataaataattttcataatacatcataattaaatgctaattgccaaataaaactaagcggtctttacacatatattagaggcaaagctcttcaagaattttaagatgcccaagatggcaacatatacgggagactcggaccctagtgatcatttatcccgtttcaaccaggtgatgaaagttatgagggccaggaatgatgccaagtgtctatgctttccgctaacattaagttgttccgctgaggaatggttcaaaaagttggaaccaggatcagtggactacatgaacaagttgcaagttagcttccggaggtagtttgtcacaacgagaaagattaatctcgaagtcagccccttgactaacataaaacaattgcccgcagaaaccttgaagaactttataaaaaggttcaaagaggaggcttcaaagaccaagaaggtggatgacggacaacaacttgcacttttccaagctgggatccgtacggagaccccattctggaatgaattacaacaggagggagcagtcaatctccaagatttccaaaagagggttcaaaagtacatcaatctagaagaaagagtggcctacgggggatactatcgaaccggaatgtcaggatacatactcagagctcaactctcgagagccatgcccccggacactcctcaaatgagagacatacaattatccgctacaccaggttataatcagagcctagccttggctcccgcatcatcacactttgggaatcccataaacaacccctcggggatgagtggtcaagctccgtctcagttcgctcctaccgcaagcctgacaggacctcctcagagctcccggagcaagaggtcctcaaagggtagcaacgagacggaggataagcgacaacagaggggatacacccctcaatatactcaatacatggagctcacggaaacgcacgagcgggtatattttgccataaggcaaaatacacattatcggaagcctcctctcctgtacagggatagttctcgaagggatcccaggaagagatgagaataccacaacgacattggccattgtaccaatgagtgcaaaaacctgaaggacgagatcgaaaacttaatccaattgggtcatttatatgaatggattaagaacaccctacccatcccaacccggttctagtagggggcccgttacctcaaggggcaccaaagggtgtacccggagcaccagcacccgttgtaccccctagggaagcaatccctcaacaggtccctgggctcccaccaagacccaatgagagagtggccatgatctccggtggaccccatattggggggaccaccagaaaagagttgaaacgttacgccggagccataaagcatgataaagtgtgggtagtcacccagcttcaacacaaaggccccgactcatggaccagtccattactttcacggaagaggacgccaaactgatgagtttccctcaccatgaccctctagtcattgagactcccatcgccaataaaattgtagcaagaatattcatcgataatgggagtttcgtgaattagttgtttaaagaagccttcacggccataggcctcacggacagagatttgtcgcccagcagctcccagctcacatgattcaatgggacaacacttatcccaatgggaaaagtcagactgccaatgaccatgtgcccggatacccctcagagtacttttaaatactgcacctttgtggtggtagatttcccaaccccatacaacgccatccttggccggccggccttgttcgagttcggtgcaatcacatccattcgacacttgtgcctaaaattccccactcaggaagtcagagtagggatcgtgaggggaaatcagggagaggccaggcagtgctataatgttgcagcatgtttgccggtgcttgtggtctgtgagggcattgaattagcgttggtggaagaagatgagttggatcccctcgtgggatccgaaaaaactatagatcctatagaggacattgaagaagtacgagtgtgcgacctcgaccctaccaagatcctccgcctgggaaaaaacctagagccgaaggaaagaaacaaaattattga

SEQ ID NO: 233572 - DNA, 1970 bp, Cannabis indica
tccattttattatttctttacttggtatcagagcggtttggctcctgccatgtcgactcctcaagatcaaacatcatcaacaaatcctgaaaaccaggatcaaccagcagccactggacagattcagacagctccgatgacagcctttgtgcaagctgctcatcctactccggttgcgaatcctttcagcaacacgttgagccagccattttctctaaaactcgatcgcaataacttccctctttggaagaccatggtgactaccataatccgaggacacaggttagaaggatacctgaacggtgctcgacaagccccacctcaattcctaccatccgaagttgcagcagatggaaccccaggacctgacttcaatgtgaatccagaatatgaaaactggcttgtctatgaccagttgctaatggggtggttgtatggatcaatgacagaaggaatagctgcagaagtgatgggttgtcaatcggctgtagcactatggagtgcacttgaagaactctatggcgcctattctcgtgcaaacatggatgacattcgcaccaagatacagaccacacggaaaggaactcagtcaatggcagactatttgaaacaaaagcgcatgtgggccgactcactcgctttagcaggtgacccctatcccgaaaaacatttggtttctaatgtcttgtctggtcttgatgcagaatacttgtcgattgttgtgttgattgaagcacgtgaacataccacatggcaacagttgcaaaatatgctcctaagttttgatgggagattggagagactaaatgctgtcaataccaacagcaggttgctaaacaatccatcagcaaactatgctcaaaagccctctggatccaacaaccaacaaccatctgggatgccacgcagagggtattctcagcaacacaacaatagaggaaatcacaacaacacagggaacacaagaggaggaagtttcagaggtggtagaggtcgtggaggtagaggaaatggctctaaacccacttgtcaagtgtgtgggaaatatggacattcggctgctatctgttataacagatatgatgagagtttcatgggccagcaacctaacaatgaagctaaccacgacaagcaactttcagcccttgttgctgcacctgaagtcatcaatgatgacagctggtatgctgacagtggtgccaacaaccacttaacttcagatccagaaaagattcagaacaagtccaaatatgggggtaaggaacaaatcacaatcggtgatggcagtaagcttcctatattacatgttggtactggttttcttagatctaaaaacagtcctctagtgttacataatatgcttcatgtaccttctatttcaaaaaaccttattagtgtctctaaactaacatctgataacaatgtctcaatggaattcttctctgatatttgtgttgtgaaggaacagccaaccgggagagtggttctgcaaggaacacttaaggatggtctttaccaactacatccatcaagatcatcccactcatcaaagtctcagtcgcatcctttagcttttgtatcaagtacacctactactagtcatgtttttccaaattccctaaaagatatttggcataggaaattaggacatccttcaaatgttgttctgaatcaagttttaaagttgtcaaatgtaaaagttcctttaaatgaaaatcaaagtttctgtgatgcttgtcaatatggtaagtctcatgcacttccttttcctaattcatcatctagagccaccgaagttttagaacttatacatacggatttatgggggccagcccccataacatctcatacaaatttcaagtactacattcacttccttgatgactttagtaggtatacttggctatatcctttaaaaaacaaatcggatgcactagaagctttcattcattttaaaaacatggcagaaa

SEQ ID NO: 233573 - DNA, 753 bp, Cannabis indica
agataacattgatgatattgaggaggaggtctcttattggaaatcaacaattgtatgttatgtattaggagctaatcccccattagaagtgcttgaaggttttgctaggagaatttggaaagaaaaagtggatagggtagggctaatttcgtgtgaaattttcatcatcagattctcatctgttgaagaaagggatgctgtattgaatggaggttatacattctttaataaacgaccagttatcatgaaagcctagaaccctgatactaattttcgaaaggaagatatcaggagggtgcctatatgggttcaactagagcaactggaactaaagtactggggtcagaatactctgtttaaggtggttgggcagataggagtaccaatcctagtagatgaaataaccaaacagaggcagaagttaacctttcctcgagtattggttgaagtgcttatgaatcaagagctgccagaatttatagagtttgaagatgaatatggaggaatggcaaaagtgggaatcaaatacgaatggaaacccacagtttgcaacaattgtaggggcctgggacacaagactatggactgtaggaagacacaaggtactcagaaacaacagcagtgggtcgccaaggagagaaaagagcctgtacaggtggaaaaaccagcaaccactgatggatttcagctggttagcaaaggtggtaaactgaaagggaaagacaagaaggctgctactagtattgagaattc

SEQ ID NO: 233574 - DNA, 1518 bp, Cannabis indica
attaatttttgattaaaaacctatctgacgggaaagaaaaatcaaaatttataactcgcgtataaaattgaatactaacggtttacgcgagctagggatgtgtaaagcgagacatcacaacgtcttgataaagtacttaaacctagaaaatggatagtaacctaactattcatacgagtaaatctgaaatatacaaagtgatgaaatcattaaaggtatattcaagtttccttaggcagattataactgccataacgaggcagaactaacaactgcttgaaaatcaaaaagttttgtagatgactaactacttaaataggaagaatacgagcaatggaagaacccaaaagtacttaacatttgattaaaatatagttgtttatattgttaataaaaacgcaagcaaacacaattatattaagttcgaatgaaaagagtacaaggcatttaagataagagaaaacccaagttgggttacaaacttgtctttacaaaaatgccactaggggcaaaccattaagtcatcttcctaaacaaataatgtaaggggggttagtaaacttgagaaatatcgtctacacatagcttggagaatgatcagctacacataactcgagaaagaccatctacatgtagaaggtctcgacctctacatagacctcattctcatcatcaaaagattccatttcctacagcagagacctcattcccagcctcaggaaatttctcgataccagagagaggttggcacaaaggtcttctcgtgtaggtttgggtcttgggttggttggattctcttatagaaaccacgccaactttcctcttggattcatccgaaaccatgccaactttcctcttagattccttgtcagcttgaggaggacctctaagatccaaagtaagatccatgtccatgtctgtggagatagagataaaagatcaatggagcgacaaaaaatatatatataatcacttgtgaggatctcccataaaaatcaaaggggttcccttggtttggatttatcggaagctcctcagccttggaatctttcgtttccaattcaaattgagattcgaagttcctaggaatgtatagagaagagaggaagttggcaaattttggtgttatgaatctagaggaacaaatttctgaactcagatgagacatcttgacgagagaataatgatctaatctcaaaatggatctcaccgaaaaaccagaaagtgtgttgaatatggaaagcttaagccgtcattttatacacaaagtccagtgacaagaaggccaaaggttgggaaatctaacggttgggagtgggacagaagatgagaagacggctcataatgaccctcaaaactgtacaaccgccagaatcaaaggacgcatttttccaaaaaagggattatgaaaaaaatgccctcaataattattaaaaagtactttttactaaaaaaaaatttttttaaggggcaattgttatatccaaaattcggctaccatctcagtggaggacacgt

SEQ ID NO: 233575 - DNA, 657 bp, Cannabis indica
gagagagcttggtctctcgaatagcgagtaacttgttctcttatcactccaatatcaatattagctattatattcttcttttggctactgttgacacttaaatgataggaaattccaatcaactagcttattattttccaagatttgattcttcatattgcagaaattcagataaggctttgtgattgaatttctaattttttttgatgcagaggggcatatagcaacattgaaacacaatgaggccgagctttcttctctcggaatgggtacagttcatttgaccatttttatacatgctatatgttatcattgccatgcatattataaagattttgattttaacttcatttcaccgccatcgataataactattgtcacaattattgaaattctgaagaacaatgtactagctactaagaagagtaatgaacttgtatttgagatcccatttatatgtcccttaaacacttgatatagatttcttatttaatctttattattttttatgatgtgatttaaacaaagttttaacgttgtacattgatgatatttctactatagtagtagtgtttgtatggcctggaaatttgaggtatatcagatgcttttatttttgttctttacaataacatgtcttctatggtattatttgac

SEQ ID NO: 233576 - DNA, 677 bp, Cannabis indica
agtatttttgtaagtttctcttgattttttaggttaggcccaatgcagggactgatggaccaatgccatgtgttgtaaaaatgaaaacagaggttgaaggtaaaggcccgatataggcctgataccaccttaaattttggtgattttaacttagactcgaggtaagtccaattgaggacgattgtgggcttgatacctcttattattataattattattttttaaggtggttttaggtccaataaggggccgatagtgggtttaataggagacaataggagcccgacttctagttcaaaaaataaaaaatgtcccatatcaaactcactatcgagccctctatcaaaaaaaaaaaaaatttaaagtctaaactaatgttgatattcacataaaataattgtttcttcaatccacacgaaaatgagtctaattgtatcacaggatggatggaatcttcaccatagtagaaaacatgatgcaagtgagttttgaaaacaacactctttattataacaacaatattcttaaaaggagaacagtatttggtaagatattatgtttttttctcttcaagccaattttatagtacttgttctatttattatttacatgatatttttatagggatacgattttgtcccgtgatgtactttcacagaatgtattccgtagtacat

SEQ ID NO: 233577 - DNA, 665 bp, Cannabis indica
aagaaatgccgttagataggcacttttaatatataaagatatctgtaattatttctttatgtatgtataaatgtgtaaagttcccatatttcaaatccaattcaattcaatttgcaaaagtacaaattaaatcggttattttagattagttactttttaatatttattaataaatattttttctaacattactgacaacaaaataaaataaattattgttattttatatgtgtctattatactcatatttcgaacaacaatatgattttgacacgtgtaaagaaaccagctcgtgttataaaataattaatgcattcaataaacttgcttcaaaaaatacatgtggtagaaaataaaaatattcaaactcacctttttaaagataagaacgaactatgaataataactaccaattgataagattggtgagatgaacgatcagtttagaaggttcatcttgagaaatacaaaatacacaagagaataacaatgcttggaaaatataaataataaattatttacagagcttgcaactcattgactcatatactcacgagtatgctaagagactaatggtcacattcctagcatgattcatctcgaaattatcatattgtgatggtttcttgcgtttgcttcctccaatactaatagaagaatgcgag

SEQ ID NO: 233578 - DNA, 1236 bp, Cannabis indica
gctgtcgtaactcaaccacttgctctgctatatgctctgtgttttccttccacttcatttactacagatcccaatatatcacatactaatactcttgtggttgatcctattgatgctacatctatctccactactgcctcacccgtgatcaacaatgagtcatcatccactcatacagcacagccagctgcctctccacttgtccccaactcatcaccccacattccaccacctgtttccatctcaccaaatacaataccatcaaaccatataccaccttcatccactattcctgaacctataacctcaaataatcctaccacaacagtcacccgaactcatcctatgagaactcgatctcaaagtggaatcagaaaacccaaatcctatcttgccactaaacatcctctccctgaatctcttctaccaactgaaccaaaatctctaaagtctgccctcaataacccaaaatggctagctgcaatgaattcagaatttcaagctctcaaaaagcaaagaacctagacacttgatccctatgaaaagcatatgcaagtcattaccaacaaatggatccacagaattaagctcaacaaagatggttctttgaataaatttaagtctcgactggttgcaaggggctttcttcaaacacctgggatcgactacgaagatacctttagtcctgtagtaaagccagtaacagtcagaattgtgttgtctctaacagtcaatgccaagtggtctgtcaagcaactcgacgtgagtaatgcctttctaaatggagatctaaatgaagtggtacatatgcagcagccaccaggctttgttgacacatccaaccctactcatgtgtgccttttacacaaagccatttatggcttcaaacaggcccctagggcctggaatgagaagcttagacagacactgttacattggggttttcatggctcaaaatctgattcctctctctttattcatggctctggtgatacattagtgtatcttttggtatatgtggacgatatacttatcacaggtccaaatgcagatctcatcaacaccttcatctcagaattgaactgtaacaccctaactatctgaggcgtattacgtgaatttttaaaacgtactgtgcagctcgttgctaatcaacgaggtttatggaaaaacgtgattgattaaaattttgccttttcattaaacttataaaccattttacaaaagtctcgggat

SEQ ID NO: 233579 - DNA, 1351 bp, Cannabis indica
aaagaggttttggggtcaatttatttattaagagactttgtatggtctacttaataaataatataaatgataattttatttgataattaattataattattaaataaatagttttgacatttataagattgaatttaaaaatatgttattattgaaagaataataaatagttaaaataaagtggcaaaattatcactagagaatggtccattataaccggcctttgtgtgttatttctgcccaatattttattctttttttaatccatataatttaatcataagccctagttgaaacactatataagaacatgatgctatcatctcatccaactattgccttcaaccaaatcgaacctagttttctctgtcagataactagtaaatgagagacatcttctatataattttcaagcctccttcattgttcatcatactcggcctatagtgatagagtgtcatacccacacatagcaagtcaaaatactcaatcatagtgagtaagacggtggtaaccaaacccaaaagagagaaagagattcaggctcacattttgataatactctgcgacagaaagaaataagggttaaagatctgagcgcaaaaagtcatattattctgctgcaatcaatgtaaggtttcttaaactcttatgtgtttaatttcattgtttttcatatttagtatcagggacggacccacaagtaacaatatgggggctatagaccccactaaaaaaaaatattgccttttaaaaaattaaatgtaatttttaaaaatgataaataaataaacaaaaaaataaaaaaaaaaccccaataaaattaaataaatctagtaagagagataataattatatatataacaatgaaaatttttaatgataaataagcccccacaaaataaaaaatttgggtccgtcactgcaattagtatgttaatcaacatacttattagtaaatttagatcctgttaaaatattccaagcagtccatatatcagacaatattttgtttagagaaatttgcggccaaactcccttatgtttcatttgtttaacacttaacctccttttctttgtttttggtggaaaaacctcctttagtttaattctgtttgcagtttactgttccgtccatcccaaccatttacccattaaatgttgaattgccatgtcatactaattgatagggtggaaaagcaataagttttttcctaattaaaataaaataaaaccaaaaacatttacaaaattaaattagataaaagtaaaacccctaattaaatattcagtcaaatagtcaatatcccaaaatcactcaaaaaggaaaaacacccaaaaaaaatactgc

SEQ ID NO: 233580 - DNA, 2740 bp, Cannabis indica
gaacatactcaatcaagaatactagctaagatgccatggtatttatctaatgggctactgattttggggaagatggtgaatactaatgaatcttggaaaaatgatcttacaatattcccgatttggggcagaatactaggggtacctacagatctcttgacagcaaagaacaccatgagacttgcatcaatggcaggggctgtgatttcaattcaaaattccgatgtgtccagaatggtaacaaacggattctttcgctttcaagtgtggatgtcgattaataaaccagtttggcctgggtatttacttccgtgtggggattcaaaatgttgggttgcttgcaaatatgaagaactcccctttatgtgttttcgatgcgggaaaattggacacaaccaaaaagaatgctctttggaatatacagaaattgaaggggcagatggtgtgcgcgcgaaggcttacggaatgtggttgaaagtggacaatgaacagagggatgggtttcatgaaagccaaaaagaaccgagaaaggaagtgcagcaagggatcaaagataatcaaaaaataagtctcccaaaccaaggcttgaaagtggccaattcctttactcctctggtcgatgaaagggagacagggaagtatgtttcacatgggaatctcttgctaaacaattcagaaatgataagaggtgaaaatagcaagaagaatgaacagtgtggggcacaaacaccaactcatgagaccgaactgaggggaaatctggaaagggatgaagcacaacacaaaggaaagagaagaatggtagaaacacaagcaggaatggggtatgggaaactccaaaaaacagatatttcggccactgattctcttggacagccacaactattcgatgtcccaatcgcctttgctaaggagggtgataatttctatggaggatcttcatttaacttgggagcgggtaaacatagtatatcaaaggaacatcgaagaaaggtggcggtaaagaaggacacaaagaataggaagagcaaagtgggtaccataccggttgaagtttctcaggccagagattcaacaacgggacagaacgaggaagaggcgaactctgctgggcagagtcgcctacaatcatgaaactcttactttggaacgttcaaggtttggggaacccttggacggtccgtacgctaaaatcccttgtgaatcgttgggatccggagttggttttcatttcagaatctcggttgaagaaaggaaaagcggaggctttgagggtgtctttgggctatgatggctgttttgttgtggaagcccatgggaaaagtggggggctaattttactttggtctaacatggtggattgcaatatcatgtccttttcttctttccatattgattctttcattcggaaagaggaaggacaatggtggcgcttcacgggtttttacggtgatccggatccaactcaaaggtgtgaatcgtggaaactcctcgcaagaataggaaggatgtattcggggccttgggtgatagggggagacttcaatgagatcttaagaaacaaggaaaagatgggtgggcaaccaaagccaggttatttgatcaacaacttccgaatggctctaaatggaagtaatcttcgagaggtggagtatgagggcagcgagtatacttggtgcaatggaaggaagaacgagctgatttttgaaagattagatcgtgtgtgtggcaatccggagtggtttgatcttttcccgaaagctaaagtcaatcacctagatcgggtaagttcagatcactgccctctcctccttcattgcttggttaaacatcatgagaatgagaatggggttcgctggcactctcggtttcattttgagcatgcttgggctgatgaggaaaagtgtacggaaatagtgacggaaagttgggacaagggggacagttgtaacacggctatggcattgcgggataagctggcttgttgtggaaaggctcttcaaaagtggaataagagcagaaagaccgaaatgaaacataggctgaaggagtacgaagagaaaataacaatcctatctaaaagtacaaacaacaaggattggcaatatttaaaagatattgagcagaaaaataatgttctccttgataaagaagagaagttttggcggcaacgaagccgtgcaatttggttaaaagaaggggatcgaaataccaaatattttcataggaaagccaacacccgaaagaggaaaaataccatcttgggtctactagacagcaatggaaaatgggtacatggtaacaaaatggtgggtcaagtggcttgtctctacttccagcaactttttacatcaaattcagcaagcatcgctgacttggaggagttccaacgtatagttccgaataagatttcccgagaaacgaatgagtacctcaaagcgccctttacaaaggaagatgtctatgcagcaatgagaaacatacaccctcacaaggctcctggaagtgatgggatgcctggacttttctaccgtctttattggccaaaaattggtgaggaagtcaccaaagtgtgtttgggaattcttaatgaaggtagaccacttaatgaaattaatgacaccttgatctgccttattccaaagattgaaaagcctacccgaatggctaactttcgccccatcagtctatgcaacgtgatttacaaaattgtggccaaatgtcttgcggggaggatgaa

SEQ ID NO: 233581 - DNA, 1626 bp, Cannabis indica
tcactaaatattaataatagtgatatttagaagtgtcactaattagaaattttggttataaccatggtatatgactgagaaattttgttatcaggctgcacattgtggatggaattgaagaccacttaagttattttgtgacaataaattggctgtattgtattttaacaacaacaggagctcgatgaagtcaaaatatagtcacatcaagttccttgttgtaaaagaaagggtacaaagtggacagatttatatagaacacttaggccaaagtgaacttaattgtaaatgcagacgaccttagaggcagaattggacttggagctcaacatgaaagttttatatcttgttcttagctttctagaaaatcttgaatcgtccaattctgagtaatatcgagagagttatggcaaaaatacaatcattcgtcgcagtaggaaatttctgaaaaaaagatagcgaagaaaagatagattttcaagaagagttgcaatttttttatcttttgtttaaaagatgagttatcttttcttttagtgagatatttccaaatactattataaatagaatcctaattctaaggggatttatctatccactataaatagaatcctaattctaataggattcatctaactttccgttactataaataagacctcttagactacgaattgagggaactcaaaaagctacaaattagagagagaaactcagagagagagcaaggaagagatggagatcgcgacttcgaagtgttcttcattctagttcttttcttctccttccactcttactatttattatgattatcattataatgtctagttttgagtagttttcttttagttaaaggttatttcaaaactccagacatgaattcttagtttctttcttgaatgttaatttctagttttcattatatcatattgcttctattcttctatgttcaatgttatgattattgttttaatcttgtttagatggctgctaaattaggttttactttaatctacccccatcttaggattactattcacctaatagtctaggattctaagtgtttctgacaaattacaatttttatttgtgatgaagaatagaacctaagttaaatgaattatatgcttcattaatttgttgtttagattagtctatctccataaatctcaatgctttatttaagttaaataaattgcatgcttcatggatttacttttttaggtaaagagttaattattgagcgcctcgccttgattacatacaatagagaaattgagataattgactgcttcagtgtaatcttcgggattaatagtttgattaaaaactgaaaattacattctttaataggaattaggaatggttgttgagggtggcgaataacctttaactaatttctcatatcgtagtctatctttaaacttgttttctttaatttttattattgctattttttatcatcaaaactcccctttttctaattcttgttactaatttgtgaataattgaataaacatagtcctcgtcggatagatccttacttacgattatactaaaataattggaagtattggaattaaaaaaaattgtaaatttgttatggcttacgacacacatcatttg

SEQ ID NO: 233582 - DNA, 1076 bp, Cannabis indica
aggctctgagttggatccaacaacatttatggtcaaatgtgattttggagactgataacttggtttgtgttcaggctatccaaagcaagttacatatgccttctgagttcagaatcttagttgatgattacaatgttattttattttctttgactaatgtcaatattcagtttgttaaacgatctgcaaacaaagttgctcactgtttggcacacaactcttgttttttcacaggtcgtgcttttcaagagtatgatttgcatcctaaattacgtgctattttaatggatgaagcttcattttaataaaagtcttacttttattcaaaaaaaaaaaataggtagttttaacgagcatttcaatggagccattaatgtactgttgtttgttaaaaaaaatatatataaaaataatgtaatatatacgggtcgtgctaaaccgaactataaaagaatatgggatcatgctacgtcgtgccaaaaagttacggtatgcctgacacatcctgcaagcccagatatttttgtgtcatgctctgattcgtaggcgagaagtatacataaccgcccatatttaaagtaaaagataacaactgcctttgacttggccataggtttctatgatcgagcaggttcatatagagacctctcctcgagaaactcatcgaaggatgcgtatatggtgagtagacttcttgaaaaacgacttgatcttgatcatgagccttccgaggtgaccaccaggaataaacttaagcaagttaagcctctcaatattaccaatatcaacacaagaaactcacagttttctcattggcgaggaagattgtttctggcgttttcgtcaattttgtgaagacagtgtaaagtgggtggttagtcctccctttcttagcattgttgtggtccccaccatggtcatttttcccattgcaataagtatttacattggaggggttgttgtttgttgaagtgggagtagcttctattgctccaaatgaaagagggaggttattggccaaccttggcctcttccctattaatgtatttttgaactcttttcatgactcatctatg

SEQ ID NO: 233583 - DNA, 785 bp, Cannabis indica
agtcggtggtaaccatatttgtgcagttctcacaggaagttgctggtgtggtgcgtggccaattctattatctggtgcggtagcagatgttgcagccgtgttttgtgctggttttgtcactttatgatattgagccaaataagaaacagcaaaagtactgatcagatctgctggttaggcttagtaccatgtatttctttgtttcgttcagaccaaatgctccacataagacatgtaatcaactcaagatcagcatcattatgggtagcagcaaggtgggaaaaaatatcaaaaccttttatgttacctatattcggcatgtaaacattgtaacgaaactttttccacactgccttagcacgatcacaacaaaaaatggcatgtcctactgtttcccagccacatttacaaagagaacaagcagtagtgggagtgatctttctataggtcagattcatagaggttggaagggcatcattaatcaggcgccaagcaaagattttgacttttttgggcaaccttagagaccataatcggttccaccattgtctatgtgaagaagaagatgaatgttcattcacggaatccaagctaactgttaaatgatacccagttttcacagtataaaaaccagtgtccgagtgatgccaaataagcttgtcttcttttggaaaaggactaagaggaatcaaaaggatacgctcaatgtcaatatcaccaaaatgatgctctaaaacctgagtgcccattgcctattggctgagatataatgttctaccgtgaaa

SEQ ID NO: 233584 - DNA, 859 bp, Cannabis indica
gatgttaatgaaacatacttgttagtaaatctagatcctggaaaaatatacccaacagatacttcaccaacatggatgactcctacagtcaagtacctgctcaatggagaacttcctgcagacaaagccgaggcacgcaaactcttagactcaatacctcgctatgcaattgttgaggccaaattgtacaggagaggttattctatgcctctcttacgatgtgtgttacctgcagaagccaatgaaataatcaaggaaattcatgagggattttgtgaaaccatgcaggttggcaaagtttgtcaaagaaaattatccgtcaaggacactattggccaaaaattaacaaagacacacaagaatttgttaaaagatgtgacaaatgccagaggtttttacatatacctcgtgtaccaccaacaaagttgagaatgatgacctcaccatacccattcgtaacatggggcattgacctaatttgggcattacccgcaaggcaaggaggggcaaaatacgcagtagtagcagtcgacttcttcacaaaatggagagaggctaaacctctagtttccataacttgcaaaaaagttcttgattttgttatcaacaacatcatttccaaattggaataccaatcaaaatagtgtctgatgatggaacacagtttgatggtgagatgttcactgaattcaatgaagggaataagactatgaaaagcttctcatcagtatcgagacctcaagcaaacggacaagtagaagctgttaataaaatcttaaaagatactatcaagaagaagctggatgctgctaaaggaaaatgggtagacaaactagcacaagtgctttgggcccacaga

SEQ ID NO: 233585 - DNA, 951 bp, Cannabis indica
ggataagcagagaagagccaattgatcagttgctgtctgttcatacttgggagatgattccacttcctgtttagattttcccagattgcccaaagaactttaacggtatcttcaaactcagacctgttaacttactgctcaacagccatcaaaatatcaaacatagatccttctcccaggcttgaacattttttgtaccaaggaagaagtttccagatgtttttaattttatcacaactccataatgcatgggtaagagtctcatcataccttccacacagatcacaccgagtattaatatccatacctttgtgcttcaagttggtctttgcaggcaaccagttgtggcacactctccatccaaaaagcttcatccgaggaggaagttgtaaactccataaaattttccaccaattctgaatctctgccatgttagaacatctagtaggattaaggttcatctcccttccaaccctataaccacttttaacaatatattgaccattaggggtgaatggccaaattagagtgtcttccatatataaatctatggggattccttgtatccaagggatgtcatctttgtgaaaatgattagtgatctcccccatgttccaattcccatcccaagttataaacttatgaagcttggtttagggtggaagtctgggaaattgagaaagagtagccccatgtggtcgcgggagccatttatcctcccacacatttatctctctaccatttccaaccctccatctagccccttccttcagtatttttctgctccaacaaattcccttccaaacacaagaagctcccataggacaacctgctttcataaaagaagtattaggatagtaactattcttcaaaacccgggtaagaagagattgaggattatgaagaagcatccacccttgtttggtcaaaagagcttggttgaactcagtt

SEQ ID NO: 233586 - DNA, 1198 bp, Cannabis indica
tttatttagggtacaaaacccaacactttccctttggggaaatcagagcggacctttcgcagatcatgtgcttttttatttctctcgaggattgaagtaggatttttcttagggtcccccttagaacaatatcgtatagggcttgactccctagttttgggcctttgagtgcttggcgaggactcctcctgtgtttcctctagtcccacaggcacagctttggggtgcacatgtattccagctgtttccatggctttttgcatggcaaccattatttcttgcatcctcctattatgttccttttgggcggccagtttggcctcgtgatcagctgttatgccttaggaccaacaactcagtgtagctaccttcgtcgtaagcatcgtacctttcaaagttttcttaatattcctcattgtttgtctcgtctcgttcctcagagcccatgttcactcgtgaagtagcctcttcaccttctgggttttgaggatcctaggggggacgaggttggcgcgtgttgtttcgagtttccaccattgcagctctgattcttggttgttgtttctcaaacaacgcttcccacggctctcaatgaaagcactaaaatgttgaccaaaatttttggcaaccaattaaataaaataatgataagagcttaaggataattaatgcggatgatttttacgtggttcgggcattaatgagccgtagtccacgagtctctgttattaatgagagtatttgttttatagagaatgttcttggtgtgttttctctcccctttttttcgatccccattcccatttttcctaggggtatttatagagattggtggaaataattaaaaagggattacttttctttaagtgcctagcaatggatgagtacaagttccaaagagatacaaaataaggcatcgttacctataccataggtatcggagggattaggtgagattaatcttcatccttccttgattgatgtgattcttcataatggagtcgtcactagccccttcgattattgtgttatcgccttaaataaggcttacgatgtctgacatgtctcttatgggcgttcccaaatgctttccccatgctgcattaaatgcgagatgactgttcgaataggcccttttcgtctcggagatgactaactacatctttagctcccagagaggagggcatgcttttgtact

SEQ ID NO: 233587 - DNA, 1651 bp, Cannabis indica
tagtgattgtctatatactaaatataatcttgtcccttgaattttatctactaaatcattacttctgatctttcaaaaatataaaattgtgcttcttaaattttcatccacgtcaggctttttttagtaaaataggacaaaagttttaaatctaacaatcttaatagttcggtaaaaattttaatgatctaaaaagtttaagcatataatttagtacatgtcaaagttaatagcaaaaatcttaattaaaaaactgattaccaatcaatatatatgatttaaggcaatatataatttatttatttgatcaatatttaattatttagataatgttctatacgctgttgacaaaattctctatacgtacgtgggaaaacgcgaaaaaaaaacacctttttgcatgcaatgtaaaagttataattgtttttccatagaaaaatggtttggatcctttaaaaaatattaataatgtcacaatatatagaattaactcacctaaaatagttaccatagttattcctaaattataactttacacatttataagaagattataacagatatattagtaaaaaaaataatataaccaaatcataaactttattgttagatataacaaattatttttactaaacaaaaaatatacttaattaaaatattaatactcaatagaaacacatgttaattaccttatataactttgattccaaaattaatatttgttatttaatgcaagaaatatatacgttggaagaagttatatatgtttattatgtatgtgttgtctaaataattaagatggtatatatatagccgtatattgtgaataaggtgctactcatatgaataagcaatatgtggttcaactcaatattaattattctttaaatactaattagtaatagaacaaaaatcattattaaacttaaatactaaaacatatataaaatttgataagagtacgtataaaataaaataaatttaatactaattagtagaaaaagactcattagaaagaaaggaaaagtaataagaaaaaagtattgagtgctaatttaacaaaatatcaatattaggtacaaatagtaaaaataaaaaataaaaatgagtataataaagtagtaattaaatttcaaatgtaagttttatatgttaattagtagaagaatattgtggttttaggttgggcaatgttttatacgttaatataattattaatagaagaatgttgtgattttaggttggggtaagatactcatatttttttatatatcttattgtaaaatatgctctttagtagttaattatatatatggttatgtaatattatattaattattttagatatcaattaatacggaattatatcagttaccatataaaatttcatagtaattgccaattgttatgggatactacaaccaataagtagttaaagaaaaaaaagtaactaataagtagtaacatctcctattatatataaaaaaaaaaatcttaattttaaatagtatctatatttttattattttgatcaacttttttattatattaaaaataaataaagaaataatatttatgcttacaaaataccaaattaactacaaaagtaagtataataaaaaataatactcctctagttctccatttaaga

SEQ ID NO: 233588 - DNA, 911 bp, Cannabis indica
tatttataataacataggtttgtagttaattacattcaaattcgaatcccacaatgatactttcccaaaattgtgggctataattatgctccacgtaaataaatacagttattatttgaaaatcacacagctgtgatttacactgcttttaaagggtcaatgctaacgtggattaagacatgctgcaaaacatatctcgctgggatatctcgcttggtacatgaataacttggtttattcataagtcttctagaaatggcatgagcaccagtgtactgagcaaacgtaaggactgctctttgaccataagatcttacagactagacaatcatgtcttgggggttctcgatagcaacaataactctggcagcgagctggagtttaccaggagtatgcctttctatagcgagatggatgccttgctattcgttatctatgtccttcaagctattacactaaggtaatataatgtatattatatgctaagtgttctaacagccaattcgccttgtcagcacctctctacatattgcgaggtagatgcctcgctatgtattattgatgtcatccttgcgattatgtcttttgacaccaaaattgtttctcgttagtacgtgagtcaatagttcgtacatccttgtctcgctaaagactgtgcagtccgcgagttataaatatatcctattgacttcagcatttaaagagttattccattcaatatttattaatttaataatcaatatgttcgttgattcatattccctgaaattgacacatgttgccttctgaagttccagccgaatttcaggtataacaacttgatatcaaaattatttagaatttaagttgtgtgaaaattaatcttttaagattgaattttcaaagctaaagtacttaaggagaatagtggt

SEQ ID NO: 233589 - DNA, 1105 bp, Cannabis indica
taattggtggatcaaaagggtggtcattagacactggcacttctcgccatgtctgctatgatcgttctatgtttaagacatacactactatgactaaggataagaaggtattgtaagggcgactctcacactacaattgttgttggtactggtgatgtagaattaaagtttacctctggaaaaatcatattcttaaagaattcgtgcatactctaaagatgagaaagaatctagtctcaggttatctactcaacaaggcagggttcacatagattatatgggcaaatttgtttactttaactaagaatgagatttttgtggagaaagagtacactactgaatgaatattaaaattgaatgttgaagttaacaaagtgaatgtttctgtttacttgttgtgttcttttaatacttgacatgctagactttgtcacattaacaaaagaataattaaaaatatgagtagtttaggtttaatccctaaattatcattgaatgattaaaaaatgtgacttttgtagtcgggctaagatcacaaaaacaccacataaatctgtaactagagaaagtaagcctctagaattaattcattctaatatttgtaaattagatggtgttttaacaagaaatggaaaacgttactttatcacttttattgatgattgatctaatttttcctttgtgtacttaatgaaaaataaaagtgaagctcttgatatgtttaagttatttgtagctaaattttaaaattaacttagtaggaagatcaagaagctacgtagtgatagaggcactgaatatgatttcactgtttttgtttgatttttataactcacataaaattatacatgataagattccaccatattcacctgaaatgattagataagctgaaagaaaaaataaaagtttattgaatctattgttgccattttacttaattttggtgctgcttcttattagctgggataaattctcttaactatttattatgtgcttaatagggtatcctaaattaaaaattaaaatttctccttatgagattttgaagaatagacaactaaatgtatcatacttaaagttgtttagtttatgttcgtttact

SEQ ID NO: 233590 - DNA, 903 bp, Cannabis indica
cttttttcttaatttccattctgcatggttgttacgagatgtgaaagttctactgaagtaaaagatcctatggtcacgaatctcaatgtccaagtgccaaccactgggaccaaactaaacttggctgtctggccaccacagtcttgtcaactggccggcacctctaccacggaggtctggccaggagaccaacctcctactggacccactatccaaccaactgttgaaatttttgacatggggattggacctcgtgtttatgttagtgagactagatttggggttggcaaccctagcattgatgaaccccatgttaacctgggggatgactctatacttgccagactgagaaaggttgtagggcaagtgcagggtcacacaaatttccttcaccatgaccagcaagaaacatgcgctactatgggtgatgctttcacccagtagagatgcaaattccaagaatggatagattggtaggctgcaatcctccaagctcattaggcaaagctgaactgccaaaatagggaggctaacgatctaatcagactgttcaacgagagggtttaatctcaagttgaagagccacccctcataaggaatccctttcaggggaaaagtccctatatgtcgaaggaaacttagtgccccagggatcatgagaaaacctcacggcctgggggacaaactgtgtccaaataaggctaccatcctatcagcctaatgacagtcaaatttttcctaaaagagcatatggtaggactgaccagtttcaaggcctgcctagaaatgaggagagaagggaaatgtcccatcaatgcaagaccagagtaggtctcacaatggggagtcttaccccaatcccaataagaatagtgccaccagtcacctaaatggtgaatgcac

SEQ ID NO: 233591 - DNA, 1556 bp, Cannabis indica
caaccccaggagcaaagcgacttgaatccggatggctctttaaagaataagtaaattattaaaagcaagtactttatcaagctcctccacaacctgtgtaactccgtgactcgaaatctaaaatttataagataatgcaaatgatacatgccaaaatataagtactctaaaaaaatatcatattataatacttttagcaaatcatcgatcatgtttgatgacacaaacattaatgtaaaggcaattatgtgtgaagtagagagtatacgtggctcttgttttagacttcagtaaagtaagagcagaagagatgtgtttctcaatcagtttccttgtatgctccctgaacaagtccgcaacatgctgcatgaagcagaaacatcaaaataaacacctattgaccagctgtagaaatactatcatttgtatactgaaaatgtacctcatcagaaagcctatacaagagttgtgcttccctgaggctaaatagctgctctacactgatatctaagaaaatcatagaaaacattatcacttaaggaaaagtaaaacaagacttcaattttaagcatgtgggtgtggtataaagtataaaccaactaatcacacgggtctttaacaaactgtgtattttttgttttaaaatacttttggaagatattgataaagcgatcactaccaatcactccaataacttaaggctaagaatgtaaaaaacaattgatcaaatcatttcttcaaccaaataaatccaaaatataaagaaacaatgcactgacaatcatacctcatttacaaattacaattgacattaaaccaaaaattcgtaaaaaaccaatatatatatatatatggatatatataaatacaaagtcatcttctattagccaaatttgactaaatttagacaaatttaacattcaaataataaaccaaagcacaaaatagaggtgtacctggaagaaaacggagaccagaaccagagccctcacctatggcagacgatgacgacgatgagggctttggggacttcaaattttctccaatgactcatgttcataccccctcctttatttccaccaatctgaagaccagctcctccactgatttattctccgaagatgattggggcgacttcgtaaccattccttctaatcagatcaatggttgatttgagttctccaatagaacatgcgttcattcgtcttttagtgcttcctagaaccaaaaccccttgtacctttttgggaattcagcaatggatggtaatgaatctacgatgtctcgggttgaatcggtacctagtggagtcgagttggcgaaggtttagtgggttaaagctcagggagctattctgttatcgttgtttggggagactgaggaggaagagaatagatgaagatatatacgtagataagaaaacctaaacgatttggaaaaaaaaattataaatgaaaataaattggaaattttttaaagttaacgagagaatcaaatctactaacatcgttaaatttaacagaatattcttttatttttaaagtatattctgttaa

SEQ ID NO: 233592 - DNA, 1135 bp, Cannabis indica
attggatcgattgggattgaatcaatcggtcgtaattagatcggatgactttttgcatactcctaagtaccctttagaatttttcgttgcaaaagttacatatcgaactctaataagaatatgtattttttgaaagagtacaaattaataccctaaacttaatttttatcattattttaatataacaaatttgaaataattttttttgcaccaatatatactaaaaatttaaagcttacatttttctgtaaatacaaatagaacaatgatgagaggccacattcaaagcaattgatgaagctttctgtcacagtaagcttttgtagtgatttcacctagctaagccctaaaaacacaccatatattcatatcttctatgtatagaatagagagtagacaatcataatagtgtcatgtatacatttttcttttgtaataatttagtgtatatatatacatatatatagaattaatgtagtagactatatataatatatatgtagtgatcatcacatgtgttaattaattttccctaatatatacaaacataaaaagaaaggtatatataaataaaaaaagaaaaataattaatcatggtgtatattgcagcttttataacctatggttatttgacacgcgcacactatatattataaataatattgtttaataataatatttatatagggaccaatatttatagcaacaatatttaatattttaaggtattcaatgccaaactgtataatattttatagttagttaacgaatagcaatatcttatattatttattaaattaaaatgtaacctgaaattgagatgtattaataatgatatgacaccttttatagtgtttgatacattaaaatatctcttagcaggtgccctgttggtggagattgtcgaagccataggggtgaaagaagcccttagttggataaagatcaatggctggcaattcgaaactaacagtatatgattataattgtccaagcaattcgaagtagtacctctatgtcttcagtctttgttagagagtcccacattactaatgtgtggaaagataatagaatatataagaggaatgggctactcctcccattgccaattggttttgagatggaacctcattca

SEQ ID NO: 233593 - DNA, 585 bp, Cannabis indica
aggaagaccattacacttttcaacaattttttgaccaattactagcaaatctgagtactcgtgcgagttggcattgattgcagcatatctgacaaataactcccaacctttatcaaaagatatagtgcttagagaataagttgatgacatagtttccataattgatgcaaccttattgctacgtgttgtcacaatgaccttgcttccaggcaatcctaattgaaaagtacttttaatgacatcccatctgctgctatcttcatcccaaacatcatcgagaacaatgagaaacttcttcccagtcaaaacctttttgacttcatttaaaacttcaaactcctcttcaatttcacatttggcagatgtgaccttccgaataattgttttgatcacattcgagctgttgactttgtcatcgtctcccacagtaacccagactctggtatcaaatattgtattcatgactctctcatcattgtatacaagttgaacaagagtagtctttccaataccacccatccccactatggggatcactgacaatttgtcaccaccgattgtgtcatccgataaaagaaacttaat

SEQ ID NO: 233594 - DNA, 601 bp, Cannabis indica
aaataatttccaacagaaaccaccaccaaaaatgaggatgcacacactcttttacctcaactaagtgccacccaatatcagcaattactcaacttacttgctaatcaacacagtaacatctctgtgaccgatcctagtacttctacagacaattctggtataatccttacccatacttcatctgattttttgacacttcttggattattgactcaggtgccactaggcacatttgtaacaacatcaaactctttcaatgcatcagtaatgtgcctgctactaggctcattttacctaatgatgaaactttattagttaaccaaagtggtactatccttatctctaaaaatcttattcttgaaaatgttctttttgtcccaaacttcaagttcaacataatctgtgtaagtaatctcaccaatcataaatttgttaaagttaaattcgaaactgcaattttattatccaggaaaaacaactcaagattgtgattggaagaggtaaaaggaagaatggtttgtatatcttggatagcattgatactgctgcttgcaacctgttggaaattattttaccaggatctaggctctcataactgagt

SEQ ID NO: 233595 - DNA, 725 bp, Cannabis indica
ctccatataaaactcccattccaccttctcgtgatactttatctcggctgcctggcaatggaacttgggaatttcatgcagtgatttctttttattcttgttggcggtcttcttaacttttggcattttcttttcttttaacttgcacactaccccaacacaatgaatttcttctctgcttccttattcactgttgcccctcaacacaataatcactcttacaatgcacttcattgtccccaacccaatcttgttcaaaaattgctaacctgaccgcccacactaactagcattcaaagcacttatactaactagcaccaccacaaccaatcaatttcctaataccatacataaaatttcacggccacacagagttttcaaactagcacctcaccaaatttcacgcaacaacctgttcacaatccttgctcttcccaaaatcaacaatctttctcagcccactattcttcaaaacttgcaccaaatgcaaattaaattacatactcacaacagtgcagcccattgtttagaatcacaccaaaattccaatatcacacccaaaattttcaaagtcacaccaccaaattcagattatcacaatatacccaagttaaatcagcaccacactaaatatactactcagcagccataggagtatatattgaagagaaataagactttttatccaatcacttttgatagtgctctctgtggcaatttaactt

SEQ ID NO: 233596 - DNA, 806 bp, Cannabis indica
ataattatatattgttgaaatgtaactaatgagtatataattaatatggtaaacaactaaatagttactttgattttgaaaaggtgaaaaaaatatatggtttctatatcttgaaaatcatattaaaaagtatgtcacaatgatattatttttgaggccaaacaactagcggtgtggttattaaaatattattttaaagttagaaataagagagagtgaatattttattttattttatttttctccatataattgtttaatataattataaaacccaccttcaattgaaaaaggaaatacaaaagaaaaagaaagtaattgtcaatttgtccattaaaaaaggacacaataatattaataatggtataaaacatattaaataggattgctacgttattcttaattataataaaatgcaatttacgtttgttgatgtaaatttccttttaatttaaggcatgtttacttagggaatagaatggatggtataatattgattcccatataattatttattaaattttaaaaaaagaaaaattagtaggacccatacaaattagggagaaaacaaagagaaatgttcttcccatttttatagggaatacctttgcctttcctaacttaatttattttaattttaattttattaattaaaaataagaataaataaatatgccctttaaaaatctataaacagaaaatattccaattacctttcctagttatgtaaataaaatgattctaattttcttttcggggagttttgtaaacagcataataaaatattatttctgattattttttat

SEQ ID NO: 233597 - DNA, 1069 bp, Cannabis indica
ttaaaaaatgacaaaaaaaaatattttaaaagtgtaaaaatgaaaaaatcccttttatttcttatcgattacatttggtaaagagataagaaagaaatataaaaaagcctttttgtagtatattggtaattataattcgagtcatactcatcattcatgagtcatactcatgtaattattcatcaagtagtgtaatactcattacaatgtaaaatgattataaaagttaaaagctccaaccaaacattgtaattgtaatctccattccattttaatcttgattacaccaaaacaaacatacttactttcttttggtttaattaacaacaaaaaaatcaaaatttaagtttaagtttaaacaaaataaaatataccaaccaattttattagttattaaaaatatattttattatttaatattaaaagttactaaattgtatgctacataagtttacttttatgaagcaatgttgattaattttaattttctattatacttttccagtcacaacaataattatttgtgcttaaaaattgcactattatgatctatttttaatgatcattttgatacgtaggaaacatataatttttcttactagtattaaataggtaatattttagttatcaaattgtattctcacaaatttctttggtagaatatttttgatcgattttaaaataacttacaagaaaataactataggttttttcaccgaattaaattttcagaattaaaagtaacttaatgacaaataaaaaagtaagcaataacttaaaataaattcaaaattcaatatgtcaactgatttaatattattaaaaaccaaagggcttcaaggggtttgtctgtctttttagctgcctttcagtcagtggcgctgctttgagcccttgccacctggtcctcttcctcttcctgtctttggaaggtgttatactttgcttagcttattggatggttgacctacgaatttcctcctccgctgccttatcctgggtgttaggacagatgaccttcgaaacatttgcgtctttgacgtctgaggagcctttaggagacctaccc

SEQ ID NO: 233598 - DNA, 1196 bp, Cannabis indica
tttagtttttagttaaataagcaaattttaattaatcacatttttcgttaatctcgttgattagcaacaagctgcacagtacgtttaaattcacgctaacatgcctaagttagttagggtgttaacgttgttcaatcttctatagtctatacacactcttcacttagtttggactctagtatggattaacttattttgttcatttttaacaacagtgatcctagactttttagaacaacttggagactaacccatggactgtcagaaatagggtaaatgatccctaaatcaaatattttaattgcctcatctcttactacatctttcatgttttgatttaatcttctttggctttctcgggaggtcttagcatttcttctaaatgagttttatgcactcacatagttgggctaattcccttaatgtctcctatggtccaacctaagacctctttatgcttgctaaggatatctaacaactttactttatgtttttcatctaaatcagatgcaatgataacatgataggtgttagactctcctagaaatgcatatttcaaagtgtcaggcaaagatttgagatctaactttgatggctcaaaagttgactcaacatgctctaatggaatttccatttttaagtatccattagaggggtagactcgagcaaagaattaacatcttgaataaaatcatcaacatttaagcacattccaaacatttttgcataagtttcaaaagattcattcatgtccatttcaaaaatatttttcgtgttaatcatgttcacttcatgtatttcctcacactcaacagatttagcaacattaaaaacattcaattcaacagtcatgtttccaaaagataatttcaatacaccattacgacagttgataattgcattagatgtagctaaaaatggtctacctaaaatgatgggtatttgagtatgagcatttttaataggttgagtatcaagaataatgaaatcaacaggaaaatagaatttagcactttagtaaaaatatcttctgtaatacctctaggaactttcacagaacgatcaactaattgaattgttatagaaattggttttaattctcctagaccaagtttataataccctaagattaaggaatcatattaacaaaccctaactagttatttgtgtattaatgtggaattatattattatat

SEQ ID NO: 233599 - DNA, 1261 bp, Cannabis indica
accatctgtatatcaatctcatggtaaaattggaacaggtatagattagcttctaattccttaacatacacacctttaccgggctgccatagagatgccattaaatgtctcatggcatcaaaatcaatagatcttcccgtaaggaattttccgacaagacaccatctatcatcgaaggtctgttcatcaccatcagcctccccttcaataagaacaccctcttcttcatcatcaatctgaaagttctcatattgttcagcaagatcacccattacatagctactggatgccataacgagcactaccaaaacgtcacaaccaccttggagtctgtcagtatcaagactcaccactcacaaacaaaccaaaaacctgggacgaaaaaaataacacttacataaacactgttgcatacgtaccaatacactcaaaagagagagacgaattattattatttttcttgggccattttgattttgagttagtgagaatcctcaacaatctctttaaccggttctaagattcgaatacatataacatacactttttgacgttcgtttaatttggtcggctcttttttgaagaatggagaagttagtttaggatatttgacttagttagttagtggtgatattaatcaacaaagaacgcatcaagtcaatttatgactatgaatgatcaatctactttaagttttcatctcttaatacaataggtatgtaaagtattattttatttttcattttgtttgtggaattataaaaattagaatactttttttcattgatgtttatcttgttctcccagtacacaaatttacaagtaagaagcaattcctcaagttagtaaaattttgtatcaggacaaaaaaaataaatttgtacaatatgcactcttgaattaaatttgtaatttggttgaattatcagaatctttcaaatgcttttatgtactcgagatattctattgagaagacaatatgtgcgtttggattaattttgctcggttacattttggaatcttataaatgttttattttattttatgaccaattatatatttactaaaaaactattaatactaaaatatcacttgatttaataaataaaattattattatttataatgtgtaattaaacaatttaattttgatattattataataatttgtgagggttttttcatttttatactttaaaataattttttttgtgtatttttacggaattctacatagaaacactattgcaactagcgctac

SEQ ID NO: 233600 - DNA, 2008 bp, Cannabis indica
gatgatcggcgattgggggaagaggagttacctgattcagcgcctaagatcatggaggttgattcctcatttcagggaaatggtatcaattctggtggtgataataatggaaagaatcatagcattcaaagtggtgctgtatctagtcaaagaatagggaaagtgaatcccatgcaatcagctggtaatgttaacgtgggggttgatggtgaagatatttccaagattatcctagattcaaaaaggaggcgcatggaaggtgggaatattggtgaaaatgatgatgtggcagatggtgcgtgtgtgatgatggagaatgaaatgtatgttggtgatgggccaaaaaacatgtcaaaggtgggtcttggttcccaagcccacccatcattatgagtctaattacatggaattgccatgggcttgggaacccatgggccatacaattcattaaggatattgttatccaaaagaagcccattgtgttgtttctttgtgaaacgttggccaagaaggagatggttgagaagcttcggatttgtattggttttgaaggagcgtttagtgttgatgctcaagggaagagtgggggggtggctttactttggcgagatgctgaggagtttcaattagttagattcggctctaactatattgatggtattgttcatagtcgtgattatggggattggaggttgacggggttatatggtgagcccaatcgtcgcttgcgtaagcggacttgggatcttcttcgttcattgaaagctgagtgtgagttgccgtggtgcatagttggggacatcaacaatgttacgtcccaacaagataaaaatggaggtaatccttatccgacttggttgattaatggattttgtgatgcattggatgagtgtggtcttcatgatttggaattgagtggctacccttacacgtgggaaagggggcgaggaactgattcttgggtggaggctcggctagatagagcgttggtttcacagagttggcttgctaagtttcctttggccaagctatataacatggaagtgtccacttcggatcactgccctttacacttagttcctgttaccgagactattcatgtgaataatagagtttttagatttgaaaactcttggctaaaggaaccaatgtgctttaaagttgttgaagacagttgggatttgtcctccggtctctccattacagaaaaaataagggattgtggtaatgttttgcttgattggggaaaagattacactggtaattttggcaaaagaatcaaggcgtgcaaggctgaaattaaacaatggaagatagggcgcgactctgagtctgtggagcgttacaaagccgctgaaagtaacttgaataatctttatttgcaacgagaaatattctggaagcagaggagtaagcagctctggctgcgtgaaggcgatcgtaactccaagtatttccatgccaaagcaacatcacgaagacgttcgaatgttattcacaagctccagaattctgaaggtgaatgggtcggctgggaagatggtctccccaccgtgattgtgaattactttcagcatctatttatgcgttcagatggtgattattcctcggttgtcaactgtatctcccaatcggttactgaagcccaaaataattcgttactcgaggaagtaacttgtgatgaaattaaaaaggcgctgttccaaatgcatcctgataaggcccccgggcctgatggtatgactcctggattttatcaaaaattttggagtttagttggtgatgatgtggtgcggttggttcaaagtttctttgctactggtgagtttccatctgttttgaatgaaactaatattgtccttgttcctaagaagaagaatcctgaacaaatgggtgatcttcggcctatatcactctgtaatgttctctacaaagttgtgtctaaggtgatcgctaatagactcaaagctgttttgccgaatgttatatcttccaatcaaagtgcatt

SEQ ID NO: 233601 - DNA, 892 bp, Cannabis indica
ttgtccatgctgaacttatccaaaaccttttgaagataaccctctgagatagcattatatattctggtctctttctgatgatgtcaatccctagtatcttgttttctctccctagattcttcatatcgaattcactgttcagtttcatcttgatcttgtgaacttcactccttagttttcctatgatcaaaatatcatctacatagagaagtagatatacatgatcattatagtaaacacagggatcatacttgcttttactaaagccaattcgaatcatgaactcatcaaatcttaagttccattgtcttggagcttgcttgaggccgtatagtgacttcttgagtagaaagactttatcttcagagttttcaacttctaaaccttctcgaattgccatataaatctcttcatctaacataccatgtaaaaatgctattttgacatccatttgatccacctcatagtcaaattttgcagccagagccatcataattctgattgatgtttgtttgacaactggggagaacatatcgttgtaatctatgccttctttttgactgaatccctttgccacgagtcttgccttgtatctgaccttgccagttccattgtcactctctttttctctgaatatccatttgcagcctatgactctttgtccttttggtctctttactacaatccatgtcttattcttgatcagtgagtccatttcttcattgatagccattagccatttttctctagcttcgccttgaactgcttcagtgtagctgaggggttcagcattgtcaatttcttctgcagcagcaaaggcaaaagcagtgcattctgaagcagagtaatctgcataaccaagtctgtctggagcctttgtttgcctcctttc

SEQ ID NO: 233602 - DNA, 821 bp, Cannabis indica
ctacttggtgctggtttagaaagaaaattttggggtgaagcactcaaaactgtttgctatctggttaacaaatttccatatattgcaaacaagtacaaaactccacaagaaatgtggacagggcatgttcctaaacttgatcaccttagagcgtttgggtgcacagcctatgcacacataaaacaggataagttacaaagtttggtgtatggaacttggtttcaggaagtgcatcataagtagagatgttgtcttcaaagaggatgaaatggcaatgaaaaccaaaactccaactgaaatacaacctgctataccagttcaatgtctgcaacttgaggtggaccaatctgacacttaaaatgcagaagagaatcgtgaaatagatgcagaaactgacacaaatgaaggtactattgatttgagcacctatcaacttgctagagacagggtgagaagagaaactagaccaccaagcaagtttggatatgctgatttcatagcatatgcattgctcactgcagaggaattagaatcttcagaacctactacctatcttgaagttactacaggcaggaacagggtaaaatggctaaaagctattgatgaagagatgacttcactcaagaagaacaagacatggatagtggttaagaaacctgagggaaagaaactggtaggctgcaaatggatttttaaggagaaagaaggtatccctggtgttgaaccagtcaagttcaaagtaagactagttgcaaaaggattcactcaacaagaaggagtggacttcaatgaaatttttctccagttgttaagcaaacctc

SEQ ID NO: 233603 - DNA, 1990 bp, Cannabis indica
ttaccagattacaaagatagttgaccaatgagcatacaaactctgagcagcagatggaagaaacataggaaacatttataacgctatacaacttaaggaaaaccatttataatcacatgtatggcgaaacaatgccctcccttgtacactcacactttacatagtggatttttgcatgctctggccatgattttttcctgacttccacgtcaatacttgtgtcaattattttaagtgtttgttacattttagagcttaaaaatgtaaagcaaaagcaataagaaatgagccacgctcaaccgaaatattcacttacaaactaagtgataagagccacacttaggagctacgctcaacctaactattcacttacaaagtaagtaataagagttacgctcaacccaactattcacttacaaagtaagtaataagagctacgctcaacccaaatattcgcttacaaactaagtgataggagccatactcaacctaactatttgcttacaaactaagttataagagctatgctcaacccaactattcacttacaaagtaagtgatatgagttacgctcaacccaactattcacttataaaggaagtgataagagctacgctcaacccaactattcacttataaagtaagtgataggagctacgctcaacccaaatatttacttacaaactaagtgataagagctacgcctaactcaactactcacttacaaaatgagtgataggagctatgctcaacaacttataaagtaagtgataggaactacgcccaactcaaatatttgcttacgaactaagtgataagaactaggcccaacccacctattcatttataaactcaatgataagagccatgctcaaccatagatcaaacagcaagagatgtatttagcctgacttttcaaatcataaattaagtcttcagaattatgttcaatcgtaactaaatataaaatttattcaacaatgttatggtcagccaaactcgatatactcagtcaagctgctccaaaatctaagttttatgacactcactaagacttagactaagggatattgtatatggatcgatgccaaatttacatcaagcgaataacataaaacattagcaaaatgcaaaatgaagaatattaataccaaattaagataataagtcatacgaccatagaggtaacgttcatacatcaaatcgtcataaagttcaaaagagaaattgctaagaggatgtctgcacatcaaaagggttgttaagcatacatacttaatgccacaatggtgaagttcatgctttaaacaaaagagacttaaagtttaaattaattgtcacttataaataaaagagagaaacttaaaagacccactatggagcaatgataccatcttcagcaatagagaacatcacattttaatgccactcccgccagaaacagaagtatgaggatcaaaacccacacgagggatagaggtatgagcatcgacgcccacaccagacatagagatatgagcgtcaacatccatctcattctcttgcttaagagccaaatattttcatgaagtgcaatagcaccatcgacatcccatccacgatggaggctatccctatactgtatcatcaactcccccttgtcttgatgatagtcttaagtaaaatatcatcaacctcctggtacaatgtgacatacttagcctcctcctccttgagtttgccatgcacatgcttcaactcagtgctcaacgaggaataatcttgttggagcttgtcatatgataatttggtagtctctcctttcagttttaacttctctaattccttgctaagtctagaattttccttgttcaaagccctattcttttggtcaagaaaaactgtgtcacacctcaagtagaggatagcttgaatagcctacaaaagacgatttgaattatcatgagtaacatgcaaaaataactacgtatgtgtacatacaaattctttc

SEQ ID NO: 233604 - DNA, 1510 bp, Cannabis indica
agatcgtgtgatcaatgctgaatgcaaggatcgtgggattgaggctgagtacactgacagtgggatcgtgtgtatgtcatatccacgtaagttgatccctgagttatagggattgagctgatgactcatgatgtaaaaactgaattcgctaagtattgagtgctctgcacggatcgctggatatcttattctggatgtgccagcgaggcatcctgctcagtccattcttcctgagcagatgctccaagtggactcacgtgtcaccattctcgtgacgccatgtcagagtgcaaaatttgggataacatttgccccccaagtctgtacgggacctctgaggttgcgtgtagacttcttggagatctctttcattgtattcatgtagttttgaccctttctacttaaggcatcagctacaacattggccttcccaggatgataaaggatttcatagtcataatcatttatcagctcaagccaacatctttgtctcatgatcaggtctttctgggtgaaatactttttcaccgatcacagaagtttgaaatgacctgagctaatattgagtttattgtgggactattagctaacattactttgcagtctatagaatacccagacttagtgaagtcttgagaaaatatttcaggtgggaagaccaatgactttacagtggataataatggtgtgttacggtttatgaaatgtgtttgcattcctatggatgacaatattaagagagaaattctaaatgagtctcatacaactccttactctgttcatcaggagataacaagaatgtatcaagatcttgagtctatgtactgatggcctgggatgaagaacgatatagtagagtatatattgcaaggtgtttaacttgtcagcaagtgaaagttgaacaccaaaggcgtgcaggtttgctgcagcgattgaaccttctataatggaaatggaaagacattgccatggacttcgtagttaaattacctaggactacgggacagtgcgactctgtgtgggtcattgttgacaggtttacaatgtgggtaacagtgctcatccactgttctactgtaataatgttagtacctccaaaaaatgttggaggttgcagcttgacaaaatgctcaaaaattgagtcttggtgaggcagtacaaatccatggttacccaccactaaaataggagctagtggtaacacttgttcaactggagctacctgggctggttgcctaaaccgacgcaactcatcttcttgacgaagtacatttcaaggaacatttgctgctagtcggtaggtggattagcattgtcaacccctgtattaatccctaaatttcataaagacacaggcggtgccagtggattggtttggtcattagctctacaagctcaccctatggtctagttgatagattagggtctattttctctcaaatagccctgaaatcaacaatctctgcaagttaggcaccaaaacaactcttacacacttattgccttaacc

SEQ ID NO: 233605 - DNA, 1712 bp, Cannabis indica
cccagccaagaaactccgaaaatggcttaccatttttagtgatgtttaaaacccccattttgatgatttctcgatattgagggtattggtaccctagtgacctaaaggaggatttacagtgatgaattaaggacatggaacaggtgaggtcaagtgattaattgttcttttagttgttgtgacataaggctcgtgattgttgatctttctccatttaagtcgactggcatacccaaatcgaaacttgatgtaagaaaagtacattcataccacatagcctgttaagatacgttcattatcgttatcactcgattatgatcgaggtaatgggactgtgattgttgttaagtggattaaagtcatgacgtcaagtgaaaccgttgttaagtttcttacttgttgattgtcttattatacaatgactgagatatatggatgtcgggttagggcatcggttttgcctcattagacaatgaaatatatggatgtccgattagggcatcgacttttccttattatgcaatgagatatatagatgtcgggttatggcattgactttaccttagtaggcaatgagatatatagatgccagagtagggtatcggcattgccttattaggcaatgagacatgtggatgtcgggttaaggcatcagggttgtcttattaggaaacaacaaaaatagtttttttatgaagtaacagatatgacttgtcttattatacatgtacttgagtattactatttaattatgttattattctgatttagatatctaattgttatttagttttattgtttacttttcttgttgagtctttgtgacttacaggtgctttgaggtgcaggtaagggcaagaaaaaactagggcagccatgatgacgatagtcttattcggaaaatgtacatatcgacttatccgactcgtatgatcgagttgataggagttattttgggttgtacctgatgtgcattttgacttactgttgtatgtagccttttttgtaaaacttttgtaacacaggatccctgaaacaattttttaacgatgtcatcatcttcattgttatggttttattttagtaaaatttttattatcatcacagattttattaaataattaatctattattactaaacgatgttccaaaagtacacatgtggcgttcctagggattatggtgttacaacttagtattagagcaactatgattttaaggtctggaagactggttggatatgtacatatgctacgaagataggttggcttgtggtatagtaggtgtgatgtatttacttgttatttgattatttgcttatttattataaagtatgctagaaaactaataagataataatggtgatgtgattatatgtgtgagattagcttattagtattgatatctggttgagttataaatggttggaagttgtggatcataggtgcattagatcaagcaaccacaacgattaggccgattgaaccgcgagctggggctcgggataggtggttaggagagaatcctccaccacctcagaactggaacaagtgtttgctactatacaagatacatttaagtagcaagggaagcaaattcgagacctgagaagcaacaagcttgtcctgtacctttttgacaactttgacatctgttttagcataatgcaaaatttacatcacaatgaatattatacttttgtatttataatt

SEQ ID NO: 233606 - DNA, 1301 bp, Cannabis indica
atcatcatcatcatatcactacaagcgatctagataatcttatttatcttagcaacataagtgttctcgttatcattcctttataaatctctaagcatgttacttccatttaatttagttcaattcacgctccttgggtttaattatccaccatataaacgtctcttttatagtattaaatagctcaacccacttaatcatcatcctcaaccctcctaaaatcccgaataggtgtaatcatacccaactcttccacctttagtggtcctcaatcacttataaaacaagaagattccattctcagatttatttacacagttgcctcgaatggttactcacatcctataacccacttgagcatattgaaagaattttaacttatcaacaaaccatcttactactttaccaacactctaatctatctacctcaatctaccatgtaatgacgtacatcactttgcgatcaaggtgacaatggattacaatttccttgatcatttcttagctgtcaatttttccatcgaatctcacaaattcccacttggacatcgtactcgatactttaccaatcattgccttacaccggtcacacttcccaaataacaacaatgctagtaagcatttccttacttgtcaatcagacatgtagatattctatgctttctcaattagtataaactcatgttatactattgacaagcttagctcatgcttttctaaatatatttctaacaacatcgtatattaattattcatagaacaagtaagaagataatacttactatccatgagtcgtgattgtcttcacagcaaatgtacatatccagccagtctttaggatctttaaaactgtggctgctctgagacgatgttgtaatgccctaacctctaggaacgccacttgtgtgtgcttctacaattagtttatgattataaactaacaagtaaactaacagttaaagtaaaaaatgtgatttaataaaaaaattgctaattaaagtcatggcatcatcacttttaaaattagggatctcctttaaaatattacaagatgtgccattacaatataattacaaaatacatgttaaagttcagaacatctaaaaatgccaatcctgacaagttggcaccacttgtcggataagctgatatgtacatttactagagaagatccctgactcatagttgtccaaatatttctacctatgacatacacacatgagtcacaaagactcaacaagaaaagcagtaatagaacatcacatctccttacacaaatatcaacaattaaactcaataag

SEQ ID NO: 233607 - DNA, 1659 bp, Cannabis indica
tttttaccagggcagttcgtgagatacaatgataaaagtgacttttgccggcacattacactattatgctggcaaaagtaagtacttttatcaatgcacttttgcgatggtacataaaaagtatcaaggggaagggttttacacggcttaattgttatgtcagcgcaaattaatataagttgcacgggtaaaaatacattttgccaacgtaaatgtgtgccgctatgaaattgtgacctttttaattcccagcacaatttaggagatgcactgataaaaatgactctttccacttccagcgcattaattaacgaattgcgctgacaaaagtgatattttttgtagtaatatcacactacaagaaatacgacttttgctagcacatttttatgttggtaaaagttgagttattatgctggcaaaatagttattacttttgccaacacaaaacaaaattcgctggcaaatccatatatattaatatgtataatggtaatttgttattatataataggaaaataaccacacgtacattattattagaaactaatatataagaaaaagacaaggtacgtaggtacgtacttaagtttcatgcatgcatggagatatatacgtacttacacatacatatatatatatctttaataattaatgatcatggattattggagttggagcatatatcgttgaagaggtggttttctctgataagtgtcaactataaaagtcccaagaaactctttatagaagaaaggtctatagagtggaggattatcatcatcattggtaataagagcttttctggttcgactttgcaactgtgagaaggataaatgaagtttccaatggtccgtacaacttttttgtttgtcacaactctgtgttcagcactttttagcttcccattgctgataatctaacatatcaatatgtaaacaaactataataagatatatcataatgattttttggagaaatatattctgatgatttattatactgaaaataactaaataactagcatatttaattaactgtgtatttgaaattttttagttgttttaaatttgatctaaattattacaattactaaattgttctcttttgtccaaaattcaagagaaacccaatttgatagatgtaatagtttgaggacataataaatcgacatttgaaccgaaatttctttattaattagctttcgtaattgttacataatcttaattaaaaaaataacggtacaaatactttatattgcatttattgtaattatttaatacatagtctaattatattttgtatatttttaattaaaaaaaaagataaattataattatttaatacatagtctaattataatatattgtcacgtgtatttaagtttggcactaaaggtagagtcagctaagatgaactataggctcgcgcctaggacccacccagcctaaggggcccaaaaaaaaatattttctagttttcaaaaatactacatatattttaaataacctaataatttctattttttaaggcccacccaatctcagggtcggccttaactgtccaaagagtatgactgcaacaaaatcgtaaaataaggtaactgcttttgctactttttttattattattatttaagtcatatgtgtaacaattaca

SEQ ID NO: 233608 - DNA, 3264 bp, Cannabis indica
aacccccttatcttttttttgtggcaaaattcccttatgttttaatttttatacacttaacctctttatcttttattttgatgataaaacctccttaagcttgctttcttttgcaaatttaaagttttagtaagatattaccgttaaatactaactagattactactcattcgacttcgagatttttactgttacatatatacaagtgtatacaatggtcatccagttgatatttaacgataatatttaactgacgtgttaaatttgcaaagaaaaataaacataagagggtttcaccaccaaaaaaataagataagggggttaagtgtataaaaattaaaacataagggagttttgtcaaaaaaaaaaataagggggttaagtgtataaaaattaaaacataaaagggtttcaccataaattgctctattatatattattaatgtactaattaaattttagcaaaattatataacttaattaataaccataactaaataattttacaaatagaaacatttatcttaaatatttatactatctattcaaatcatacatatatagagatcataacttcaatatcatacacatactcgtaacataatcatatattaacactataaaagtataatgtcataatcatatcgtgttattaccataatataggtgtatcatagtcattatatacataacttagatctaacttagccctacaataacttggacatgcgtagccctaccattattataggatagggtatctctacattcaacaacatcgtcgtatcataatttaatgatcttatcccgtatcacaccccaccgtggcccctcatatgtactcgagatgttagcatacaacatacatcatatacaattcataacaactataatatataatttatcataatccatatcatctccaaaactatacattcacaatatcacgtacatactcataataggaaaccttgaatcatactctaataaataatctatatttatacaatttaacacacaaaattacctaatttccttaccttatgctcgttataaatgtaagctctcgatcaccttctaagtcttatcattaaataacaataacttacatttagcaattaacttagcaatttcgtaaccccaaaactacaaaaaatttaaattgaaatttgactatgaaaaccttataatttgccaaattaatatttacaaaatacgtagataattgaaagagttttccattggtatccaaaatattaaaattggagttataactgaggagatatacatgttttaccgaactattttttaaaaatcctgaaacgaacggatttcaaattacaacaaccagatgataattttttacttagaaaaactctgaatcatagagaattctcttcatgaaaaatgtagataatttattaagctttaaaatgatataaatatctttagaaacaaaccaaggctgagagagttatcataattttatggaaataatttcttagcaggaatatagagtaacgaattacatggcacaacaaaaaattacaaacttttgacatagaaatattctgaaccagacaaaaattacaaacttttagaaaatttaattccatttcaaatgacacaaaatatttaaaatcagacttatattcaaagagatattgcaaatttacccaaactgattttccaaaaaaattaatgaaatgtgattacgagatacaatcgaaaaacataaatttttattctagaaccattctgaattgatataagacttcttcataaaaaattataaataattgaataaactttctagagacaccttgattgcgtgaattaaatataaattgagagagatatgcctcctttactgagacatgtttttgaaaatgaaaattataatagatataaaccctagataattctaactattgaacaaagaacatgtttcttacctctttaaaaatccttaatatgatattttaagcccgggtcttgattaataatccaaaacttcatgaataaaggagaaaaataagaaaataataggaaagttttgaaatggtttggcgaccgtgagaacttgatgggttggtcaaagatgtcacgacaacaatagaatgagttataatagaattatatcagactaatttaggattttgagttgtcggtttagtcaggatagctagaaagtgactaaaatgccctaggttatattttaacttaagtgattttggagggtaaaatagtcagttcattgggtagtatgttaatttgtcttatatggatttattttaggctgaaatagggttaatattaggttttttttttctctttttaatttaattaaatatttaggaattgaagataaaccaaaatttctcatcccaaatttcaggccaattcttgttagaaatcagcattaggtgttctccaaaactttgaggtaaggttctccaccaatttttgatgatttctaggttgtagattgagtgttgtttggggttttgcttggtttcgaggttgtgggttttgtgagagttcagggtgtgattttaggtttaaattaggattatttaagtatgctttggatgcattacatggctgttaggactagaatttagagaattaagtttaaaaactcaattttcactcaattatggtggatttattattttgaggtattactgagtattgattgcttgaatatattatttttatattgttgaactgttcaagaaagtttgaataggtttggagaagatttggttggatttttgaagtaaaaattaggttttccttttctactagcaggaaccggtggaccggttctacatgtcactgaggaaccggtctaccggttggccaacagggaaaatcctagtttttcttcgaagctggtttttactcgagatgtttttctagaatatagtttagggtattttattaatgtttaagctatttctaagccaatgggattagggtttgtctagtttcaaatttaagattaaattcaaattttagttaagttattcatcaagtttcgttgccgtgacataggaccctgggatcgtcgagcattgttccacttaggtcgatccgtacacctgatattggattaaggtaagaaaagccaattgcacagcttagcatgtcaaatgtgatatgattattatcgtttatgactcgattatgattgaggtaaagatacggtaattattagggtgagaaaaaaatctaagaaactgaccaaaccgagtacac

SEQ ID NO: 233609 - DNA, 532 bp, Cannabis indica
tattagaattgtgtatattgcatttagatggttttgggtgaattttagggttgagaaatgtgatctaattgagggtttatgccctgaattttttggtcatctcttgaaggtttgaatgctttgaaattcaagcttgtgatttttgtgtaatggtgtgatttgtgtttcatgctttgtaatgagttttaattggttattttgagcttgttgtggtactcttttgggtcccaaaattaagacgagttgatgttgaattgaatttgaggttatgcatgatttggataattttggtatgaaatttaggttagttttcgaaggaatgaaaaaataacatttttggggttttagggcccctcaccgcggccatggtttggctcgatgtggcatgggcaagcaggttgtggccgtcgcggccatggtgtgcctcgccgcagcaaagccttgttttccctaggaaattttgtatacttgtttttgccataacttttgattcgagactctgttttggacgttcttgatatcgttagaaagc

SEQ ID NO: 233610 - DNA, 2467 bp, Cannabis indica
aaaaattattaattttttttctcatcatgtattgcaatagtttgtctattcatttacaaaatagaaatagacattccactaaaatagtgaaaaagattattccattagaatgacattctattttattgaaataacattctaatactttaatatacaactaaacaaagtaataaaataaacattatttttttttctactccattctattttattaattcgaaccaaacaccccaaaaaaggagagaaaatatggttaatacattttccgcaccgcccagtcccacttctgaattcaatcgggaagatacagaaaaagttttaagatttcaaaattttccgacactcttgtcggatgatgtgctatgtgggtcatccactaaaaaataacaattaataaaataacagtgtttttttaaaataagaataatttaccgcaaaaactcttaaactatcaatttctttgtaaataatcattcaatcttatattgtactgttctgtttacatttttaaagtgtcctctgtgcagcctaattaagtgctaattttatctacgtcccgtaaaaaattatcctaagcgaatatattttacaaaataatagctttgttgtttcacaaattaagccacacacaatatggtcatttcaaacacagttggagtcaatgtggaaaacaggttaagtattatataagctttaatataattcccaagagaataattgatcgtcacaacagaagaagaaaaattaagatgatattataataatcaatggtacaaaaagataatattaatatagttaagaaaaaaagaagctaacttgaactagtttagagacatataggaattaggatcaataatggagaacataaacattgtactcaacaacagcattcccagttttgagatcaaacttatgagtcttggcttgagcatagcctctagcgaacctaaaaagcccacttcctccaacgataggcatctctctcacctccgaaaaaacagcgtttcgtcccaaaatactcagagtgctcccattatacttcccctcagtaaaaacatagttcaaaaccatcaaaagtccccactcagattgtgaagccgacccatacataccttgggctcttccgacctgcttcgagcttagctctggcccaactgtcaatgggtcatccatcatcaccacgaaaccgaaccccgtcgatgaatttttcattgcttttccttcggccacgactatggtggtcggatttcggcccacaacgacgtcgtggaagtagaagtggaggtggctcaccttctctgctttatggaggccgagctttttacgagacaagtttctcgagaaaatttggcccttatgatcgaattcgtagtcagatttggtagccgtggcgagggttttgacgatgaagatgaagagaaataggaaagttggggtgattctttgtatagttagcttgtccattcttgagtggtagaggaaaagaagatgctttttgagtacaaatgtatggttttataaagttgtaaactaatatacaatttttaattgtcaattattaaaataaaatgtaatgtaataactaacaaggaaatttgccgcataataccgtatgtttttaattatataaacttaaatactatattttttacagattaaatacataatattgtgttttaggcctctcttttactatcattgtattagatgtgtaaagatgtacacttatattaaagcaaaaatttcacatttaaaatattaaacacaatgtcatattatgtgaaattcatattataaaagtttattgattttatattccatcaatccaagactagaataatcttttaattacaattcttttatttaatagaaatacattttaattctaattacgatgatattaaataattaaggtaaattttaagaatattaagctgaatttaaaattgcggctaaactcaatcattttagttaaatgagttgtttacattacttttttttttatgaagaatcaagccacttgtaattcagaatatgatattttagtatttgaatacaagaattttgatatatgatcatttttaggaattttttgtcattacaaaatttgaaaaaatttcaagatgaatgaccttttagcgaccgcacttagttatagcaactaacgtatcattttatatgaatcaagtaacacgtagtttcaggatgatctttgtgatactttaataaataaggggtgaatgacctcctttgtatggctttagattttagtgcattattgaattttatggtataattaccatttttttaaaaaatttatgaggtaaataacctctttagaattttggactgacattgtattatttggattgattttgtgtgtcatttgaaattttgtaccattttatatggatttaaaatttgatcatttttttttatcttgaaatctctttattattatttaaaa

SEQ ID NO: 233611 - DNA, 2974 bp, Cannabis indica
atgttctggacttaacagattttgtacatatattaaaccataatcatgaaaacaacatgttaacataaatgattctaatctcttattgataacaagtgagattagattgtaatggtttttatttagggcataaaatcccaacatggactacttataagaattttgaaatataattctatattgtcaaatagtgcaattctatatttataggtgagtaataatggaattaataaactagattattttcctgatgagactcaatagtaattaggtgtttactggagcttcgaaatatagctccatggtctctagatcacatttatacaacattgtacaggggaagatataatttagttgtattgattctagagataataccacacagattcgagggtattaccttataatatctagctatgtctctctttgaatgttacaatgatgagaactgatgtatgccaatttgtgaacaagtgagatgagaaaacagactaagtatcttgtgaatgaaagtgtcatgtgacaaaggagaagcgagagtgctttaaggctcgttggacttagaatttaggtccttttcacattgcctaattccctttatatagattaagaattacaaaagatctatattcacgcaagtaaatatccctttaaaataaggaatatcagtcttttataatatatttaagtcacaaaactagctaattaatatccttaaaagataggtagagagtttagagttgaattcctacatttgtggtttgttggaactgtctcgtagatgaaaacgagttgttacccgtgccagaagatggttgtggaccccaccatttgattaggcttcttttgatgctcttcgatctttgctagctggcctaccttctgtttggggctggctagcacatagtcatccttggccagtgaagatgtggtctgactagaccttcttggctggccattttcttgtaacttgatcttgcttgtgtcttttgatcccttgcattgatgtgttatgcatggtaattttactcacttattgacacgctgtattccaagtatccccagtctttcctatgtacacatgccacgtcatgcgggcaaaaattaggataacattttcaccccaagtccccatgaggttgtctatacggatagggacgttttcaacttcagctctggctattaaaaccttaatcgggcagcactggtcagccagatgcttggcctttcatatgacccacttcatgataaaaaatgactttattgccaatcattatggggatttattttaatttattattttgctacacattttcctacttacaaacccttaatcttctacatggtgctatttttgaggagaagtaactacccactaagtttttgggggaaagtgaatgagaacctatataaggttcatttggcttaactcttcatttccattttattatctctttctctctcttgtttgaaatgtccttcaagaaaaagaggaaaaaaaaactcttcacttcctctagcaacccaatgccccaagttctccatttcatgatgtttttgcttctttttaacaatccaatcttcccacaagcatccacaacatacttcattagtgggtaagtcttcaaatctcattttcttattgttttcttgttactaccattgacgagtacaagcttttagaaatccttgattctcacgttatagtatagttttttttcacattataacccacatgatagctttagtatgaataatgtattatttttttatgaaaaagattagattttgagtttcgtttagattcttgacacttttgagtcacaaagaacggtcttcgagtttttaaaaaatagaattttgatcttaagaaactcttggtcgacacacatggtttgtttatgaccctagcaagcacatagtcttagtttaggaacctggtcggttctcagcttccagcctgagaacttggccgaatcatgctctggtcatgagaccctggccggcacacacacctttattttgagaccctggccggcacatggcttcatcccagcaacttggccagttttggccctcttttgaccttagcaaagactccacatggctctttgagcctatctcgcctatatccattacttggttcttttaagaactttgtatggcatatcttaggttgagtctatattggccaattagcagcctaaactcattgttgtttaactttgcgcacttggattttgtactttactgaataacagttttgtagattaggatgcctggctagtacccttaggtttagttgactcatactttatctaatccttttattttcgtctggttgctcacctccgtctacccctttattttacacaaattaacttgcgtgactttttagaaggtgacaaccggatcgacaaagacttgcttagtcttatctttccagaccatcgtccagctccttcagctagttcttcttctaagggttctttgggtaggccctcgagtgcttttgaggttagcagtggttccccagaacttgaagtccaacatcaccactatttgaaacgaatagataattaattttagggtaaactcatttaggaactaaactagaggtggaggcagttccttcctagtttatggacttacattgtccaagatggtgtgcctgatacattacccacaagttgggaaactctaacagttggagatctccctatagctgagactgctattaccattgtcaggcactctgagcttgccatagctaagaccaaatagacgtgtcgtagggtatctcctcatgaccctcacattgttgtgttgatgatgagagggagggtccataatgtacaagaggctgaatagccctaacctgaccagcttgaggccgactaggttaaggagcttgcagtcgagcagcccatagccgggaaggatgaggagacctcaaccggtcatgatagtgatt

SEQ ID NO: 233612 - DNA, 1634 bp, Cannabis indica
aaaaaccaacattccagagtagtgtggccaatgtctttgtggtacttacaaaatttctttgggtcccttttatcgcggctccccctgatttggggaggctttttgaagactccattcttctcctcgatggcataaatacggtcctgaggtactgccagctccgtgtaattcacgaagcgcggaccacctttcctcttcggagaggattctttctttggaggggacttcgccaattatggacttcactgtctctgtgtactacgtcttcttggactccttcctctggaatttttccctctaggactggaagatcgtgaccgggacactggtgacttgcgtttgtctttgcccttctctagctcagccagagaattttcaatcctcttatgcggttctacgatagcgaagaactcgaccaatgattcaggtcttcgatcttccagttccttccaaaaatcggttcttggcaggacacctgttatcaacatacatactagcgaagactcgagagccttctctacttttgttacctcagcattaaattttttaaaatagtcttgtaaagactcaccgtgttcttgcttgatattaggcagagtggtatagggtggcctataggtcatcgtggcttggaaatacgtgaggaaaaggtcgacaaaggtctcccatgttgagatggatacctcaggcaattggctgaaccaatcgtggacattctcctccaacgttgccgcaagaatgtgacacttcgcaagttggggtacttgatccacttccataatagtattaaatttttctaaatagtctattagattagtggtacctttatactttagggattcggataaccggaatcccttgggcagtagagcttgtcgcacttctgtagtgaaaggagaggtctcatggaggtgcctcgcggatcagtccctcgacgtcggttggttcaaatcgaatccctcttgattggccctacactccctgcgaagacggttagtacgacgcctagaattagttacctgagggtaatctgtgcgagtagtaggtacttggagaggacgtcgagtcctgtttcgtccatcaacctcggcctgcagagcgcgtagctggtcttggattgcagtgtactagttgatagtcagctggataatgccttcggataccattttcggagtaaaaggtggaaaatgtcctgttgtggctgctggtgtagatgtttccccagcgtgagggctagtagtttcagggaacagattaagaggcgtcacattgccccgtcctactccgctgttgatcacatccatgagaggcactatgcttcctaacagtgggacattcatcattctgatattgatggatttgttgtaaagtcctccgtttgcttggtttcgagccattatgattctccttctaaatcagcaagaaagtatttcgattcccacagacggcgccaaatgttgttaaaggaatttcacaacaccaaaataaataataataataataaagaaatgaataagtgcgagtattcaacctagaacgacaagtactcgagctgggaacacaaatacttgacaaaaactggaaatacaaagaacacgagagaatatagtggttcagtcagatcacggtttgct

SEQ ID NO: 233613 - DNA, 720 bp, Cannabis indica
gaggatgaaggagatggtgaaaatgagttaatcacaagctcgatcaaggatgctttattggcagatttattcaaagctccactctcgcctagatcttcgttacaggctataaaacgccaagacaaaatcaacaaggacttcgaatatttcctaagtgctaatcgacaatgctctactagcatacatcaaggtaatgttgttactccaccaattcttagatctgacaatgttgttcgtaatttggaatactctttcaagaattctggtaatgctcaaaaggtcaaaattactttaaaggatatagaagatgagataccattctggagctcctctattgtgtgttatgtccttggtgctaatccaccattatcgtatggagttttatggtttgattcgatacaatggaaaacaaagatgaaatactaaatggaggctatgtgttcttcaacaacaggctagtggtgatgaaagcttgggatccaaatttgaatgtcaagaaagaagacataagaacggtgccaatctggattcaacactacctgatttagatttgaaatactggggtgagaggtctttattcaagattgtggggcgattggggacacccctacaagtcgatcctgtgactaaagaaaggaaaagctcaactatcctagggtgcttatagaagtatcgattcaacaggagtttcctgcttaaattcattttgaagatgagcat

SEQ ID NO: 233614 - DNA, 1172 bp, Cannabis indica
agatcctggtaaaataaattccaacacattgaacattttgttcacaagcctctgatatgtgacccctgcattcttcagccttgaagggcgtgattttgtagcagtacaagcctaagtctgtcatgaagcttgtatgctcttaatttggtggatgcatcttctttttattggctatggacaaggccaagttgtaacagtgacatgtagattttcggtcttctctcaacatccttccccctacgttgtataaggccagtcagcccatcatgccattgaaagtcgagggaatgttgattaggaagaactacgccatcagagttttggtggttggattttctccaacaatgagaggtaatttgatatactcgatgggtgtgatgccctggccaaagaggccatacatcatttgactggaagaagccaagttagtgagttggaacctcatattctcatatgttgattttaaaagaatattgaaggaggctccattgtccaccatccacgtcatattcccaattttgtgcagtaatgaccaggagtcgttgtgcgggaaactgacttgggcaagatctccttttgagaaagagatcgtgggctctccaagattttgttgcttagagtctcgttctttgcctaccacgatgttgcttttgggctcgtcatagagtgttcgagcatagttctccttagctttgctggtcttgcctgcatatggggtctgccaatgatgacccccaagtgtcctgccatcgtaggttttggcagagttgcgctggcacctgcctatgcgcctgacaagagatggaggctaggctttcgagatggaggccaaccttcagaaatggaggtcaaccttctcgagagaagtacaatcagagccactacctccaaatttccagagtttgagtacatgccaccaggaccgaggctctagtattacgaatggtcctcccgaacaccaaagtccaaggggtaggagtgttgggagccaattgggaaggcccttatcagctttccaaagtcatcccaccaggaacataccaattggcacacatagatgacacgatagtatgaagggcatggaatgtcgaacacctcaagaagtactatcgttgaaggatatatggaattcaagtgtacaatgctatcaataacgttatacacttcggggc

SEQ ID NO: 233615 - DNA, 742 bp, Cannabis indica
atgtcagcctaacgcgatgggcgctagattttgggattttcaactttttaatcaatctctgttggctaaacaagtgtggagattatttctatacccaaattccttgcctgctcaaatttttaaacataaatattttccaaattgctctatcctagaggccactggaaagaatggttcatctcatctttggtcaagcttgatctggggaatggatttgcctaaatacggtcttcaaagatccattggtgatggaacacaagtttgggcattcaagaacccatggctcccgcatcagatgccttttcagctaataacgaggaggattaatgatgcttgtcacgtgagtgaatttatccttccctctggtgcttgggatgtggtgaagcttcaacaggtttttttgtcaatggatgtggacataattctgtctattccattaacgaggcgagaggcaaaagatggatggtactagcactatgatcgagacggggtttgtaatgttaagagtgactactcattggcgtggtcgctctaggttgaggagggagttgccaatttaaccatgctaattcgttggtggaatggagtagggaatcttgctatgacaccaaaggtgaaaaattttgtttggcgtatgttctatttggtgttatcagtagcaacacaacttatctcctggaaagttcaggtacctctttgctgttaacaatgcggagaagaaactgaaactcccgagcatgct

SEQ ID NO: 233616 - DNA, 9120 bp, Cannabis indica
ttaaatttgtttggtaactattattaaaaaatgttctatatatatttataattatctatatatatgcatgtggggtgcactcttaatgggtattttttaaaaaaaattgagtttttatgtttaattttttatttaattaattattattattatttttacattatatgggatgaggttattttattggctgaaagaaataattaaaaaaattatttaggcaaaaaaaataagataaaaaaagagttagagtttgacttagatatatttatataaacatatttttaatgtagtgcaaaaagagagttttttaattttttttaattaagtaactatattaaacataaaaattcaaatttttattttattatttcattcattagatcagaatctaatgatttaatatttttttttagtcaaatgatttctatatttatagttaaattatttagttaccattcaatgggttaatacctgttgagaagtgattcttgttttcttatagagaaggttcaaaaaaaaacaagtaaatgatcatttagtaaaagtaaattttagaagcaccagttgttgaattatttacttttaatcaaataattaatgttactaaacatagaaaaagaattgttgcaatatattatttataaaataatttgaatgacatttatttttaatatcttaaaaagctagtcatgtattgttttctcaaaaaaaaaaaaaaaaaaaaattagaaaaagaattgttacaatatatcattgatcaagataaaataatttaaataacacttactttttattatcttaaaaagctagtaatgtattgttttgttaaaaaatatattaattgagtttccataaaaaaaggttcacattatcttaaaaagccactaatccaatcaattagtcaattgagtttccataaaataaaagataaaaaaaaatcagataagacaaattaagttaacgaaacttaaaacaccaaacttatacttttatattattattattatgtatagatttatttttacatatttattcttaggtaaaatcattaaaatattgtattttaaatttttagttacacttgtcaaataaaacattactactattattaatttgaaatataatacaaggagtaatatattattgagattcagttccacataaaattacaataaagaaaggccatagtagtgatattacttcttgaattgattgtgtttcttgctatttttggtcagaaattcaatttcacttacctactaccatgtatattgcttctagactttcatcgcttactcattgttcgctcactgtaattgtcaacagtttatctaatttttgcacttctgtttgaatgtttgtctgcttctagtaatttaattttcataactgtccgcagatatccgtcttcaattcaaaccctgatgttgtcatggttggttttcgtttgcatgtgggtaatacatcagacaaatcatattccttctagaaataaatatttttcagagggttattaagttggacgaggggatgcgatcttggtatgacataccgtttacagttgctgaatcactccttgccgatgaagagtttacaatctcttttggaccaacttttaatggttctgcactacccagaattgactctcttgaagtttatggtagggctaaggatgaatttggttggaaagagaaaatggatgctgtactggacatggaagctcgtgcattgggttgtaattccttgcttgcgggagctagtagaaaaagacggtctttgcagtctgctcctgttcaggagcaagtcattgcagatggtctcaagcttctttcaaatctttattcattctgtcggtctcaaggatgctcaaaggttgaggaagcacaaacggaactaagcgaacttaagtgcaggaagttactagagaagatatttgaaagtgatcgggaacccttgttgcaggctgctgcttgccgtgtgttgcaggctgtgtttcccaaaaaagaaatatattaccaagtaatttcagaatgcatggttttgtataatatttgtgttttaatgtacttatttgataatctgttcacaaacttggacattgtttcatcattaattaggaattccttacacaggttaaggataccatgcggcttctaggagtggtgaaatcaacctctgtactctcttctaggcttggtgctggtggtattgctggagcatgtctaatagaagaatttacagcccagatgcgtgcagtctctaagattgcattgcaccgtcgatcaaacttggctacttttcttgaggcaaatggtagttgcatttttcctgatgtcatatgtttatttgaatttaaaaattttaaggcactttcaatcgacattagcaaaccatgattattgaagcatgaaatttttggctctacaaaggtgaaattgttgaatatttatatttatatgtaattaatcaaagctgctttgtattaaattagaatattatttatttatctactagtttctgtgcccaattttaagatttcttaacatgtctaacaaaatgctaaggtgttggagtgggctcatcttatggtagttttaattggattttatgctttctgctagcgtggcctgtgtataggtcttttagggtaaaatattatttaatgtcaaggctattctttttctttcttctattgcttctttctgtttaaaattgtgctaccactattcaatcacatccctttttttttgtgaatgatttgtttactgtttttcattgtgttctattgtctgaaatgtttgccgttgttcatgaaggttctgaagtggttgatggccttatgcaagttctttggggaatattagactttgagcaacctgacacacaaactatgaataacatagttgtatcatcagttgagcttatttattgttatgcggagtgtctcgcattacatggaaaggatccaggagcgcacacagttgcacctgctgttgttttattcaagaagcttctattttcccctaatgaagctgttcagacttcaagcaggtaacttaaagttttttaatcggtatcatgatcttaagagttaaattgtaagatcttcacctaaaccttactttctttgtcagcttggctatatcttcgaggttgcttcaggttccatttccaaaacaaaccatgttggccacagatgatgccatggaaaatgcagtatcttctagtatgtctgtcgatgcaactcctggaaatccccaagtaatgaatgaagaagattctatcaattcatcagtacagtactgctgcgatggttgctccacagtacctatacttcgaaggcgatggcattgtaccatttgtccagattttgatctatgtgaggcatgctatgaagtactaggtgcagacaggcttcctccaccacattctagagatcatcctatgacagcaattccaatcgaagtggaatcattaggagcagatgggaatgagttccactttacacctgatgacaccagtgatcaaagtatgttgccagtcccagcaggttccagcatccaaatttctgctccctcaattcatgttctagaacctaatgaatctggagaattttcagcttccgtgaatgatattgtttcaatttctgcttcaaaacgtgctgtgaataccttgcttttgtctgaacttctagagcagttaaaaggatggatgcaatcaacttctggggtccgggcaatcccaattatgcagcttttctacagattgtcatcagctgtgggtgggcctttcatagatgtctctaagcctgaaagcttggacttagagaaactaatcaaatggtttttggttgagattaatcttagccaaccctttaatgccaaaacacgttctacatttggggaagttgcaattctagtattcatgtttttcaccctcatgctccgtaactggcaccaacctggcactgatggatccacttcaaaatctgtcgggactacagacgcacatgataaaaacgtaaacaatgttacggcctcaacttcctctgatgatcaagaaaagaatgactttgcatctcaattgctccgagcttgcaattctcttaggcagcaatcttttgtcaattatctattggatatcctgcaacagctgatgcaagttttcaagtccccagctgctagtcatgaaagtgggaatcttggttctggttgtggagctctactaacagttcgaagggatttgccagctggaaacttttctccattcttttcagactcatatgccaaagctcatcggatggatatttgcgtggactatcatagactactgttggagaatacttttaggctcgtctataccttggttcgaccagaaaagcaagataaaactggggataaagagaaggttttcaagatttctcctggaaaggatctgaaacttgaaggatatcaggatgttctttgcagttacataaataatacaaacactaattttgtcagaagatatgcaaggaggcttttcctgcatctttgtggaagcaaaactcactattacagtgttagagactcttggcaattttcaagtgaaatgaagaaacttttcaaacatgtaaacaaatctggtggtttccataatactgtaccatatgagagaagtgttaagatagtgaagtccctaaccactatggctgaagtagctgctgcacggcctcgaaactggcagaaatattgtttgaggcatggagatgttttgcccttcttaatgaatggagtattctacattggagaagaatctgttgttcagactctgaagctcttaaatctggccttctatacagggaaagatattggcaactctttacagaaaattgaagctactgatactggaatcagttcaaacaaatcaagtacacaatctatggatcaaaaaaagaagaagaaaggcgaagatggaatagaatctggttcagaaaagtcatgtttggacatggagtctgctgttgaaatcttcactgacaaggatggagatgtcttgatgcaatttatcgattactttctactggaatggaattcaagctctgtccgttcagaagccaagtcagttctttatggtgtttggcatcatgcgaagcagtcagtcagggaagccatgctggtggccctattgcagaaagtaaaatgtcttcctatgtatggtcagaacattgttgagtatactgaacttgtcacatggcttttgggaaaagttcctgatatcagtttaaagcaacaaaatactgaacttgtggaccgttgtttaacctctgatgttatcaggtttatctttgagacacttcattcccagaatgagcttttagcaaatcatccaaattcccggatatacaatactttgagtggactagttgaatttgatggctactatcttgaaagtgagccttgtgttgcttgtagctctcctgaggtaccctacagtaggatgaaactagaaagtctgaaatctgaaacaaaattcactgacaaccgcatcattgtcaaatgcaccggtagttataccatccaaactgtgacaatgaatgtacatgatgccagaaagtctaaatcagtgaaagttttgaatttgtattacaataatcgacctgtggctgacttgtcagagctgaagaacaattggtctttatggaagcgtgccaagagttgccatcttgcttttaatcaaactgaactaaaagtagactttcctattcctataacagcttgtaacttcatgattgaactggattccttctacgagaatcttcaggctttatctcttgaaccactgcagtgccctcgttgcagtcggccggtcaccgataagcatggtatctgcggcaactgccatgagaatgcatatcaatgcaggcaatgtcgcaacatcaattacgaaaacctcgactctttcctatgcaatgaatgtggatactgtaagtatggtaggtttgagttcaatttcatggcaaaaccaagttttagctttgataatatggagaatgatgaagatatgaagaaaggtttggctgcaatagaatctgaatctgaaaatgctcataggagatatcaacaacttttgggcttcaagaagccccttctcaagattgtgtcaagcattggagagagtgaaattgactcacaacagaaggactctgttcagcaaatgatggtttcattgcctggaccttcatgtaagataaatcgcaaaatagctcttcttggtgtcttatatggtgaaaagtgcaaagctgcttttgattctgtcagcaaaagtgtacagacattacaagggttgcgtcgggttctgatgaattatttgcaccagaagaactctgataatggagtggcttcttcaagatttgtagtttccaggtctccaaataattgctatggctgtgctagtacatttgtgacacaatgtcttgagatattgcaggttttgtcaaagcattctaattcaaaaaaacaactcgttgcagctgggatcttatctgagttgtttgaaaataacatccaccaaggtcctaaaacggctcgcattcaagctagggcagttctttgtgctttctcagagggtgatgtaaatgcagtgagcgagctgaacagtttaatacagaggaaagtcatgtactgccttgaacaccatcgatccatggacattgctctggccacacgtgaagaactatctttgctttcggaagtgtgttccttgactgatgaatgctgggaatcaagattgcgtgttgtttttcagcttttattttcctcaatcaaattgggtgccaaacatccagccatatctgagcatgttattcttccttgtctaaggattatatcccaggcttgcactcctccaaaacctgatggtgcagacaaggaatccatcatgggaaaatctaattcagtttcacagactaaggaggaaaacactcaaaatgtttctggatctttggctgggctgagcagtggaagcaagtctgtttcagattccgagaaaaactgggatgcttctcagaaaacccaggatattcaattgttgagctatacagagtgggagaagggagcatcatatcttgattttgttagaaggcaatacaaagtgtcccaggcagtcaaaggtggtggtatccagaggtcacggcctcaaaggcaagatttcctggttcttaaatacggccttaggtggaagcgacgtgctagcaagacctctaaaagtgatttgtcagtgtttgagttgggttcatgggttagagaacttgttctaagtgcttgttcccaatcaataaggtcggagatgtgcatgttgataagtttgcttggagctcaaagttcatcaagacgatttcggttgctcaacttgcttgtgtctttattgccagcaacccttcctgctggagaaagtgctgcagagtattttgaattgctttttaagatgatagagtctgaagatgctcgtcttttcttaactgtacgaggatgtctacgtacaatttgcaaactaatcacccaagaagtgcaaaatgttgaatctttagaaaggagcttgcgcatcgacatttctcaaggatttatacttcacaaactaatagaacttcttggtaaatttttggaggttcctaagattagatccaggtaaactagatattttaaacagattttatgttggggatttcttttagtattatgttatttaatgtttgatattgggtcatgaataaacacgtatatcttatgtgtatttctttcaaaattcatgccagattcatgaaagatgatttgctttctgaagttcttgaggctcttatcgtcatacgtggcttgatagtacagaagacaaagttgattagtgattgcaatcggcttttgaaagatctattggatagtcttcttcttgaaaacagtgaaaataaaaggcaatttatccgggcctgtatctgtggattgcaaattcatggagatgagagaaaaaagagaacttgcctggtatggctgttgtgttatattattatgctctgttaatgttgcttatgtctgccatttgtattgagcttcttgaaatatatgtataatatggtcctgtttattttatgttctatttggtttttttttttcctgaaatatgttctattgggttttgccagactcaaattatgttcttgatttttttttctttgataagtataggaagatggacctgattttgctgctgtgttaattttggcttgtttcaattatatttgcagtttatcctagagcagctgtgcaatctgatctgcccatcaaaaccagagcctgtttatctgttagttcttaacaaggcacatactcaggaagagtttatcaggggatcaatgacaaagaacccttattccagtgctgagattggtccattgatgcgtgatgtgaagaataaaatttgccatcagttggatctgttaggccttattgaagatgattatggcatggagttgctcgttgcgggaaatatcatctctcttgatttgagcgtagcccaagtctatgagcaagtctggaagaagtcaaatcaatcttcaaactcgctggctaattcaaccttattatcttctaatgctgctacatcaggaagagattgtccacccatgactgtgacttaccggcttcaggtttgttaaagctactttaattttattttttattcccatctaataattttatcagtgtgaatattaatttaaacaaggtaaggtgttatattcttttgattaagttgtatgtatatttatacatacacacatatatatattaatatgtgtatcttatatatgtaaagagaaataagttattgggtatttttgcataacaacccatacgtttttcactctttatacaatctagtctctgaatttttttattgcaatcagttgcttgagtcctaaaaatagtagctattaattctttattgctaattttttttaccaaatttctttccttttctttgatagaaatgttgaattttttccactatgatgtcaaaaaatttgagtagtgtataatttataggaaatactaatttttctcaaagtaagaaacaaaatttttataaaaa

SEQ ID NO: 233617 - DNA, 1254 bp, Cannabis indica
cagcttgcttcctgacttcctctacatcaaatgaaatcaacataggaattgcaggtttcttgctgctaaactcctcaagaaccgagattacatgcatgtaacctaaaagcatgtgatattggaattcagtagcaatataaataatgatacattcttttagcgaagtaacaccaactcactgtagatggtgttctaatccttgagcgataagcatgagcatagtcacgtatcttccaatagcggaaagtttgatttgtatccccattccaatatttagcaggaccatactgtggaaggcattccaaggttaacgaaactctctcttcaggtttcccatcttcataaaaaatgacaacacccggttctgattctaaagtcatcatcataattgtgtcatatttatggataataatttgttagtttctcaaccacaggaataagcatccatttacacattctatatttgatctttaccaaacactttcactatttgaaattatgtcacacaatttttttaaatagaacacattcaaatgacaaaccaacattcgacacatgcaacatgaacataagtaatgatgagacatacatttaactcgaaagtgacacatgatacatttaagtaaaaaggtagtgtcatgtcagcacgatacaagcataactcactttaaacattttaaatagcgattaaaaagcacacttaagcatttattaaatggatttacatgtgtcatggtgagtcacatgtttatgtttggattcttgacataataataatcatcccaaacaagctactgcagtaactaacattgcagatgcaggaggtgccatatcaaaaccgctaatcattttgctgcaagaattaaatgttaaggaaccaaaaccataaccatatatttgaattgtgtattaaataaaaataacaatacaaactatatcacctattcaaattgttcatattctgactatcaagtgtgtataaaacactccataaacaagacaattcagacaaggacattcaacaatcaacaactaatgtaagtatgtaatatttatatatatatattattaaaggcattccaaagctacacagtatcccattagtccaatcaccaagcagaatttaaattcttatcgggcacaagcctagagcattaagccacacattataaataatataaaagagatgcaagaaaaagaatttgctataaagtcttccctcgataaaattctaggtactgatatcttctccat

SEQ ID NO: 233618 - DNA, 900 bp, Cannabis indica
tgtaggaactttctttggggtgggaaggataccagtaaaatgcatctggcttcatgggatttaggggtgttataaattagtttggtccgaatttttaattttttcaaactaaattagtattacgatttcttaaaaatttaaaaccaaaccaattaaatgatcaaaccaaactaaatcaatctactcaaaaacagattagtttggttcaaaaccatagtttgtatttcgtagtcattttgaatttttttaacaataattttttattttttcggtaattttttctacttttagttagtttatagtacatgaataataataaattattattataacaatattaaatcaatattaatattttatctaaatttattctcaaacattaacatttctttaaaaaaaatatatattaagcgtatataaaataattatacgaattgatttagtttgaactactactgatatttttaaaaccgtgatcgaaccagagaattttaaacggtccagattaaccaagaaattcacaccgaattcatttagtccggtctcaaatagtttggtctggattgattggggtttagaactacaaattgcagattatatgaacatccctagtgggattgtgtgtgtaagctaaaagtttttaagggtttagacttccatgatggatccaaatagaataaagcggctattacaaagtacatatgagcagtagctttaaagcaagattatttatagattaaatgggtatattgcattgtatatacttaaatgactaggatgtgtggtctcatgagcttaagcaagatgtgagctgatattggaaaaagctcatgagacttagggggagacattctccttgaatgagatccatgctgcctgtgttgagaacatattcatagt

SEQ ID NO: 233619 - DNA, 1455 bp, Cannabis indica
ctccagtgtaactataaataagagcaggatacactgaaaaagggatacaaaatcttttaaagaaaaagccctcgaattgtatcagaaatctaataagattgactcgtggactatgcagaattttaactgcaaaaccatgtaaaaaagctttatgttcttatttttttttcctttactgcttttattttctgtgcaaatccatcacgatttacgctttaatatagttaacgaaaatatgcgttacgctaaatatgaccagaagactaatataaaatatttataattgaaattttgttatataaaatatctacaatattttaagtattttaaatttaaatttaaattttcttatataaaatatctatataatttttatttttaaatatatatataataatattataaaattaacaaaaaatattctgttaagttaaggatattttgttaaagttaacgtaggaaactaaaataataccgttaaactaagaattttgttacataaccacattttatatagaatagatacatatataaattttaaattactagtataaaattcaaaaattagtatatatgttacattaaagacaatattccaatttaagttgttaaaagaattaatataaataattcttcaacttatatttttttttcctttgattatatatatgtgcgaagataatctaatttaagttgacctagaaaattaataaataatttctcaaatttaatatatttttctatttaattaattgaaaaatacatttattttagtttgaccaaaaattatttattattaaaagagttttttaaaaaagtaatttctaaaaataacttcaaaataacataataaatatcaattcatatattttaaaatttattatgttgctattcaattgtattaggttaaactagtataattagctagcctaatacaattatttaaaaaatggcaaatgaacctatataattgggtgattcatgtgagggagggttgagttcaaaaagaggaagttaaccattttataaataattattattaattgaataagtacaatattattaggcataaataaaactactactaaaagtgaagttttatttagcaacctagtccattttaattacctaaattaaatgtgctctttatgcatataagcacaaaaacaattaaggactcacatataaaaataagatttgaatggtcctaatatatttttaagttatgccacaaatgaaagaaaaattacaaatttacttgtttgatacaaaatatttgatttatctatcagcaaatgtatgaattattatgaatcataagatccatcatcaaattaaccacatttatttagatcatattaaataatagttttataaaaaaaaataaattcaaataaaaaacaactaataagcaaatagatagaaaaataaggattattatgcaatttgactatc

SEQ ID NO: 233620 - DNA, 1039 bp, Cannabis indica
attagtgattaaattaatgtttagtataaatgattttatattattcaagtagttttattttactatttcaattatttattaaataaaaatatgataaattattttgttatatatatttgattatacatgatatattattttattttattttataatttaattatttaattaattattttttattattttgctgcaaattattatttttatttatttattattaatccagtttattcttaaactaaacacaagattactttcagcataatctaatcttgtccagtccagtctaatccaatctaatcctacataccaaacgagcccttattcctttgtttatttgttcaatttgattcaagtgttttggaaaaatacaatcaatttacaagctttcccctgcaatggaaacacatatcagtcgaatagtgcttgagttctaaaccaaagtaaattcattatatgatagacaaattataaacaccagtgttgtacaaattcccaaatcccttacaatatgaaattaccctaaatgccaactcccttggcaaacccagtaagatccccttgcttcttgaacattgaaattatttcaacaaaactctagatctaaacacgatatacttgcaaagatgtagcttgatttgtgtatttctattggttgtgatggtttggttgatattttatattgttaattgtaatgtttgacaagtatcttatttttgacatacaagaaaaaatattgtgattaatctcaataaattttcccaataattataaaaatcaattaaaaactatttcaaaaaaaatattaaataaatttatattcatattttttttctttttgttttcttatttttttttcttttcctaaaaataaatggaaaaagttaagtgctaacaaaacatgagtttaaaggagttttaccacccaaattgggtaaataccattttggaccctctgctttacaaaagttatcaattggaccctgtgttttgttaaatgataaaatggaccctgtattttctaaaatagtacaaa

SEQ ID NO: 233621 - DNA, 1703 bp, Cannabis indica
attataagaatctaataatctatcttttagattatgctgtcaacagaatcaaaacctatgattcttgaaaaagtaaagcacaagtgttcaatttccatgtggtggtgtatttaagcaaacatctggaacttctaggtgtttgttttcttatttttgtaattgcttttagtggtttatcttccttttaagattttggaagttccttttgtcaactataggtttgtgtctttaaaaggatttatgtacatgagctcctcacttagaatcttgggattgagagccaatgaatcaaagaactcatttatggcatagggtaacatcactcttctgtttgaggcctgtctaagacaagtggtctctttctcttttttccaaaaaaaaaaaagtaattctgctagagcattagaaaaaaatgtcaatgatcttattgggaggaaggtatgcagtagacaaggagaggaaacagcatgacagatggtagtgctattaatattgctgagttttgaaaatgctagttcaaatgtagaaaaggttttgtattttttttaaactaaattattattattaaagcaaacttgtagtgtccactgaggctcagacacaatttttaaattattattattaaagcactctatgtttttgaagctgggaactgggatgagcatactgatttcaaaaagaaatccttcgttggttactacatttgctttgctttcatgtggatatgttctcagctcttaccaagaggtataattcacatagcagtatatatcatttatagtttcattgctctcaattctcttgcctctggtacttttttttttctcatattgcaattatttgttttggcaggttaaatctgttgtgttgcatacgttgaaccgggcaagattcactgttgctgtagagtccttcctaaagacaggttacatacaatgtgcaatggggattcacatatttatttttttgttgatctatttgtcttttacacttccttgttttgtccattcatgagagtttcattgggagctcaattacaaattgctgatggatgtcttatctgtgctatatatcacaggacgtgtaccttcattgaaggagggaaacaagaatgaaaacatatttagtttcccatggttgaaagagagccatgtagttcttggtatgttcaagtaataagcttgctgattgaatatgccttttatttgggagttatgacttgctagatcttgatttgaacctgaatcattttaaattgcatgcaggaccaagattcaaagatgcattccaagacccaggggagtatcttgcggtagagcctttctttgaggtgtgcttgctgtgtcttattttttttttattattatttgtgtgtttgagagagaatttctctttcccaagtctcagcctctatatttcttcctcacctaaaattatgttcagactcatcgatacttttgaagttcttcttgaccaacactgtgtttctcataaatatgttacggtctttgaattgattgatgacagagggagaaatatattgttacatataatccatcaaaggaccaagtatatgcgttgctaaaggccaaggcgaagccagatgacattctgaaggcagcgtttcatgtgagcatgcaacttaatttttgtgtctatctgcaagtgatgaatataaggcccaaatgtgtttgatattcatg

SEQ ID NO: 233622 - DNA, 5878 bp, Cannabis indica
tttttttttttttgttgatttcgtttaaggttttggaaagagatattccatgggagacttacatgactactaatttcattagtagaacatgtcttcaacttttgagaaattacgataagaaaccacatgattacaaagcacaattgctccaagaagtaataatattaataatttattttctcttctcaattaattattctttagaattatttagttaattttaattaattaattcaggatggattatcttatgtgggagaatttcttaatattttggagagcattcataagcaagaaactgttgaatatgtagtcgcattgattgatgaaatgcttcaaggtacttcttttctttttaggatgattaactaataatattaatctatactagaaaataaaatattttaattcattattgtttatgcaatatttttttaataatgtgattagatacttttttttttcctttgtgtagcaaactcagaaagagctaaattattccatgacaaatcactttctattgagaagacttacacccttttcttaaggtaattccaccaccacatcaaatttagcatctttaataaatttaattgtattaggcagtaacaaactataactgttattagtgttggtaaaacataaatgaatgaactaaaatataataagaaataaacatgttaattttagatttgtatcacataaaacatttatcgtacctattaagaaattatctgatttattttttttttttctaatttttgtagattgctcatgaataatagtcagtttgtacaagagaagagttgtaagatacttacttccatagtaaggtaagaatgttgttattattgaagaccattttattgtaatataattcatgcttttaattttttttacatgtaaatgcagtgcaaggcaaaaagttacacatgggaaaacctcaaatttaaagaaaacatcaccacctaatacaaatgatgttttgaaatgcttagtcaactggctttgtgcagaggtatatatagtctctctaaaattttgttatcattttatttttaattaatgagctcttagcttgttcatgatttttaagcatatatatgggtgcatgggtaacatttcagctgcagcaaaagaagcctttgccttccaatcttagtcgtacctctccaactgcgataagctgtcttgcaaccttactgaaggagcctctggttaaagcattctttgtccaatctaatggagttaggttgcttgtcccttttataaacccacctttcattcaaccctcaattcaggtaaacttaaattcaatatacaataatgatttggatattatctacacaagcatttgacttgagtttaattatacaactttgaaacagcttgtgtatgaaacatgcttttgtgtgtggcttttatcttactatgaacccgccattcagcacttggctacctctaaagctcttcctcgactcatggatgttgcgaagaactccacagcggaaaaggtgaggaacaatttttatgttctcttgtattgagtaatcacgcatcactttatagtttgttgtggttagttatgtagttatcgaattcgtaattttaaaattgagtaatgatacgtgcacacattttttacactaaaattctacacccctacttaatgaattttattttttgatttcttaatcttgtatttccaagcaccatgtttgttatttgtttattttttaaaattcacacatttgtaatggtatgaaaaatgtgtggcaggttgttagagttgtcgttatgacttttcaaaacatgctccctaaagggatttttgattcacaaatgatacagcttgacctatcagaacttgttgagagtttaaaaatacaaatatggagtgatgaggtttgattgacttagaatactgtaatttgcttttgttttattgttattattattattttgtttggaattaacttaagggttgcactttgttctattttcaggatttattgaatgcgttgaatcaactagacgagaatctgaaaaagataaaatcattaaaatctttcgaaatttacaagcaagaagttctccttggtcgtcttgattggacttctatacgtaaagattctgcattctggtctaataatattgcacactttgaagagaacaactttcaagtatgaattttactttttttttttttttttttgtaaagatattcaatcgatcgattacttagacaacaattttattatgcagattttgagggtcttgattacaattttagacacttcatgtgatccaagagctttggctgttgcttgctttgatctgtcacagttcatcaagcaccatatagatggccggttcatagtgacgaagctcaacgccaaagaacgagtgatgaagctgttggaccacaaaaatgacgaggttaccaaaaatgcattactgtgcacccaaaggctattacttggcagcaagtatgctaacttcttctagtattactgagtatgcactgaaataatctataggaaggcgaggaggcgagagccctcttgtatatttcttagaaattaatttcttttgttctctaagctctggaaaattttatgaaattttagctagctatgtaataaattatacttccaagaataatatttcattttttaattagtgaaattatgaagaaattgtagcattatcttttatgtttacatcttctcttatcttaattgtaaaaactaataattccaaatctaaatcacttgcctaaccaaattaaacatagttattgttttaaaataggccataaattaggtgaggccacttgttcagttgttcttttttgaaatcaattatcaaatcaaagaatcaatgtttgtgttggaatttataacaatcaattatgaaatcaaagaaacttattgattttgattaatctaaaaagtcatctatgtttatatatagaacaaaagaagaggcatttattgagctatatatggaataatacaactcaaatgagtcaattaatggcaacttaattagcttaagaaatgagtcaaataacaatatttctaagccatgaacatcttcaagaaaaataaaataaaataaatttaatttatcatcaataattgcctttgcaatattgtctttcccctttactataaactggatatatgatctgacccgatatctgattgaagattaccgggggagctagaactcgaactactaatatgaactgcaaaagattcggccaactttactgcatcttgaacccgaagacgagtaccctgttgtctaactacagttgcagctattcgagcagctagaccacccattgctctcaagtccgacatccctcgtagcagaccatacaaaacaccagacgcatatgcatcgcctgcaccacaagtgtccaccggtacacatggagaaggagacacatatacagcttctccttttacaccaatgtatgatccttttattccatccgtgaccgagactaagggtactaaatggcttagataccttgccgccgcagctggactttcctcagaagaaaaatcacataaagctctagcttcatcgctattcgcaaatatgatgtctgcgtagttgccaacgatttccctatttgaaataatctaacaaatatgatgtccattttggtgttcgataaataataaacagcacaatttaatataatactatacaatacaatacgatcagatcaatagaaaggttttatggtatttaaaagcaaatgaaagaagcaaagtaccagaattcgtcgtagtgtctctctatgcaggaaacatcagatgctgtgatagcaaccagggaaccactccggcatgcttgctcgcatgctttctttatcgttttgattgtgtcgggaagctcaaataaatatccttcaactactaaaatctttgtattggaaactatcttagctaggctcagatcataattaatggttgatgatgtaccctgatagtgtcaacaaaatgatctcaatgtttcttgaaatgttgcttcaaaaccaattttaatgaccaatttcttggattgataatttgattgtaagaagttcgttaggtgaacaaattttacctgatacgataacatggtgcggtgggcatctggagttgtgagaactatcactgtcccggttgttccatccttgatcggttcagaaaggaagttaacatttgcacggcgcaatttcgccctgtaagatcaagcaaatggtcaaaactaaatagcacattgacagctctaattaatatgatccacaaactgattgagattatccacaattttctacaaaacaatcaaaaattaaaacacaaaacttttacttggttcatccatgaatgcctacatctattgaagaactctctcaatcttccattttcaagtattttctgagattgcatttagatggagaaagctcaatatccattattatcttaatcttatcatcctcacagactcacaatagccttattaattaaaaaccactgaagccgtgaaacataacatcaataataaaactactaattaaaaggtcaattaggatttttgtccctaaactttaatatgtactaaatcatgccccttaaacttttctagtaattaaaaattctccctaaattattgacatcgttagatttaaggattttagtccaattgcattcaattttactaattcagtgattgtttatgtactaaatcatgctccaagtctttgatatctaccaaatcatgcccctcgaactttgacatgtaccaaattacgccccttgaactttcatccatgttagacttttcttactaaaattggacaaaaatcttaaaatccatcaatagttcaagagaatttttaatgaccttaaaagttcaggggacattatttggtacatgtcaaagttcgggaggcaaaaatcctaattagcctaactaaaatacaaaatccaattatgtaactctctcacaacaaacacattcacaatcaaattaagttgcagaacaagttaataatcttcaccaagcataaattttgaaacaaagtagttgacttgtgcctgtgttaataatgacttgggattttaacaaaggcattcatacatgagatcagaacacaaactttcatgcctttatttgatttagtccacaattaatttatcaactacattgtaaaggctaaaattaaggtactaatgagtgagtagtaacctgtaaaaacttcccaatggatcactcccaacactaccaaccaaagctatattaagaggaggacccccaataggcttattaccaagcctagccaaggcaacaagagtgttggaaagagaaccaccagctgcagccttgtagctacaaccatccattgcccttaaaactcttcctctttcttcatgattcacaaccttcctagtccccttttccaattccaaattctccaagaaatcatcatccaccacaccagagaaatctacctaaaaaagaaaaaaataaagattgaaactttaacaagtaaaaaatcaaaactttagcaaataaatataacaaataccattgcttgaccaagtcccaaaacatcccatttttcaggcaagagagaagacccatctgctaaccccaaaagattagtttcttgttcttcttcttcatcatcatcatctgatgaggccccatcatgttgttcaaaatgggcagctctgttttgttgctctggggtgaagcaatgacagaatgagaggctgtggagtctggtaaagctgatagaagaagaagaaggagggaaagatgagaaaagggtgtttttggtaattttagttgagtgaaaagaagaagaaga

SEQ ID NO: 233623 - DNA, 1203 bp, Cannabis indica
tggtaaaataaattccaataattcgatggttctctacagtgcagtggggttccgatacagtacgactgggctgttttatcctagggaggaccgacgaattctgaattcttgtacattcctgggcagtgccgcgaatgttttataaaaagcaacctaatctgcaactcaactcaaaaatttaatttaataatatcgttccttttttatttttgctagtaatatattcaatgaagaagttgtgaataaaatggtttgacgatttaataataatttttcatataattaaatatcacgtattttaattaatttaatggagcacacatatcatgggaaagacaataaaatgttttaggagcactcctcttagtatttttttgggtaaatatcattttggatcctgtgttttgtaaaagttacaaattggaccctccgttttgttaaatgacaaaatgcaccctgtattttctaaaatggtaaaaataggaccatgagcttaattttcgacaactttttttttaatataaccaacttgaagacaattcctaacacgaagaaatacagaaaatgtaaacaattttatcataacacaattagatcagatttttattaaattttattttgacacaaaatcagttcagggtcctattgtactattttgaaaaatatatggtccattttgtcatttaaaaaaacagatggcccatttagtaacttttgcaaaacacaaggtctaaaatactatttacccaattttttttaatagtatttatcactcttacgtttactagctaaaaataaatatttgatagagtttggatctttcaaataaactccgttatttgtaaagtgtggtaatgtaacttttggttgtgtttttgtccttgtataaatgtcaatagtttatttttactgtaattgttctactaattttatagctcattgataaattaatttagtggcatgtttactatacaataatcagaatcagaataaattaatggaaaaatataacggaataaatgaaaataatcggaatcaatatttgtaatatgttgtttactaaaattttttagaaatggaatagttgtgatttatcttatttactttattaggaaacgtaatcggaatgcttaaattgactaaattgcccttttgagttaaactatattatataataattgttataaatattaataattatgt

SEQ ID NO: 233624 - DNA, 1058 bp, Cannabis indica
tgtgggtggatctattcactaccagagggaatgagtcaagctgtgacgattagaaccccgtgatctgcgaggaaaatactagtagatgtacaatctcacatcgcctgacagaaggtcgtatacgtagtgattttgcgattatgtaggcatgggactacatagtgttaaggacttgaatgaattgtttatgactgcctataagtatcctattttggtagcccaccatgaaggaactccacagttaagtgtgcttgacttggggtgattttatttatgaagtttccccatgaagcgtgcaaaccagaacaaagcacgttggaaacacttggattggtctctggggcaagtcgtcagtctaggaaataattagagtgatgcactcgtgtataagggccattattctgtgactataagggcccaatggaggcttgaagcagggacattaccagggtaacgtataaaagaacgctaaggagagtagtaatatctctaaggtaaggaagattacctggattacatatggtgatacggtaataatggaaaatacttttatatttgactggatggtcaatctggtatataaggtgactattgaaattttggaaaagggttaccttattaagtaatgatggaaaggcatactcacccagattggggaaaaggcttataaattgaaatgtaatttaatggacatgtattcgaatgattggtgaatgttggatcacaaagtaggttgtttattaaataatataactgagttttagagtgattgaccaagtataaagatagtgattattgcaaggaagcaataatagcgtacgaatcatggagtaaaaccttagtggtaataataggaaaagaatataagagtcttagatgttgatgaatcaacaccatcaatggggaactcactacaagttgaagtggtagttcacaccaagggattgtcattaaaatagagaatatacatgtacatttctagatgtgttaaaaaggaaattttaggatttctacctaacacaaatacgaagctttgagatcaagaaatgatctttgat

SEQ ID NO: 233625 - DNA, 1156 bp, Cannabis indica
tctggagaagattcaagatcagtgtcattcgaaatagcttataggagatagtgatagaaatgacaacacaatgctcaagtcatgccttgaagtacaagaatactcagagacaaaaatatttgaccagatgtcactgagaacagtttagatggtacggagaccaatatcatgttcttaagtgagtaaaagtttgagtatctaaagctttagtgaataaatctgctagttgattagttgtgggcacatgagatattgacagcatatttgaatcaactacatcacgaataaagtggtacctgatgtcgatgtgtttagtttgggagtgttgcacggggtttttagagatatttatggcacttgtactgtcacaaaaaatggtcagtgtttgttgtgggtgtccataatcagtaagcattttgttcagccaaattaattgagtgcagcagctaccagctgcaatatattctgcttcagcagtagaaagtgaaatagactgttgttttttgctataccaagagactagattattcccaatgtaaaaacatccccctgaagtacttttcctatcatttagacatcgtggccaatcagaatcactatatcccaccaaggtggtattcgtgtcacagctataccagagaccatagtcaacagtcccagccagatatttgaaaattcttttgacagcagagagatgtgactgtttagggttggcttgatacctagcacataagccgacattgaaggagatatcaggttgactagctgcgagatacagtaatccacctatcatgcttctgtatagagtggggtctacagggtctctagactcatctcgtgacaatttggttgtagtgcctataggtgtatgtgcatgctttatctgtgaaaacctaaacttttctagcatagacttgacatactttgactgtgatatgaatgtgccatgatctagttgtttgatttgcagtcctagaaagaaactaaggtcccctatcaaactcatttcaaactcactagtcattaatgtgacaaatgtgtttacttcactttcacaagttgaaccaaaaatgatgtcatcaacatatatttgggcaacaaaaattcctttttcaagatgtttatgttgggttttatgccctaaataaaactcttt

SEQ ID NO: 233626 - DNA, 1029 bp, Cannabis indica
tcgcacaagttagtgagtgggccaaaatttgtgcatataagccctagtgtattatgcaaatcactttaagaagactaaagtaaatttataccatttcattttgtgtaatcttgatgtagatgagattcctagcttgatttgcatgttttgatccaaaggtagcttctctctgagagttgactataactttgagtttcgatttgacttttggctttgagctttgaagacatcttttgaatacggtcttgaattcttgatcccttgatgaatcttttgttcttatgaagtatgaagtatttgatatacttgttgaatttacctctttgattatgttttactttaccgagcaaatattgatactttgtgaatttgcatgcaaaatgatcaagaaaagattagtaacaaataataatcaaatatttgtttatcatcgaaataagtaagtgattgacttttggtcaacattctccccgtttttgatgatatcaaaatatttgattattttaaaggaaagaaaaagtaaattgaaacatgtagagtttacctcccccttaatatatgcatatattgatttataccgttttacctttgcatatttattgttgccttttcttaacatgacaaagtgccccttaatcatatactcaataaagtttttaaatctcgaaagcataatatgattaatgccatattaatcaattctaatatttctccctcttttgatttcatcgaaaagggtggcatagcaagtaaggtcaaactaaatatatatttctctctcttaatcatacaagttatgatttgtatcaatgaagcacaataggtaaagagaaatttctaaatgcataaaaagatcaaagttcatatagtcaaaataagttaaacattcaatctacaaaaactcattttaaaatacatgaaagtatgagagataagtaaagactgacatagttatgatttcaaaaattttcccataccttaagtaatatataacaaatgtgttcaagcacttaaatcgattagatgaca

SEQ ID NO: 233627 - DNA, 1183 bp, Cannabis indica
aattctagtctttttgtaaatttccctttttgaaaaggcagttcaacattttttttagcttgacaattgtatgccaactttattttatatattttaattttcatatttttttttaaaaaatatcaacttttatagatgacgtcccaattatactctttaagttatgtactagatttaagtagagggtgagagtatattgaacaagacacttacaaaagtggatatatttatatgaaatatagtacgagaatatttttgattaatagattaaaaaaaaaagtaattcctcaaattatctcatttagcacaattagttgtaaagaaaattaagtaatgcactagaattactttttttttttttttttgccaaatttcatttttatgggtttttacggttgtaatataatatatatacaatttaaaaaaaaaaaaattaaaaaactagagaacaatagtaaaggataattggttgccccaattctaaggtaaccttgtgtttctcatgttttttattttaatttttctcataaaataacaatcttttattttaaaaaaactatattcttacatacattgtgtaaaactccctaaaatgtgtactttctttttacttttttctttaaaaaaattgaaatgtagcaaaaaataattataaaaatacaatatttgtataaatatttacaaactcgtaaacttttttttttgaataaaaatttcagtattcattaaactgagaaatcagccaaagcaatggcaactaactcaggagacagaaaaccctcctggatagtacgacctgtggagaaacaagaagcacgcgccatataatgagcggctctgtttgcagatcgtttaacaaaacacacagaaacaaaagacaaacgagtaagcaaaagcttacaatcagaaacaataagtccaaattgagaaggcgtagaaagagaacttaaaatagcttgaacacaaactaaactatctgtctcaagaacaacatcaccccaagaaaaactatcaatccaactaagagcctccttgatgccaacgatttcaaccatctcgggttgcacccgaccttcaaaagatttattgaatgcagccacaattcttccttcatgatcacgggttgtacacccaacaccatagcgcccccactgctcaaaaattgcaccatcgacattgacct

SEQ ID NO: 233628 - DNA, 1006 bp, Cannabis indica
agaaagttgatgatgattgcttcgaatctcttctctctcactcttcaatgtgttttctaatctcaaagtttcttgttctatctctccagtcataccccaatccgatttacatcattcattatataggccaacaaagatagatgaatccccttagaattaggatttctttttaaaaaagataagtgttgcactatagtgcctacatcctgcactataacgccatgaaaaatatctcaaaataaccacatgctgaaattatctttttttctttgcacattgtttttttccaaagctccgctatagcacctacaccctacgctatagcaccaagcaccaattttttgaacttcagcttgtttctcgactcagttgattcttgattttggtacttcgctcaaatatgtacaattcacttctaatttatcacaatttcatcactttatgcataatactgcacactatagaaaacacatcaaatttatacaaagtttaggaaataaatgctaatttgactaataattgactaagaattagtgtacaaatgtgcactcatcataaggtataagatttcataccattggagtaacctatgaatatgcaagaatatgccctaggagaaaatttgtgcctcttgctggttaaggaagaggcataggccatgcaactgtaggtcctaagatgatcataagtaggttgtttattataaagcaattcataagaagttttatgttgtagtagaggtgtgggagtcttgttaattaggtatacatcagtgttaatgaaataaggtcagtatgccaatgcaagggaagattgaaaagttaatgcccttgcaacatttaagatgtgttggtattttctatctacaactaagttttgttgatgtgttttaacacatgaattgtgggtttgaataaaatttttgagaaaagaaggatgacgtgcttaactctttagcattgtcacacctaattgcttttatgttagtagaaaattgtgtatgtac

SEQ ID NO: 233629 - DNA, 1250 bp, Cannabis indica
tttctttttgttgaagaccgtcagtagtcttcttcttttattgtgttggtgctgggtatccatcttcttcctcctttggcttatcttggtttggcctagaatagtttttaccacttctcaaggtaattgcgttacaattttcttttggatttacttcagtagtactagggaagttaccttcagccctgttagtattttgagaagccaattgccctctaggtttccaagactttaatggaaggcttaatctctgtcatgagttgtagcaatgtgtctaattgaggattagacccttgactagaatcttgctgttgttgttgatattgttggctttgttgaggttgatttttttgaggataaaactacttttggaagttttgctaatgaccataattattctgatagtttccaatgacgtgagcttattccattggcaaactgtcgacatcaattgggcaggtgttggtagtatgaggtgctccacacaacttgcagacaacttgagcttgtttggcttgtgcagtcaccaactttgttaatgcctccacctgggctgtcaacttggttatagctttgacttaatgcatacttgcaacctttttagttgggcctctctctattgaccattgttgattgtttatgaccatctcttcaagtgattcaaaggtatcattagcacttttcctcataaaagctccacaagctgcggcatctatcagtgttcgggtgttgctcagtaatctagtgtagaagttatgcacttgtaaccacttttcaatcccatgatttgggcacttcctcaataagttcttgaatctctacaggcttcataaagagattcgttgtcatactgggtgaagttgttgatgtcagctctcagcttggcaaactttgcaggaggaaagaattttgaaaggaatttcagggccaattcctcccaagtgttgatagagtgggttggcaaagataccaactaactcttggctcgatccattagtcagaatgggaacaaccttagcctgatagcatcatcgctaactccattcaccttgaatgtctgacagagttcttcaaagttagctagatgcatgtttgggtcttctgatggtagccccccaaactagtctgaagattggaccatctacagagggtcggcttgatctcaaaattattggcatcaacggcaggtggccttatacaagatctagctcctcttaagtttggtagcaaatagtccctcaggctacggt

SEQ ID NO: 233630 - DNA, 1247 bp, Cannabis indica
aactgatcattacgggctgtccaaattcgccacaaaagcatcgcagcctcctcagctactgctttgctgccgtgcaccagcaggttgcaaaaccagtcaagaaaagcttcctccccgataccagcagcagaagccgaagataagttccaacaggaatgagcaaatgaacagctgaagagtacatgagaggccgattctggtgcaagattgcacaagggacaagttaaatcgacatggacatgcttagttgaaagctgaatttttgttgggaggcaacccgagatgacacgccaaagcatatgttgaactttggctggaacattcagttgccatatttttttccagcagctttccaccccagtagccggccaatccccattagaacattgcaacaacttatacgcactacgaaccgtgtatataccagatgtttcttttgaccaagaccaacaatcctcaccactagaatcacccaactgaatagaaagaattaacgctctgtcatgaggattaaaaatatcatggatcacttcaacatcccaagctcgttgatcaacttgcagcaagctatccaccattcttccaacaaggctcgggtgaaaagtagtaacaaacttgttacccgaagcagggagccaaggatcttccagtatagaagttgaactaccatttccaatagaccttgtaacaccttgctgaagcaaatccttagcctccaaaacactacgccaaatgaagctaggatttggacccaactcagccgttagaaagttgcccttaggaaagtatcttgccttataaacccttgccactaacgagttactatcagtaagcaaacgccacccttgcttccccaagaatgccaaattataatcccttagattcctaaaacccaaaccgccagcatccttgtggcgacaaagctttcgccaactcacccaactaactcctttagatgaattcttagactgagatttccaccagaacttagccattaacccttcaaggttagagcaaatttccttagtgagaagaaacacgctcattgcataactaggaagggattgggccacagactttatcaatacttctttcccagcttttgaaaggaatctagtctcccaactttgcatcttcttaatcattttatctttcaaataccccaagatcgcattcttactgcgccccatggtacaaggcaagcccagataagtgctattttcagaagcaggtgccatcccaagaag

SEQ ID NO: 233631 - DNA, 1201 bp, Cannabis indica
ccttgtcctctacactcacccagatgatactttttacaactggggcatttcgggtaagtgtatcgggtttcggaactaccctgaaaatttcctcgtccttggttcccttgaaacctcttgttctaacttgagccactggatgcagtaggtgcctttcttttctggtaagtggtcgagccactacctctcctactaaagcctgaggtaggaggagtaggagccccaccaacgacctgagtcccgcgagactcatgagtgcactccactacaccctcagctcgcagtgccttccccaccatatcagcataggtggtgttgtcatcagtggtgaccatcaggtcatgtcttatctttgaattcaatccatctaggtatttctctttcttactaaaatcggttggcactattctcgaggccaatcttgccaaacgatcaaactgagttatgtatattttcattctgagtcagttgagtaaatttctttctttttgcacttctgactgcttcattatagtacttcgcattgaacaattcctggaacttttccaggtcatcgtagtaacatcacaggtcagggacaccatgtcccaccatactagagcgtcttcttgaaactggaatgtggcacaagccactctggcattaccggtgacgcccatgaaattcaaaattctagtaataaccgttagccactactcggctttcattacatcgggaccttcaagaaagactggaggtgcttgtttgcgaaacctttcatacaatggtttcatttagttcattgtaacaacaggtcctgcctgtacagcagggacgggagctacctgcatttctggagcagggatcgtagcagcaccatgttgtcttaaacatctgatttcttcatcttgctcattaattctagcttgcatttttgcaaacctattttcccattcttaggcagcctacggcgggttaacatcactctgaccgcgcgccctgcctctagggcctctacctcggccacgaacattttggggaatctgaactacttgaccaccactggatccgaccgagttaccctgactcctggtgtttttcctggcgtccatactactggaatagcctatgtaaccaagagctagtctgatcagattgtgatccagtataacttactaattactacttgttttggaaatttaaaactgttgggttttatgcc

SEQ ID NO: 233632 - DNA, 1371 bp, Cannabis indica
ttcagtccttgtagcatgagatacgcacttttgaagtcacccttactgaacaagagcacatcatctgcgaagcttaagtgatttagtttgatcccctcacatctttcatgaaaccgaaaatcttctttagaaccaattctttgcataagtctagacaggtattgcattcccagtacaaagaggagaggagacaagggatcccccttgcgtaatcctctttttgactcaaagaatccatgtagagtaccattaaacatcaatgagaactttggagttcttacacaattcatcaccagctttacaaactgactagggaactgtaaggcgtccataatttcttctataaagtcccactccactgtatcgtatgccttctgaagatctagctttatcatgcaattttccctggcattcttccttccataatctctgatgagatcttgacatatcattacattgtgaacaataagtcttcctttaacaaagccactttggttttgagcaataaggctaggtaagatgttcttcaatctagagcaaatcattttggtggccattttgtaaacaacattccagcaggcaataggcctgaagtctttcactgtgttcgggcacttcacttttggtataagggtaagcactgtggagtttatctctttcaaaattcttcatgatgacaaaaaagattccacagcttcatataattcattcccaatcaactcccagttatcttggaaaaagtaactagagtatccatctggacatggtgctttgattcccaagatcacaaataaggcagctttacactcctctttcgaaaacttctccattagtatttcagcttgctgatttgtgacttttggtcccacattaacaacactacggatgacttttttcctgttctccatggagcttcacaataagttcttataataggaaagaaatgcatcagttacctgttcaggttgatcagttcgggttccatcttgctattcaatagaccagattttattctgtcttcttcgatcccgaaggcttgaatggaatatcaaagtgttatcatccccgtttttcacccaagagaccttggctttctgctgtagcatggataataggtcgttatgaacctttaaaaattgatgtcgagcctctaattcctcctggtgcagcagcaggttttgggttccatttgcagcttattttgacacacaaccagcacttctttggcctttacttcagaaacatgaagctcagaaaaaccttgcttgttaatctcctttaacacacccttcataggtttaagctttgtgactacttgatacatctttgttccattgacttgttgtgcccatacttctttaactttctctt

SEQ ID NO: 233633 - DNA, 1261 bp, Cannabis indica
ttaggtggatataatcttttatcctcccttggttgatatgatttctcataatgtagtcgtcactaaagtcgacgatttttgcgtaataaccgcaaaaaagggcttaagccatctgtcacatccctctatggaggttctgatacgtttccccccatgcgacattaaatacaaaatgattgtttgaacagtctcttcccttctcggagatgccttgttatagtttaagtctcgcggagagtaaaggtgtgtcttatgctctcttccaggaggctcactccatgagatcgacttccctgttcaagacttaattgatttttgtgagtggatgctcttttaggtccacatgtcgttcttagccgctgccacgtatattgggaaaaatcttaggcaacatttaccccaagtctcatttagtgaagggtaaatgaggcttgttcgaggcctccggttagcttattaatacggaggcacatgctctaggcgcgtgggctgcatttatgactgtcatcattaatatttatttctttttacaggaaacgattcgcttctcctccattgatagactgacacatttaatcctggtgtcagagaggtgctcaaacattttaaaccgccctggcacccattcatctcatccgttggatcatagaatgcaaatcgattctgattcccaccgtacgatggtgactgatcatagttgccttgcaccctttctggtctataaaagccagcattttcctttcattggattactctcgctacttttccatttcaaaccatataactcctttgagaaaattccagaaatcatcgatttcttgctgctattcctctgtcgttgccagtgcaagttctaccgtcatacgacatcaacttctagctcattaccattgtgtaacttttctggatacatttctcttttattattcatttgcatgttaaggcaaggtttagggtagtgcctttagtcgtatttgatttctacggtgaaatgatcatggggaagatcgtagtgcgtcgtagtattccgttgtttcctttctttcttttgtcatttgattttgcatacaacttcttcacttagggtctgtcgagagtatgaaacgatgttaatacttatgttcctttttttttccctgctttcactgcttttgggatatttttacccgatgtttgccatggagaatccctggatttcctgtttctagcagacatctggagggggtcctcttttccaggccggtttagggggaccccccag

SEQ ID NO: 233634 - DNA, 927 bp, Cannabis indica
aaaattcctacaaccgtatttttaattttttggttgtttttgtgtttttttgaaataatcccgtcatttttttgaaaaagagaaccaggcccaaagacaatcttggtgatgggtgtatttgaatttatatatgaaactgcaatatggtgtgtatgatgaatccgcgatatgggtttgtaatgaacttttctgttcatgactgttagagtatgtttggaagttaggttttggtgaaaaaagaaaaagagaggataaatgtaggaaaaaaataatcaatttttcaagattgatatagaaaattttgttgaactgagtatttttctatacagtttttctttccataccaaatatgacaatttattattttttattttccactttttttcatatctttttctttcctcatcaaaatctatcttctaaacatagtcttaattttggaattagtaatattatgtacaataattatgctaaaatgagtgcatttcttctaaattgtccataaactaaatatgtagttgtagtaagcaagaaaaagctttcaaatatcaaagctcaatttagtacatgattacaaaaaagtagaactatggaattgattgagtattacagagttcataataagatgataatttatacattcagcaaacgtgaggcccaaagacaatcttggtgatgagtgtatttgaatttatacatgaatctgctaaatggtgaattttcctgtgcaagactttaattttcggattagcatagtatgtatctcctaattaggcccaaagacaagcttttacttctaaagtgttcttaatgcattggtctgtatctcctagtccataaactaaatatgtatgcaattgtagtaagcaagaaaaagctttcaaatttcaaagctcaatttattacatgattaaaaaaaaagtaaaa

SEQ ID NO: 233635 - DNA, 950 bp, Cannabis indica
tgttatataatatttttaatttacttatttatttttatatctttcttaagtaattatcacaaaaataattatgtctctatattttagttaaaaatctttatatatagtatttttttacataaattttttttattaaaaagtaggagtgttcacataatttgcaatctgtagtttcaaactctaattaattcggaccaaaccatttgagatcggaccaaatgaatctggtgtcaatgatttgatcaattcggaccgtttaaaattgtctggttcggtcacggttttagaaatctcggtagcaattcaaaccaaatcaatccatataattattttatttgtacttaatatatatttttggacaaaatgttgatatttgagaataattttaggtagaatattgatattgacttaatattgttatgataaataattttttattgttagttatgtagtataaaaataaaaagaaataccgaaaaaataaataattattgtacaaaaaaatttagaacaactataaaatacaaaccatgattttaaaccaaacaaatctgtgtttgagtggattggtttggtttggttttaaatttttaaaaaccttaatactgatttggttcgaaaattttcaaaatcagacaaaatcaatccgtaaacacccctattaaaaagattcaaaattttttataataatttttgtaaagctaaaatctcttacaatatttatttaattaagttagtggtgtgataattttgaaataattttttcatttataaaattaggtatttataatttaccccaaaaagatatttcggtagacccctaacctattttggcatacatgagaattttttagtttagtttttatcatgattgtgtatattatagctatttaggacgacctgtaaattttcaaaaaattttgaatactaaaaataagattcaaatattt

SEQ ID NO: 233636 - DNA, 1245 bp, Cannabis indica
actaactgtccttttgagtgtatttttcctccctgtggatacgacatataacccgtttactaccgcgaccgtagtgtaactaattgggcgacatcaataaccctaccaaaaataaaagcactttgaaaaggagataatcttggccaaaaccatcttaagcctattagctaaaatttttgggataactttataaaaagtggtacaaagactaataagcctaaaacattttagggtattagcatgttattttttggaaataataaaaattaaagtcaaattaacatcaagaaaattaatacccttattaagacaatctgaaattgcattagcaaaatcagcccctaagacaaaccaattcttttgataaaaaataggcatttaaagcatctaaaccaactgccttatcctcaaacaacagaaaaatagcctgcctaacctcattagcagcaaaagcctgggcaaggaggctgatatacaagtcctcaagaccaggacccaaagaagagaaaatcgaagcaaaagcatcaacatcacaatcctaagagcaaaaaaattagagaaataagtagtaataaaattaaaaataccatcatgatgatcaacaatattatatcatctcttaaatacttaatagtattagttttcttcctatatgtaaaatacttatggaaatatttagtatttttattctcaactttaagccattttattctaccatgctgccccaatagacttcttatttaataagagagtatgtaacatggactggagcttagtaagtttattattatcttctttattaagaggcaccgtaatctattaattagtaatttcctaagtgaggttattaattcgagttttaaagaggtaatcattactagcattccaggttttaagggaagaaatacaaaacctttgctaagcaatttactttagaaatttattattcacattatcacaatcaaaagtattagactaagcatccttaaatacagtaaagaaattagaatcttcaaggtaaatattttcaaaccgaaatcttttatcaacaaaattgggaggattattgttattactattaaggaccagcttaataaccctataatctgagtcatagaactctaagtgatacaaagtattaattaggaaaatatcatactaggaatctgagaaaatagcccagtcaagcctctcacttatagatttattagtctaagtaaacttattaccaacataaagcaaagg

SEQ ID NO: 233637 - DNA, 1693 bp, Cannabis indica
ggtcctggtcctattcttgggtctagatcggcttctggttttagttctactttcaagtcatggggtacgggtcgagtccaagcatcgagtactggatcctaagtctcgaggtgtgtcctaggtcaaggtttgggtctggggtcagaatcccgggtccgagtttagttctttgttcctagctccagccccagttcttaggtctgggtctaggtccgggtcccagtctttgtttatgtcccaggtcacaggtcccagtctgggtccaagtctcggtatgggtttaggttcaatttgggtttaggtttggatcctgttacagtcccaggtttgggttctcgtcccagtcctggttcaattccgattctgtgtccaagattgggtctggatctcggttcgggtatgggtttgggtcctggattcaaacactgattatgggtcatgttcaagcctcaagttcagatttagatctcggtcttggatctcagtcttgttctagttcgggtcccgggtctcgggccgagtcctaagttttagtttgggtctgagtttggggttgtgtcctggtagtgaggtccttggttccaagtctaaggtcgggtcctgtgtctcgactctagggtcaaattttgggtctgagttttgaggcccagtattgggtccaagtcccccatctaggttcggatcctttgttcaagtcttggtccaggttcgggtttggggccaaagtcccccatcaaggtcacgatttggttcttaggtcccaagtttgagtcttgggtctcgcgtcgcggtcccgggtcccgggtcccggtcccaatccaggttctggtcccagtcgaggttcagggctcgatcctagtctgtgtctgggtcccagtcctgatctcggtccgggtctgaatcttgggttcgagtccgagttctggtacgaatttggctcttggtctgtgtctgggtctgggtccagttttcggtctgagttttggtccgagtcttggtctgggtctgggtctgggtttatgtctaggttctggtacaagtctgggttctggtccaggtcttgggtcacgagtccagggttacaggttctgggtcgcaggtcgtggcgtaagtgtcggttcgggttcgggtttgggtcttggtatcgatcctagtttgggtccgggttcatgttcggttatgcatctagatctgattttgggtccaagtccaattccagttcaaaggtcctcattccgattcttgttttgatttcgggtcccgagtctgagtctgcatttggatcctggtctagaaatggttctaggtttgggtcttggtacgattccaagattgagaaactaactaccggttgggtccaagccccgggtcatgggtcaagattcggatcccaatcttgggtcccggtcttgttccaattcggatactgggtcctagtccgtgtctgtgtccaagttcgggttcgggtcgaggactgaaaccagggtcaggtcttgggtcccaatcccactcctgggtcccgattttggttctaatttcaaggttggttccccaatctaggtctaggacttgggtccaagtctgagtctccaatcccggtccgggttgtgcgtctgggtttgggtccaagtacgtctctaggttcctgttcgtgtcctaagtcccgatctaagtttaattcggctccgtgtcc

SEQ ID NO: 233638 - DNA, 950 bp, Cannabis indica
gtaggtatagcttggattattgctttgagagtatttcccttccgcttgagagaatagactagctttctatccttgtagtttggctctaatattagtacgtatggattcaaaaacttcctttttccttattccaattgttgccggcatccccaagtactttgtgtggcattccactaatttgactccaagctcagccgcaagatactcaccatctgcttttttaatcttgctgcccacacacaattctgactttgtgaagtttattttctaacccgagagcagggaatatttatcaaggatagttttcaactttctacactctgatggagatgcgtctaggaagatgaaactatcatctgcgaagaagagatgggataattttataccctcttttccaaacttaagcccgtgaatcctatcagccatctccgctacttggataaggcaagatagaccttccgagcaaagaagaaacatgtaaggcgagagagggtctccttgacgaatcccacatttaggctgaatttggccgctgacttcaccattaataaggactgagaaagagaccaaagtaatacagttcatgactttgttcacccaacgttggtcataacccaagcaagtcatcattgcttcaaggaaccttcaagccactctatcatacgcttttgacatatccagtttgagggccatcttttttccattcccaaatctaccttttttcatgcagtggagactttcaaatcccaagatagcattatcctgaataagacgaccccggataaatgcactttggttttcagatacgaattcttttagaatatctttcattcagttggcctggcacttcgcaattattttatagctgacattacaaaggcttattggtcgaaaatcaacgacttatgttgggttcttgactttcggaattaggcagagaagtgttttgt

SEQ ID NO: 233639 - DNA, 800 bp, Cannabis indica
tctgttaagccttgtaaataggtgtatgggcgcctagatacaagtcgatattatgtgatatgttatatgcttttcttactgagtttgtcgactcacagttctattttcatgtgtaggtaaaggaaaggtgaaggctgaacagggttgagcttgagctaggatgggattgtacatgtcatagcagtgcaacctggagtgttcgatcttgggacatctggggttgtcattttgtagtcgatgtgcgatctgattaatgtattttggaaaatttattaaaaaaagtttagaacggaataccgacctttgtaaataattatgtagtgtttataaagtttcatagttaatactaaagttttaatttgacacaatttttgagaaaactctttgattcgcaaagatatatagcaccgcaattgaaaaatcattgtagcgtgtcttaatattagggcgttacacaatagtagaatgtattttagtatcaccatatcataaatcaattactattttaagcaattcattatattactctattttatttgttcctttgggtcactgcgactctaatatatgcgtgcagtactatggtgttagaatttttcagattttgggttaatggtgatggttgagatttttagatcaggcattatggtagtgtgttggttttagatctgggtgtagttggccattttgccgtggtgtggtgaaggtggttctcgtggtcgtcagaggttgtggtggtgtggtagttgtggtttatcctatggtggtatcaacttttcgatttgtggcagttattttaa

SEQ ID NO: 233640 - DNA, 864 bp, Cannabis indica
atagtatctccttgcaatataaagtttatgcatatttacaataaaaactcgtcaactaaattttaattaaaaaataaaatacaaagaggtgaaaataaaaggtttaagacaaacttggaatattaagggaaaaaattggtattatattgaatctctaaactcctttacaaataattatgttccaaccttctcttcaataaaagagagaggtgtttataggaagttctaatggctccaaaatataagtggttctaaatgtttggggataagattaattttgtagcttgaagatcagcatgtcagacggctctagtggtgtggcagttgtgtcgagtgtagttggtactccaaatgagacaaatagtatctccattacttgtacttgtctgacaattcactacctcttcaaaggtatgcatgctttagcaactttatccattgttgtacgttcccttggcattcatctcgtaacactcatgatgtgagtataacacttgggaaaaaaagttaagtgatggatctatgagaggtgagtcttgtagtttaatcttggtagcaaatccctcccccatctcgttggtggtcaatccattgtaacatatatactttgaatgtgattgctctcttgtgtggagcaagtggtgttaggtgatgattaggagagtaagagaacaagggagagtgagtgagggagcgaggagagaatgagtgagggagcaaggagagagtgagtgaggaagcggggaaagagagctagggagtatgaagagtgagtgtcgtggggagagaggaagtagcagggagagagggggagtaacatggagagagagagagagagagagagagagagagagagagagagag

SEQ ID NO: 233641 - DNA, 1709 bp, Cannabis indica
  modified_base (1623)..(1623): a, c, t, g, unknown or other
  modified_base (1631)..(1631): a, c, t, g, unknown or other
tgagattcaagcaacttctgagttggtatggtaaagttttgtggcaactagttaactttattaaatcaacagtgtgcttcagtcccaacgttgcgagccttgagagagaaagattggtagccttaaggagagttgtcagagtagattgtcatgagacttacctgagtctctcctatgttgcaggtcatagcaaagctagcttgttcaactttattcgagatagaatttagaataaatttaatggttggaaatccaaaaagttttctatggcgggtaaagaagttttgatcaaggctatcattcagtccatccctacttataccatgaacttatttaaactcactaaacgttttatcaataatgtttataggatgtgtgcttgtgttttgtgggagtgatgtgaaatagaaaatgcactggtgtactttggacaaattgtgcctacataaagaagatggtggcgtgggtttcagagacttggatttgtttaattaagctcttcttgtgaagcaagcgactagctagtctacaacgtttccacctcttttgctgtctaggttctaaaaggtttgtattttaggaacgggaactttggtgatatagttcgatccaagcaagacttttttgtgtataatattttctaatctggagcagtttggagggttggcaatggacataatattgatatttattctaacttttgggtctgcgtctccctctttcatgttggctcctcattttctcagtgaaggtagcaaagtttctttgttacgtgaggcttcaggggctgagatttgggtttggttcttggactctttattcctaatgaaacagaagctatcttatctattctttgacctttctccgataaggataacaagctcatttagaattttaaaaagtttggatggtattctgtcaagagcggctactggttggctctttgtaataagggcttgggttgtgcttttccctctacggggtgtactcgggttggtgaaaaaaattggactcggaatatccctctagaggtgagattgtttccttggcaagcattctctaattggattcttacgaagattaatttggctactcatggtctcgtatctgatggtctttgtacctctttgcaagcttgattaagagattacttatcacgccttgtgggggtatctaacatcaatggcttgcatgaaactttatgattttgatcagggtaacccttttcttactcatacagattttcttagctttattcacaatgttattgatcctatgccaaaggataaattaaattagttatggtcattttgtggcgtatctggttcaacagaaataaaatagtgcataatatcatttatttgcctcttgacttagtggggaaatggactcatgaatttcttcggaacttctaacatagccaggtttagactaggccttttctctctctgggataggctgtctctttgcctttcgatgagattatttcgaaatggtctgcttcgttggctggttctatcaaggttaacagagatgttactattaataaaaattggtgcttgtagtggccttgccttggtatgatggtgtatgattatttgagtatcgttcttgttgctgctnttggtgcntgaaaggttgtcttgatttttaatggtttttaaagattttatttttttacatttgtcttttgttaaagtctttttttt

SEQ ID NO: 233642 - DNA, 1498 bp, Cannabis indica
tggccccgtggactaggagcaatccgaaagaattacagataccacgtataaaatgttatgtgtcattttaattttctacattttactttctgcagtatatttttattctattagattttgtgtctgatagaacagagataaattctgtccaaacaattttactacagttctgcattatttaaattgcttgataattttacttggtaattattaaaaatggaatttcaattggtatcagagtagttcactcaactcttagtgagatcttgtgtttaatttctgtttatatttgtttcttgtgtgaaatgtctttctttgtagatggaagttcggtatcttgtcctcgactactcaatgacacaaactatccatactggaaagtgaggatgagagctttcattgaagttcaagatgaaaaagcatggaaagaaattttgtttggatggtctcctcccacaaagaacaacgatgatggtagcacaaaggtaaaatttgaacttttatggactacaaaagaagagaagttatctagttataacaataaagctctgcatgatatctttaatggtgttggtaaaagtttcatcaaacttgtttctacttgtatatctactaaagatgcttggactattctttaaactcagtttgaaggaactgaagatgttaaaagatctagatttatcatgttacaaattaggtttgatgatctaagaatgactaagtctaaaacactatctgaattctatcaaaggtaatctaacatttcttatgaatattttgcccttggtgagaaacttgataattctgttttggtgagaaagatagtacgagtacttcctgacaggttcaatgtaaagctcacggctatggaagaggctaaggattttagtactatgaaagtagattaatttatggggtctcttcggacctttgaattaaatcaaaagattcattcaaaggagaaactgagtatctccaagaaaaaggaaaagactattgctttcaaaagtactgaaaaggaagcgtcagatgatgaagatggtgataatgacatggcttttcttgcaaaaaaatttcaaaaatacttgaagaaaattggaaataaggaggctaatgttaagacttcaagaggtatttcttcttctcttaaaccttttcaatctaacagaaaaaatatttagtgcagggagtgtgagggattcagtcatattcagtcagaatatgcaaataccttaaagaggaataaaaagggtatgatagcttgttggagtgataatgactccgagagtagtgaagatgaggaaggtaatgttgctttaacttttgttatgctgaaatctgtatctaaaggtaagaattttgtgtgtttgaataacactttcaaagatgaagaaaattcagatagtaattgaaaaatcgtgtttttgcaaatgtcagttgtatatacgaaaatataaaaactgtaaagcgtttgcagcagcagaaagtaattctgcta

SEQ ID NO: 233643 - DNA, 1329 bp, Cannabis indica
tgactcgttttgacttctttatatcgttagaaagctctttttgagctctatatgcttatctatatttttaatgccaatttgatattatgtgaaagtggatttagggattaaccctatacttgtgtagcccgggattgtgactaggattaccgacacttggtcaggaacactcagggatttgaaatctccatattttcgagacatcaggtaagacaatagctagcacatagagttatgcgcggtgccgcttatatggaatatgatatatatatttatatgagtaactagaaatcaaaattagagttattactctaaagtgagcggtttattggcctaggattattaacctagtgaattgttaataagtattgatatgccatgatatatgtatgtatattaagattatgaattgtgcgttcaaggcataaataagctagacttggtaaactagtaccttgagcttaataaaatgtggtctagggttattaccctagaatattattaaggtaagaaagcgatcatgtatgataataatgttgatccagtgaagacattagtcagggttattaccctcaatagatgtaatatgttatattagtatgaaagttaggattattaccgtacggttctatatgttatagtataaattgtgggcatgcatttatgttaagagttatgtgaataagacataactgggttagatctggtatatatcaccaggataaaccaccaaaagaacgtaatatatggattacatatatatgtaactatggttatgtgagcaaggtataaccgaattaggctcggtaactagaactaagatgaaccgttctaaggccttattgtaaatagacgtgtgagcgtaacacgtaggtctatgccatatagacacaaatagacgtgtgagcgtaacacgtacgcctatgccatatagacacaaatagacgtgtgagcgtaacacgtaggtctatgcgacatagagataaataggcgtgtgagtgtaatacgcgggtttgtgtcatatagaaaaatgtgaaagcgcattaatatttatgtaatgtgttatttatgattattgatgataatactttcttgctgggcctggctcacgggtgctttactgtgcaggaaagggtagatctgtctctgatcaaccatgagtgcgagatctgggcgatgtatgtacatgttcgggccacactagaccaagcgggttggtgtctaccagtgatgtacttttgaaactctgattttgctgcgtaggtcggcttgtgaaaagacttgtaatattttgtaaaatatttttgggatcccgaaacatgtaatttt

SEQ ID NO: 233644 - DNA, 965 bp, Cannabis indica
tgcatgaattagtgcacgaataaatagctttcaagtgtctttactattcattttatgacacaacgagtagctatgatcaacttgaaatgatattcaagtattgctcaaaaagtctttttttttaaaaaaaggagaaagatgtcacttgtatagactgacccctcccccaaaatatattgaaaaacctcatttttggtggaggaaaaccatggttacagagttttagcacaaaacaactaaaacgaacaatattcaaacaagacatgagcatataaagtactattagacaaagctatacatttgatttttagctatggattctggaggagtaaggaaaggaacagtagcttaggatgtatttctactcaaaaatcgttcttgactctttcataacggtgaagcatgactgtcatatctaattttgatttttgggtatgattgttggatctatggagtgtggtctgttatttgattcttgggttttcttttgatctgatctttgtttttgagtcacttgaaacaaataaatgtagaaaaaataaaaaaaatattaagattgattttttaaaactaatcaaagttattattcttataatatttaagtgtacttgttaaaaaagcaaatattgagatgcaaatataattctcaacttagattcttaggtcggaatagcggaggactgtagttggtaatagctatccttaggtcgctggttcgaatccggcaggtcggaattttttttgtatttatttataaatttagattctgcaaatacgacttcttcttcttcctctttgccctagagttcttcttcttcttcttttttttgtgccctataaatcagtcttccgtaatggcgttttttctaacaaagattatcctagatttccaattgttcaatttatatattggccttttgatttactttatttaggttttaaattgcaaatgggcttagtcggat

SEQ ID NO: 233645 - DNA, 886 bp, Cannabis indica
tgatctcagggagcaaacaagatccttgggggttgaaacaaggacccaacgcccaagttaacatgagcactaggccctgcgcccaggttgacatacaacctcgtttgcatgtttccactcctcaaacacaaattttggttcgggcattcttcttatttttgtcaaacagagtagaaaccttgttcgcgatctcaaattcctaagaggtatcaaaactagccccgggaagccacccaagaagcatccaacacctaagttgacatatggcctggtgcgttggattctgcttatcacattctaattctatctcgagcatatgactatctttctatagtaaacaaaagctacaaattgtgacatgtcaaattcatactttgatattttatcctttcaacaaggtggaatattgacaagatcggggaaatttgaggctacttaatttcaccaaaaagtgcatctccaagaatcggtgaacaacttcaccaaaattaagaaattggctaagtgatgtcaaaaaatcacttatgcgtcaaaaaatacaagtctaggacgttttttcacttactcatcatccaggttgatgtcaggatgttaacttgggcgctaggtgctaacagtcttcagtaaaatgaccataactccctcaatattgatctaattgatgtgattcaagtttatttttaaagctcttttaaatatctttcaagtcatgtctcacacccatatcacaattttgcatatttcaagtccaaaattcgtgcccaagaaaagtgcaattttttcaacaggttacccgaactcgatccaacggacgagattcaatctccaaaaattgacgatatttatcaaaagttaattttcactgtcagatcatcatcaatggaca

SEQ ID NO: 233646 - DNA, 1342 bp, Cannabis indica
ccgaatttcgagtataacaactataattctcttgtctcctttatttttattttcttgtttttgtcaattttggagcccaaactttgagtattcacaattcttagtgagtactcgcataactgtcggtgagtattccagattttctcaaatactcgcactatttggtgctgtctaaatttttccaacaacaaaaaagcaaatgaaatgcaacagttggctaatgtccctaaaatgtatcttgaaattgatctatatgattggctgaaatttgttgcaagtcccctaactcttgaattttagatattaattttatatgttaagataaaattttaaatagaagtattaatagctaacttattatattttcattgtaggattacagtaaagtctaaagggagcgatcaacgaaaaaccagtctagacaccgtagtggtcggagtggaatggtcaacattagagaagtcgtagtaagtaattgataattaataaaataaatttctagcaatgtacatcaaaatgtcatcctactcatttaaattttgtaaaagatcaatgtagaaaaaagaacttgaggttcaatatccgccacgacatcatatttgaatcaaattatgtcacaagaaattgaaactaggcagtaagtattaatagctgataaaataatattgagttaatatatatgctcagtattatttgcatctacagtagatgctcgtgagaagttgtggatttgaaatgaagtaaagcttgatataaaaagacaataaaaaatttactttgaaaattgttaaatgtgtcctcttctggagggataaatattcatttatcacatgattcatttgttttaatttcaacacaccactaaaatgggcaataggaaggaggagaaagaaaaatgtgtccataagtggagtggcgcaatattttaaatttctcacgaattaaatacgtgattatgttttatcaatatatattgtgtatgagtacgtaatcaaatgtttcttgaatgtgtggctttgaagaataaaaaaaaagggtactcaaaaaaaaaaataagaagaataaaaaaatagcaaacacataaaataaaataaaattaaggaggtgtgattttgtttttcttcaatttattaatatttaaataatggaattattacttggaagagagtcaaattaaaaataactttcattcgatattgacacaagttgtacgtgaaaatgcttttaatgtaacaatttgcaatatgacttttctagttttgttttgtagaaaattcacaaatatatggccccatttgatgaggattcatatcatgattagctgaaaaaaaaaaaaaaaaaa

SEQ ID NO: 233647 - DNA, 1347 bp, Cannabis indica
atcaagctataaaatttatgagctgatttagggcagatggaatagcataccaacactcttcactgtgatcaacaagacacttgagcagccgtgaatttagtcttcgagcagcaaaaataccaattccaagagtggatggatcaatagatggagattatgagacccagcaagaggcaattgacaatcgctttaggcaagcgactgtgctgattaggcgagcttattagttaactggagaataatcagtggaagatacttcagttatataggatccgaacagaaggacatacgtctatatccctaactgaccatagtatgggccaaaagaatgctgaccaacaacactcatcagacccaaggtaatggaccgtccaatctgaggccacagaattgaactgtggagcacacactagacgagcagcttttaccagtctattatattgttttttttttagaagaaaactttattatctttactactattatttcttctatttttattcatgtgtatgttctattgctacacagtaattaacgctttttagaaggacggtgtagttggtctttttgctatcaaggttcgagatattgttaaccaatataggaaaccaatcaaaatttcaagagttgacattagagtgggtaatttagttgtgctatcagatgctctcacaattgttcaaactttctcaatcaacaaaattcttctagattggtattttattactttttttcatttaattttattaaagattataaattatattgattaatttgaagttaaaagatgtcgcacataaaaaataattttctatttgatgatagagtttgattactacaaatatttatcattgtcaaagtagtttacacaaaaggtaaacctctcaatgtttctttcttctaatagagaatctctgtaaatttattttgaaaatttaaattcatgtatgattttttatatcacttcaatacattgatttatatatttctaatttagtatatagtcatgaccaattttatgtagttgtgtctaaagtcatcatagaagaaggataaaaatgacgatgatgagctggaatacccaatatgcacaaaaaaagtattttataatattctctttatcatccacaaaacaaaaattaatatttttacaatattttaattaaaactcctcattttaattatatattttactaaatcaatagaaaaagataaatttaaatatttgattatggaataaattagtcttatggattatgacctatcatttcatcattacaaattaagatacaaatttaacatccacataatttgttcaacattttatctaaatatttcatattgaaa

SEQ ID NO: 233648 - DNA, 1364 bp, Cannabis indica
tggtcaaaggataaaaacggggtggattcgcaagtaattaggctcctcaatcccaacattcatccttgtgatcagtgaattcagttgctacacttggttttcgtcaaatagactcatatgcgccatataagtttgcatgtgaatgttctgcggaataagataattcaactggttatatgtgtactgcatggcagggtcaagagggccagcaacacgttgtggtactttttaaaatgctcctcttcgcgttcaggaggatttgggcctccttgctgtggtggagcgggtggttgaccatgtggataaggtgctttaaatctaaacaccgttcccatgtcaatcatgcgctctggagcaaccttagtatcataggagtattgtggtaccccttatttccacacaaatcagtgataacatcagcgagaccaagcccacccccacaggctccttcgaccatcaaggtaaagctatgcctaataatatcccccacattgatattaaatcctttcataatagcatagacataacttagcctatccaactgagcatcagaaaagtatttgttgggtatcaacctagcactcacaaaatataaccacgctttagccaccaggtttaactcacaacggtacaactgatagggttcctgattatactcatgaaaccttaatccggggaaacccaaagtctcagccatatcaacatagtctaactggctttcttcatcaagcatttttaggcgctgctcttcgcgggtaaaagtttgcaagtcatagtgttggaatatgttttaccaggatctagatttactaccatgtatgttgtttaacatcctagatctgaatttctaaaataatgtaaataaacacatataaagtttaagaaaccttacattgggtgcatcggaatattaatggtcgcttccactcagatctctaacccttgtatcctgtctgtagtagagtattaccaagatctgagcccgaatgtccttctcttgattctggattcttcacagccttacacactatgattgagataccacttgatgtgtgtgggcactcactctatcactcaaggtatgaaattatgaagagaagacgagaggggctagttcaaattcaatagaaaagaaggctcaggaaaatttgactgatggtgaatttttcatccactttaagtgtgagccatcactatctattaggcattaaaataatgaagaaattaaatggaaaataccacataagtggccggccatggatatgggcccccgttttggaattttgccattttacaacaatctttccatattttttcaaaaataccattttttaaattctaaccatttaaatgccaaaactaat

SEQ ID NO: 233649 - DNA, 671 bp, Cannabis indica
ccaccattacaatatgaaattcaaccatggagttagaagctagagttagagaagagaaaaaagaaagaaataacaaacaacaatggagaaattttttccccaaaggtagatgatgaaatcttcttgtccttctcctcttttctgttcttttcttcttctgtacgatctggtcctctctgccagaaaaaaattattctttcctttttcttctctctttttataacaatggaggttgcctcttcaaaacaaaatgtttgattttgtaccctttgcccaacataaaccctacacatgtcataaatctagcctctccaagtctttgctccaaaaaccactcctagaacgccacttcatctccaaatttccaccacatttaatgaagtgctagctcatcttttgtccaagaaatttacacaacctgctactgacatgttttgtaataccctaaaattatgaaatggattagtgaaaccctaattagataattatgtattatttaggaattatattattatataatttaatatatgcgaattaatgtgatttatgacgtgttaagaccccgttggagagccaggagcattttagtaattttaacccgagaagggtaaaacagtgaaattaatttatttacgtgcttatggaactatattattatatagtatgcatgt

SEQ ID NO: 233650 - DNA, 1418 bp, Cannabis indica
agcattggtgtacaatatttggctgaccaaaaatgatgtattttttatgagggggctgctagtgttcaaaacatttttcaacaaacaaagtggcaagttaagaatagaattacttttgttatgccaaagaatgtaaagaaagaagaagttgaatggtttgagaagttgtaagtaatagtggaaattgtatagaatcatatgacatctcttgatggtcattaggtgtaaaattgtttgtgtggaatgaaagtctgattcatcaaaaaattatttagaatacatgttatatgtaattattatttatattaaacgataattctcgtattatagaaaaaatcccaatatatatttatatgtttctgtacaataataataataataaaatatatatttcatctttcatttatttttcaagtctctaacctttcaattctttcttgcagatgattcacaatctttaatattatcgagagaaacaatgaaacatctgcataatttcttttttctttttcttttgagagaaagtatatgtataattattagcagagattgtgtgagttttgaaattttactgtaatttgtaatttatatacaatacttgtcatgtagttatttatttatttatttttattagcagagattagggatatcaatatattattcatagaaggatatagtgcaaatttagagtgtggttactgtgtttcaagtctaaagaaaagacgaggttattttatcgttttttattgtttatgtttatttattaaactctagcttttagagaaaaatatatgcaagtctaccgaatctagagtattatagatctataaagatactctaatttcttaaacacacattatttgaaagaaaacttacatgaattataattatttacatttgattggattcataagtgagatacggtaataacgacgactttaaatttagtagtgactataagtaaaaaataattgtagtagtgactatataagtgagatacagtgacaataatgactatgaatataatgattactattagtgagacatggtgatgacaataattttgtataacgactacaagacaatgatgacaataattttgaaatcgtatattctattttctatagatttatttgttagaatttggggataagataaatgaagttccatctcaaaactaattggcaattggaggagtagcctattcatcttatatatcacaatttatttccacacattagcaatgtgggactaactcttaatacaccatcctcacgtttgggcctagaaagtgtgggtataacgaacgacctttaagagaccacaagaccaaacatgacatttaaaagaatcccacaaggtcaaatatcgagaaatttgtgggtgtacacgtcgagaaatttgtgaattttgaaaca

SEQ ID NO: 233651 - DNA, 872 bp, Cannabis indica
tatttttctttcactttaaataattgaacaaatttttaaaaaagtaaaaaatatggtagtataaatatctcatcaattgttgatgtcatacatgtactttttttataagtaaactgaatttatttaaagcaaagaaactaggtgattgtcacaaggggaccaacctccctcagaatagtcctcttacaacagcgtaaaactctggcacaacgagccaaactgttcgccacagagtttttactccgaggcacaaacacaacactacaacacacaaacttagaaaacaaagataaatattcataaaaaaactggatcagaccccacacataagggagttctttgcaagccaaagtcgagtatgattctattagtactacaccatatcccggttgagaagcaaaattcatagccgaatggatagctaaaagctcagccttcagcacactgactcccttgaaaaattgaagtaaaaccaccgctatctcgtcatcgacatcacactgcaaagccccgatgctagcctccccatcctttatcgaggcatcaaccttgaaatgtatgtcccaaccatctcttagggggtggtcattgccagcctccgaaatatcaatgtgtggcacccacgaatctagcagcagcactgcactaaactccacaactcttttcaaaatcaaagaagatgccttagttacatccggcttttgtcccttaatcgccatctcatttctacagttctagacaacttcaaagagggaggcaacatgcatcataagaccttcgtcgtgacgattgtataaccaaataaagaattcctcgtgatacaactactactgtacctaaactaactgtttagttagttagttagttaaaaa

SEQ ID NO: 233652 - DNA, 1153 bp, Cannabis indica
ttaatttaaatttgaatggtatttaaaaaaaataccagtcacgtttttttttaaaaaaaaaaaatcagcaatgtgatatggtttaaaaaataattaattgatataattaataatagtaaaattataagaaataaaaaaaataagaataaataataaatatttataaacttaataaaaaatgagaaaattaaggagagagtaaataatactctttagagaaattttaaggcgccacatcaccttctaatacttctcctttatatatacatatagattgactaggttacgttgacctgtgagttataataattaatttaaaataaaatagtttgattatgacataatcgctataataattgattttaaaaaatagtttaattaggattatttaaatttaagaaactgattgcgatgacctagatatgttaatagataagttggaaaaagttatatccagtcaagaatcgttagttggccaatgattttatgactttaacttcaagtccttgtttttggttgttcaagatattcagaaaaaagatactgtcatttacgaccatccttcagttgaggtgtattcattataatttaggttgtattgtttttaaatccttgttatgttagggttgctttctttcatggtttgttcagttgcgacatctgatgatattgatgacccttgttatccagatttttgtccgcctgacatggcatacttacatggacaatatttacgccacgtggcaatatagctcacaaagaaggaggtcaagttagcatcctgaccaacgagggtcccatcactcaaatgggacgacgagcgatagaccaaccacctcaaaggggatggtcggccacccttggccgaccctatgtccggccagcttctggacaacacaagggcgaccagcttgcttcctactagtgcatggcttgccaagattggacctggcaggactttaaccttacacgtggactgtaagctagactacgaattaggccttaacactccaataaagtagatgaaaaatacctttgtgtaagggtcattttagtcttttatattttaccaattttaatatgtaaatatctcctattttaatttctaattggggttcaagctcccctatataaagagccttaactcaaccct

SEQ ID NO: 233653 - DNA, 795 bp, Cannabis indica
ccggtcgaccggttctggggaccattagaaccggtcgaccggttctgggggaccattagaaccggtcgaccggttggtacccaggaaccgggcttccagttgggaaccggtctgccggatggggctttttctcgaaccctaattttatctatttttgagttgtttagggtatttgcatcctatttatcaatagggttatccttaattttaattttaaatccccaataagtgttttagtgtgtctcttattgagttttgaatatcttggtttagggccctgtaaaacgtcacgttgcttttccactcaggctgaccggcacgcttgagcccagaacgaggtaagatagcataataatgtatatatgaatttatgcttgttttaactatttacactactaacactaattgtttatgcaattttaagagtgttagtttagtgtaggatattggtgtggttacggtgttaccaacacgagtaccagggggtacgtcgtgcatgtggtacaacacttagtaattcccaggagtacaataatggctctatcaacacgagtacagggctggtactttagtgcattcggtacaggggtcgtacttcccttaagaacattcttaatcattcagtgggttcagttatagagctcagaggggcttaaacataaagccaaaattgcatgatttatatatatgttatgcatatcttactgagtctattgactcatcagtttgctaccttgtgtaagtaaaggaaaagcgaagctggaggaacagtgagatggagctcggcagtgattg

SEQ ID NO: 233654 - DNA, 4166 bp, Cannabis indica
tccaacatggatgaaagttcagggggcatgatttagtacatgtcaaagttcgaagggcatgattcgagagcatggtttagtacataaacaaccactgaaatagtaaattcaatgaaattagataaaaattcttaaatccaacaattataatagttcacgaacatttttaacaactttaaaagttcagggagcataatttgttacatgtcaagcaaaaatcttaattaacctttcataaaatgtggcgacatattgcctaaacctcattattaggatacctaatatttaagtttcatatgttaggcgacatgttaacaatattttctagtttcaactttttttcaatcaagacgtttcgttttttgactttgacatatatctcgattattattattattattattttcactaaattcatattattatcgtgtttaaagcttaaaactgcacaactacataaaaacacatttacaaaacttaaaataaatacactcatcaagatggacgattagttatattatgcatgatgtgtaggtgatgagagagcaaacttaactttcatgaaaatcgtacaaatcgtaccctttttgttattgtgagtaataaattaataatgtcctctttaaacttcgaatcaatttatgtttgcgttaaaaaattggaaaacaatttcaatctttgcttctccaaattatgtgatccatcatccaaccatggcttccgccccgtcaatctcactttccccatcgtaccttttcgctgcaatcgacatgggcaccaactctttcaagatgcttctggtccgagtctaccccaacaatggtaataagttcttcataatcgatcaccgcaaagagcccgtcgtactcggtcgccaggcttccaattccacaacaacccctttcgccatttccgtggattccgagcttcgagctctcgacgcccttcgaaagttccagcaactcctcaaatcgtacggcattgcctccgcccagactcgctgcgtggccacctcggcggttcgggaagctgtgaacaagtgggagtttactaagaacgtaagggaaaagattggattgaggatcgatatacttcctggtgaagaggaagctaggcttgcttatctgggtacgcttcaatttttccctttatatgaaaaattggttctttgtgttgatattggaggtgggtctactgaatttgtggttgggaaaaaagggaatgttatatttgctgcttctttaaatttgggtcatgttacattgacccaaaagtttggggagagtgtagaagaacaagtgtccaaaatgagagagtatattagattagttattggaaaatctgggttgattgagaatatcaaaaggtttggttttgaggtggttgttgggtcttctggtacaattcaggctgtggagaaggctgttttttatggttactcgaatggaagctgtgttctggatcatactgtagtggttaatggggaaggtaaaagggattggagattgagtaaagaagaaattaggagtgttgttaagagattgtgtggtggtggtgtaggagaggaagagaatggaatgagagaaaagctatttaaaaggcggtgtgagtttattgtggctggagctgttttactggaggagatatttgaggctcttggcattgagaaaatggaggtttctgggtttgcattagcagaaggtgttgttgctgaggttttaggtaaggtttgtggtgagggttatgatatgaatgcgaacaatagaaggcggtctgttcttcagcttgcttcaaggttcaatgggaagaagaggatgatagctgctgcacagtgtgcttgtattgcaaatgtatgcatgaattttataatgttttattgagcttaattagttttttgtgttatattgaggaaagaaagtttcactaattagtaggagtcttaatctgaaattaataatttcaggctacatacttttgttacaacacccaatatttgagttaaatgatttttgcaggaaatttttgaagagttgaggaaatgtaacgaactttttgataacgaagttgctgtctgtttagacgacaaggaacttgagtatgttgaagctgcttgtatgcttcacaacattgggattttcactggtaaaaaaggatttcataagcagtcttaccgcattatcatggtatatcctcatttccttgtatgtgtagtttattttttaataaaattcttttagaagatgcatagtagctaagcaatagtttttgtggagataaattgctaaacattcaatgagtgccctttttgattgaaattgtagaatgtaaattcaaatattcaataaaattggtaaataaatatgcttacagaatcatctgaaaggtggaagcctttgaaattgttgaccttgagtttattctttccttgcagaacagtgatcatcttcatggttacagcacagaggaaactaaggtaagccattttcttgttgatgtgctattccttgatgcttattctcaaggtgctttgttctgattctcaaattcgaattcacagttaatagccctacttgcaagatatcacaggaagaagttaccgaaacttgatcatgcatccttcaaggattttccaaaagaggtagaatattcacaacacattttctttatggatttgtttaaatgacattaaggaaacaattatttgttatgtttattcttgtgttattattttcagctgaagaagaagttcaattgtctatgtgcgattatacgggtttccgttgcattatgtcaacacagttgcatgtacaatcaagagataggctcttcagattctcaagaagtattcaaactggtatgcaatccaagtctgtttctcttttactcttagacataatatccatgacatctattattatttatgtatttttcatttttccctttgattaacagctacatatttgtaattttctcaatgattttttcaagtgttttgtaaaaatagcatgaaattttttattagcaaaataactttacaaaaaattttattagcaaaataaccttgtatggtcgcaataacgaccatgaattatattgtgcgactataaacgaccatagatttacactctgcgactatcgcatagtgtaaattaagtgaagttattttgcaaattttaatattttacattgttagtttgacaaattttactcatctctccctcaagataacattgaatgtactctatgctgttaatggaaagtaactttaaagttgtttttttgtttttgtttcagacactcgacacgattcttcctttaaatgagtttgagaacaacactgaagaactaaagaaagagttggaacacttcaaaaaggtaaaggttatcacctcatttgttttcttgttcttgttatcttatgtttagtgtacttaaaattaaataaacaaaaacatatgctctgcttgctttgcattcaggtgttccatagagatttgtctgctctagtttcttcaaaaacttcaaaatgatgagacaatggtctattgagacacacattggtctatttgaagttacttgatgctctaacttggttgataatttcacaaggtatgacattgttttgcttgtttaattgagtaaattcaaccatatagtttgggaggaactaataaaaacatagaaatgagaatatgaataaaatgaattgaaatttaactgcattgacatttctatttgtttttagatttttatactatatccatactattattactgtaattaattatcagcttctacacattttaatttaacaattgttattaaaaattattaatcaatcgtaacacgtcactgcaaatactagtcttcttcacatcgacggtgcaatgcatgcagctttgggttgtagttctttaaacaatttctacagtagaaaaaccattctattggaatacatttgaaatttaggtggcgtttggttggaggtaatgaaatggaatggaatggaaaggaaatattttttattccattcctttgtttggttgcattttaaagtattggaatggcattccaatagaatgctctttccaccattttggtggaatgactattccattttaaaaagaaaggaatgaccattccaatgtaacaagaaaaaaaaaaat

SEQ ID NO: 233655 - DNA, 1006 bp, Cannabis indica
gacttcatgcttctcatataacaatagcatgatcaacacatatcacctcataacttattattacccattgaacctaattcttgggatctccaattattaggttgggttaccattatgagtgactcatcgttctaagggcaatagtcccatttcttttgaagttttatggactttctctctagctagtcctttcgtcaaaggatctgctaaattgtcatcagcgcgtacacgatccactctaacactcctgttgagaggaaatatctaatagtgtcgtgcttacgatggctttgtcatttcttaccattgtaataacaattttagatttttgcaatagtcgcagtggatcaacacaactggtatcagtcttttctataaagggatctcagctagcaggctctttagccaacctgcatcttcactagcagaggctactgctatcatttcagactccatggtatgctaaaatagtctatttctttaacttccaagaaacaacgccactaactatgctaaaaatatagccacttgttgctttggagtcatctgacatagtgttctagtctgcatcactgtatccttcaaggacagctggaaacctttgataatgtaatccaaggttcatgattctcttaaggtatctcattaccctctcaatagcatgccaatgcactatactaggcctactggtaaacctgcacaataatcccacgacataagcactgtcgggtcttgcacaattagtggcatatcgaagtctgccaatgaggctcgcatattcagcttgtctcacaccgtgtgcaagtaggtttatagtcaaggtaattgtattttttgagaatcttctcaatgtaatgagattgatccaaagaaattctcttttcagacctagtaatcttgataccaagaattacatcagcttctccgaggtcttttatatcaaagttagcacataataatgattttacagcattcacagcatagatatttgaaccaaatataagca

SEQ ID NO: 233656 - DNA, 950 bp, Cannabis indica
ttatcaagagagcaaagagttcagtttgttctcatcagcttatcatctgtgtttaaccaatttgttgtatcttttatgattaacaattggaactcgttcgacatatacatgctggatgctaaattgcatgcttatgaaaggacattgtcagttgtaaggaggtccctctctagtactgcagacaaggtcaaaagaaaagctgagaatattgagaaaattcctccgacaatcctactacttgaggctcagttgagaaaaatagagaaaatgcttccacttcctttgattatctttcacaacagattgaaccagcaataagaacaattcaagaacagttaagtagacacattattcaatgttcttattatgaatagaagggacattttaaattaaaattttcctgacttctcaacactaacgacataggtaatgccttaatttttaaatcatgtgttttagagaatgacaaatttatctggatcgttaattctggatctactaaccatgtctattgttcattgcaactgcttgaaaatttgaattatttaaaacccgacccaaagagttgaaacttaaagttagtaatggcgaaatggtatcgattagagctagaggaaaagttaaactcaagttttagaacaaatttttgaatttaaacaatattttgtttattctaaattttagtagaaacttgatttttgtttcatgtttacaattgcaacaatatcaattgaatttttcaagttttgattctattatttctcggaaagatattcaaatatgtgtggctaccatggaagaagggctttatgttcttagactagatgaacattttgtacttaataacgaacaatttaagatagctaatgtaatacccaaaggtttaataactggattagcaaccctaactagattaattatgtattaattaatgaggaattatattatta

SEQ ID NO: 233657 - DNA, 1435 bp, Cannabis indica
ccctgcctatcattaaacccgtacactattgtcaaaaaactgctgtatgttccatctattgttgagattctcaagtgcattagttgacttgtgcacttgataatatcaacaataaaacggatcgggttccatgctataacaattctcccacctttgtgccatgttatattcgaggagaaacaccatccattgaaaacatttaggtacaaggctcctagtttgtgagcctttaccctagtttcgagaagcccaacaaaatcagccccctgtactcgaataaactgcctaatagcttgttgtttttgctgtttgttggccccccaaatgttccaaacaatgaatttatccattaccaagagagggatctcccccccccccctcttgtgttatcaactccctctgcttcttgctcctgaatacccagttggtctctctcggctagaatttgaaaaacattggtgagctttgtcccattgtcttctcctcttgtttctacaatttttttacccttagtaaaccatttgaaaaccctcctcatccacaggtggttgctctttccttcatcttccttaaccacccactcttgcttagcactctgtttcttgttgcattcatctgttaagtgccccatcccagaacaatgcttgcaaataaccggtttccattcatacttgacacatacatgaacattgctgccaaactcatcttcgaaatccagtaggctaggaaaatcttgattcatgaacacttccaccataacccgaggaaaattcagtcgttctctttccttagtgactgcatcaaccattataggcttgccaatttgaccaacaattttgaaaagtgatcgttgtccccagtatttgaggtcaaggtcttcgagttgtatccagataggcacagtcttaacatcttcctttctaaagtttgtatttggatcccatggcttcatgataactggtcttctattaaagaagatatagccaccattaagcacttggtccatgaatgttatcgagtgaaatctgatgataaaaactccataagtaagcatcttgactttgtctatctcatctttccacagtctcttaacaaaaccttcaataaccggcaatggaggatttgaccccaacacatagcatacaatggatggggtccaaaaattaacttcctcctcaatgtcatctagtgtaatcttaactttgctagactctcccttccccttaaattctgactgctgcaatgatttatctaaattgcgaattacagaaccagagcgaagaacaggggggttcgaatgtttaccttgaagcaattcactgttacattgctgattggcctgtatgaagtgcatcatatccattcgagcatcttccatgcgcctaatctccttcagagatgatttaggagacagtggagtcggatacacatcacg

SEQ ID NO: 233658 - DNA, 781 bp, Cannabis indica
attgtattcattgaattgggattgatcagggcaaatgtggagacaactagaacccctgcactgtcatatccttcttcatcagaggctaagcccacacttccaaagttgctgttgttgaatttcttttacaatgggtagtctttcttaagatgtgaagttgagctgcagataaagcattttcttttattctttgaagaagaagaagacttacccttgttctgattacttccatctttattctctttctttgaaaatttccctcgaaccaacaatccttcccctgaaccactttcttagagctcagatttcttttcatttcctttgacatcaaggcattttgcacttcttctaatgtaaggaaatctttcccatacatcattgtatccacaaaatgctcatagtttttactaggaagtgaattcagaactataattgcttgatcctcatcctcgatcttgatgtcaatgttctcaagatcaagcataattttattgaaatcatccaaataatcttcaatacttttccccgatgccatcttgaaagaatacagttcttgcttcaagaacaatcgattagccaaagatttggtcatgtacaagctttccaattttaactaaagccctgttgcagtcgtctcctttgaaacttccatgagaaccttgtctccaagactcaaaatgatggcaatgtgagccttctcaagaatctcagacctttctttctcagaccaacttgcaaatagttctttctccctgaatggcaccttgtaatccctgctgca

SEQ ID NO: 233659 - DNA, 1541 bp, Cannabis indica
aaagacaaagatggcatgcaaagcttcaaaaaatctgggtgaggttttttgtagggctgtgcatgagttgggttggccgggttgagactattttagtgggccaacccaatgagatcgacctattaaattctaacccattcatttcaagttttaattataacccaacccaaaccaacccattattgatcgggttgggttgggttacaacccttaattttttgcaattaaaatttcccaattttaaaaaattgagttgaataattaaataaatataaagtttaggcaaagtcaaaaaagaattcaaacataaaaaataaattattacaatcatccaaattcaaaatattaaaattgtccataagttctcatattgacctcaaccaacaatgtcatactcaatactccttacttttggtgataaagccttgactttaaatttattttctacaataataaaacataaaatcagtgaaatttttataaatatacaaacataacaaaacaaagagtgtttgtcaaactatattcactttttatcaataaaattaccttgttgggtggtaattggggtaggatttggatcattcaattcacctatttgggtagaagttggtacaataaatttatcgatcatggctgcccaaaaaaaattaaacaagcaattaagcaacatagcaaaataataacacataagcactagcaaaataaaaaaaaaaatataattcatttcttacataaaaaataaactacattaccacaacacaatagcagtaacaactactccaataaaaataatcacaccctaatagtaatagcaaaaattaacacatattatcaaaatatgtcaaacattataatcaccctaaccagtagcaaaaaaacaagtaatgtcccattacactattcttttatcacaaacaaataaactactatattaatatacatttacattacactacactacttttttatcacaaacattatcaccctaacaaacatcacaacaatagattcacagagatttttttttaaaaaagcacactataatacaactaggaaatattattttatcacaagcatcacaatgacatagtcacacaaagataataaaatcagattaaaagaggaaaaaaaagtgagatgtcgaccttacttgctccagagcactgagcaaatggactcccaacaacaacgcgacctaagcaagggactcccgacgatcaaacttttgtaggtgacctgaaatttcaaagaaacagaaaaaaaaatgagactgttttgtcattataaacttttacttccagcaaagagaaaaaatataaagaagttcttaaaagttacaatggaggaactcgccagtactctcggagccgaagggcaaaaaacacagccgcacgttggatggcgtggtgtggctggaagatggtggcgcgggtggaagacctgtacagtggtggtgggacggctgagagtgagttgagagggtttttttttttaaaaaaaatagtgtggctgctatgttagggtttggacaaatgaga

SEQ ID NO: 233660 - DNA, 1561 bp, Cannabis indica
tgtgatttctcatgaatctcaactaccagtgttatctttaggtcctgtccccatctcatccactggccaagtcactaaatcaatacaaaccaatttttgtcatgcagcatcacctgctgctgtagcatcacctactgctttctccacaccagttgttacttctggattaccctcccagctaccatccaaggtatcgacacctctcatacctacttctggtaatacacacaacatgcgaactcgtggaaaaagtggcatcagaaagcctaaagcctatctagctactcaagttcccacatccctacaacaaggccttcaacatatacaatggaacaaagctatggctgaggaaatacttgccttaaaaaggaacaaagcacattcccttgtcaaactacctcctggtaggactgccattggatgtaaataggtatacagaattaaagaaaactctgatggcaatgtcattaagttcaaagccagattagttgccaaaggtttccgtcagcaacctggctttgactacacagaaacctttagctctattgtcaagcatgtcaccatcagagttattcttactcttgctttatctaaagactaggatatcaaacaagtggatgttaataatgcatttttaaatggtgaattgtgagaacaagtttatatgttgcagcctcctggttttgaacaacctagttcaccagatcttgtatgcaagctacataaaaccttatatggtttgaagcaagccccttgagcatggtttgagaagcttcatcattgtctgctgtcattggggttcgtttcctcaaattttgaccacatgcttttcattaggcacacccctctttcaatgacagtcattttggtgtatgttgatgatattatcatcacaagcagtgaccccaaactcatttcccattatacatttactctgaatgccaagttttctctcaaagatttggggcctcttcatttctttcttggcattgaggtgaaaactaaatcaacaagtcctcatttgtctcaaactaaatatgttcgagatcttctccacaaagctgacatgactgaagccaaactattcaataccccaatggtcagtggtctcaaactctcagcttttgggtcaacctgttgataatcctcagcaatatagatccatagttggagctttacattacctagtcatcaccagacctgaaatctcattcagtgtcaacaaagtatgccaattcacggctaatcctctccaatctcactggcttgttgttaagagaatccccagatacctaagtggcaccatggactatggcattcatcttagaaaactagaaacttatgagctcacagcattctgtgatgcagattgggctacagatccagatgacaggcgccctacttctggctatgcaatcttttttagccgattgagtgggagcactgatcattgatatggaatctatagcttttataagtatttagaaatgaaacgatgatcttcttcgagcttggctggatagagataaatgattgaggcctcatttcagtaattatatta

SEQ ID NO: 233661 - DNA, 824 bp, Cannabis indica
tatattatatttcatatatataattattcaaatgaaaatatgaaaaatatttttattaaaaaaaaattgaaagttgaactattataataattcattataacaaattttattttcagttacaataataaaatttgtgactaaaattgaaaattgtgactaattataaattattattttatgttgtgattaaaaagtttgttattaaaagtcacaaaaatctttattatttattgtgattttagtcacaatatttgttgagactaaaactaaattagtgataacttatatttaaatattatgttttaattagtcacaagtaattttttattttgaataaaagttacaattaatcacaaaaaacttttggtaactaaaaagttctcactaaaaataatttttttttatggtgattttagaaatttgtgtcctttttatatctctttgttattttgtaacaaattttcaaacaaaacctataaatttttccaaataatatactaattgtaacacacttagtatattagttaatgtcactataaatttagttaatgtcaccataaatttaagaaaaagtgatatatatgattcaccgctcattgtgtgtaaaattatataatctgaatgtgtaatattattttgggataattagatgagaaagattaattatatttttacgattttttataaaaaataatataaaaatatcaaaaaaactacacaaaaataacaacaaaaaatcaacaacaaattaataaaagtacaacataaaaaatctgtattttctgtaaataaaataaaaaaaattcgtaaaaatgtttaaaatt

SEQ ID NO: 233662 - DNA, 1429 bp, Cannabis indica
ctttttacactaccaagttgtacctcccttatagtatacgacttgttaattatacccctcgaaatataacttttacaataacgtattcttttcatctaattaattaaaatttatcgtgaaatgagtgaagtggtagatggtagttgataaataaatgtaaattaaatacccttcattctttttacgctaataaataatagaatgtttttttaataataatctatatttatatctgtactttttaatcattaaagtgaaatgtatttaattatcattcatttatcaattactattctctgttgttatggcatgagtttttcgcctaaacatacaagtacagtctcgtaaatagctaacacgtggacccgattccagatggaaaagaatgacgtgtcaatagatagctcctgtaaagctaacctcgcatgatatgaacttacgagaatgtgcgaccgagacaaggtctagtcgcacactatgcacaacatagtgtcgagaaataagcaagactgagagaagctagtactggtcgcgcgtatatcgattatatacgatgatcaagtatatccctcctgcgacatgtaaagactacatctttacacatgtttggtctgaaagattaatgtgttcgaagacttgttaaaaactctcaaattttaagttgtcgacgcaagaatgcccgaatatgcaattaaggatgatcacaaacattcatcaattaacctaaaaagcccaaatgcccattatgcgagtagaacaccacatagcccacgagttcgcgtgattgaaatatggatagtcaatttgcgacttgataagtcgcatgttcaagcaattaatcaagaacggacgaaactgctcttacatttattctgttaacatttatcttaattattttgtattgttaataatgtaataaatggtcttgtctggccgtatatgtaaaatcaacggacacttgctttttatataaatgagtgatccaaatcaaataaactaagctaaaacaattgctaaaaatagactaagcagaccaaactctgactaaaccattacacttttttgtttcatttcctttttactacctttgttttgtttatttcgtagtctaatatttgagaatgtgaatactttgctattcttagtattatctattcttttctgataacatctgtaaaattgaataaaatatgataaaaagaccacaatactgtatgggcctgtttggtacgcaggactggattggattagacaggctaatttgtccaatccagtgtttgggcatgttagaagtctggataactaatccagttaacctcatctgtctgggattatttatcccatccagcagggtgggataaataatcccatgcaggttgggagtttttttttatcgttttttaaattaaattttattaatatattttaa

SEQ ID NO: 233663 - DNA, 666 bp, Cannabis indica
ttaataattaatatataaaaataaaatttgctatataaatagttagagcattattattggatatttgtgatttttaatacttctatatgttgcaccgacttataattatttagcgataatttttaaaaattattttctataagttttataagacttgctatacttaattataattataactatatgacattaagaaaagtgttaggcacccgtaatactttttaacaattttcaaatacttaatattttggattgtaattgagagaccattaattttttagtaataaaactacccaatgttactaatagtgtaattcttcccaattacactcaattttgtgctaatattttgcatttataagtttgtttgtacatgtataaggacacgatcgattaatacatatttattataatggctagtaatcatgtccttacaagtatacacacaaactcacaaacagaattgtagcacgaaataaaaaaacaaaactaaatttttaaaaacattgagtattttttccaataaaaaaaaaaatcaatatttctttggttgcaaaccgaaaacattgggcagtacatataaaagcaaaaggctagaaattaattcaagcaaaattacaatgttacttatctttattaatactaaaaacaaaaccaaaaaaaaaa

SEQ ID NO: 233664 - DNA, 1599 bp, Cannabis indica
attgttggttatcagaatacataatattttctttaaatttttcgaaacaaatatattgatccttttaatttttccgaaactaagaataaatgttaaagtcatatgttgttatgacttatcttaaattatttcatcacagtaagaataattactatatgaatataaataaattgagataaacttactgtttattattaataacaatgtgtatagcatagatttatatatacaattatgacatttttaacaagtatatttttataaaacaaatcgtttaaaaattacaattagttaccgaattcttaaacaaaaatcactagaacttaaataaaattaatatttacgtggctcgccacgtaactttcatctagtattttgtataaacaggggcctaggaagttcgaacataccaacatcttctaataaatatcggtagacgaaataaattcatagtcatttaaacacaatcaagtttagcattgtggtctgccaacttattttttgccttattatatttgaactttttttatttgtgatttcaagaagtttatcgatctaccgtgtttactaatgattttttttttgttctttcatgtagtgttgaaatcaatcatcatactatacctctcaacaaagtatgattcagatgagagtttgcactgtgactaactaaacattttagcaacgtctccttactaaatatgcgttaaaataagtgtattagtatgtatttatatgtaatgtatacacttgacaatttcgtttggagaaagctttacaaatttttttagtcaaaatattaatacacaggcaaagatatatgtttggattctatgtattaatattgaaattcattaataaaattgaaatttgatgcaatagatttgtattttaattttcttatagtttttttaagctcaaaaattggtatatataaattttaaataattatttatttttttctcaattaaaaattttaaaatttcaattttaattaagcaacgttttcataaaaggtgttgctagacatatttttatatataaaaatagtattaaattttaagggaaaggtaacacttgtaaagtgttgtcttaaaaatttacttttagtaacagtctaggaggaaacacttgtaaaataataagtgttgcctttatttattttttagttaaataaaagtgttgcaaatgatattttttctagtagtgcgcggaggtcacctccaagtcttgtgtttgaggctgggccgggtcgggactgtaagtctgagcaagggtagccaagagctcgtccattggcttagctacttcaagaaacaaacaaataagtgttagaacgttgacgagaaactttacacacaagaaaaaagcagcaaaactaatcctacccagacaatctaattcagccctagcaaagtcctacactaaaaggctggaaacgtcatccccaagaaagctgtctgaggggagaaactagctggaagagaggtaggctgaatgatccagagggataggtgcaagaggcccagaccccatccgggaccgacctaaaaaatgacctgagttggaaaaataaaaacccttggcatgatcgcccca

SEQ ID NO: 233665 - DNA, 1128 bp, Cannabis indica
aatctttcttaaaatgccccaccatgccgcacagaaagcatgtcttccagttgcactctcccagatgatgtttcttacaacgtggacaatcagggtaagaataaccctggcgtccacctctgcgttggtttccacgaaaccgcttattctgcccagagccaccagatgcaggggtaactttgctcttctgatctgtggtggcatcaccaccatccctaccataagtaagagtaggaaaagtgggggttccacaaatattcggagtcactcagggtcctgaaggaactttaccgtgccctgggctctcatagctttctgaaccatttctgcataagttgttgcttcgttggtagtaatcagtttgtaatagctcaatgaattccttccgcttaccactgcagacggcttcattataatatttggcgttgaataattcccggaattcttcccatgtcataacagtgacgtcccaagtgagggttatcaactcccaccacaggagagcatcctcctagaactgaaaagtggcgcaggtcacccaaccattaccaaccacccccataaaattcaaaattcgctcaataactgtgagccactactcagctttcatcacatcagcacctcccagaaatactggatgtgcttgcttgcgaaacctttcgtataacggctcgatacggttacgagcaacaggttgttctgctggcaccgctggagctacaacggcctgagcttgctgaggaggcacggcaggaagaccctactgccttattcttagaatttcttcatcctgctagcagattggatctcgcatttcggcaaacctttgcccccaatcaagaggagcttgtggtggatttacaggacgaccaccctgagctctgcgacagcgacgaccgcgaccacgtggattctagggattctggtttccctgaccgcctccggtctcagccatattacgctgacttcttggattccgctgggagtccattttataggacttagcctgccaacccataagccaggctggttagacggcgatcataaatcttaacaacgctcttatgaacttgaaggttgttgggttttatgccctaaataaaactctttacaatctgattagttatc

SEQ ID NO: 233666 - DNA, 823 bp, Cannabis indica
tacggctcatcttgataccaaaatccacgtatatttatactggttatattattttcagtgattgtcttctttcttataggattagtgttataccatttacattcaaacagtgtaattgtatatgcaccaatataagatatagtgattacatcttcaagtatgccgtagtaatcaaacccttcagttctagcaacattaacaccactattttgtgtctttcgctttttgtctctttcagttgcaataaactaaacaccattcactacacaacctttatgaaaggttgttaagtaattggagctagaagctagagcgagtaactcatcaacattttgtaaagatccaagcttgtgtaactcatatatctaaatacataaaatgtattaatatgagaggaatatagatttttgaattaaaaccttaaaatattgtcatcataccttcttatgaaaccacggacgaaaagtttgtctatgcaaaacatcgtggttactattaggatactcatgcctgatcttctccaaatgttcactatgaaatatgataatgtcaaggtacaatagaggaaaagagagaaaaaaaactaaaatttagtagaatgtaacaaacttactctaaataagtttgaattccaggagaattttgaagaatgtaccactcaactttttcacgactgatacgattaagaggcttgataattctgttagtcaaaggacgagattgagaattaaaaactgagagatagcgagagacagaaggtgcatcttcattttgatcaagatgattaaatcttgtttcacaccctttaaagtacattgaacaa

SEQ ID NO: 233667 - DNA, 1046 bp, Cannabis indica
gaattttttcctaagtcattcgaatagactatacaaaaaaaaattctactatcttattctcaaagtcctgacaagttatttctatccatatgaatgtttagatttactttctccgttgtattttaaagttcctatcacaaatgtcatccgaaagaagatgggcttagaattttaaaattctcccactcaaataaggtattgtaattatgtggacaaaaacttttattggtaccaatttctattacaatagtaaaatattaatttgaacataaattaagatcaagaaaaaaattctaaataattttgttaattttgttcattatattacttccatgtttaaaaaaaatatatgtgttatagagtattgtggtttattgagtatagtctagagttcaaaatgaactacatatttcaatagtttaatccacccctaagtgatatagagatcatgtggagttatgaatataatccagagttcaatagatataaaagatcgttgaactgcatattattcttaactttttccacccctatcagatcaaaagatctttttattaaacaaattcttaataattgttttagaattaacaattattcataaacatagaattgaaattctaagtgtttatgtagtattaactctttgcagagtttaatataccatagaatttgtatcaataataaaacacatacacatacaaacattataaacatataaatataattggtattggcatacacaagataaagaaatatgaagctcaattcataaatgcaattcattaccaaaagagaaatttaattataatattctctaaaataaaacgaattgtctgcagtaatataaaaaatagggaatagaaatcccaaaccaataattcaaatccaaattgttgaggaattaaaacaattcattcaaaaataataataaaatagaagatttcgagcttcatcttcatctaagactatctccacccatctatctaactatccgactcaactcactaggattgcaatccaagttcaagcagctggagctgaaataa

SEQ ID NO: 233668 - DNA, 948 bp, Cannabis indica
gcaggagatggtcttacgccttataccattatcgagggtcaggtggtctcgagttataggagtagtggttgtagagtacttattatcggaacgtcagtccactacgtgttctatctcaccaccaggccacgttgaggaagtgattatactcagtctcatacctctcctcgtgcaagccttgtcctttgattccttccttaacagtctcatcttcaacacatatccaaattctcccttcacttcacatttataacactaactcatgggtctcgcacgtgagcctctcacacaccacacgcggcttacatacgagcccttcacacaccacacatggctcgcatgcgagcccctcacaactcaaatgcaataactcgcatgcgggtctcacatagacttctcgcaccatagctttcatggatgtctcacttgtatcacgacttgcacgaatgctccaccacttgcataaaggctccacgactcacacaaatgctccccggtttgaaaaatgttgtccggcttcgcacaaaggcacacttgctcacacacaggcacatcgacttgcataaaggcacaccaactcgcactccccactttaacatttcagtggtcttagtattttgatcataactttctcgatatatgttgaaattagactattcaaaatgcattggcaagataagaaatatatttatggattgtatgcttatgaaaagatctcattctaaacgcatcattatgaaaatcctctaacaatttccacttagtaagttagtcttactaactctacctgcgagccttgcacacaccacacatggctcgcatgcgagcccttcacacaccacacattgctcatgtatgagcccctcacaccttgtatgccatggcttgtatgcaggtctcgcatggacgtctcatacaacggctcgcctggacgtctcgcatgcatca

SEQ ID NO: 233669 - DNA, 1341 bp, Cannabis indica
gccaagcttgaaggcaattacaacaacaacttttaagttgtcttgcatgacgcttatcatgggcgtcaatcgcttgttgatgtgtcatggttatcaggtaagtctttctctccttgggttttatgtcacattgggaataatgtgaactttgagtttggggggagggacttagttttaaatttcgttgtttgtctaattgtttagttgtttagtttaatttttttgtgtttttgtgttgtttgactcaatttttctaaatgtgagtcaatttaaaagtaggtggatagcatagtttggaaattcatttatttttcaaaaaatttgtgtgcttgatgacattacattcttgactaatttcaattttgtgatttaaaagaacatggaatcatactaagtaaatttatagcaattgaattggtttatgtatgctaattgtgaaatgtggaaagttatttgaaaaattctagaacttgcttgcttgctatttgaggcgaaataataaattatgcatgactaggaaagtgatttaggcattcttttgatcgattgtgcctttcaagtcatccctgtgattttatcctagttaccctttttcagccttaacttcatttctttgtttctacacatatttagcctaaataaggtaaacacatgaatatctaaaatttgaccctacactacactacacttgatatggatacactacacttgatatgcatacaagataatagattgattgaaatgcacttctagttttatgttagtgcaagtaggagtttgttgggattttatgccctaaataaaatccatttaaatattatcttatttgctatcaatagaagattaggagtcatttaaatttacatgttattttcgtgattatagtttaatatatagtttctgataaatctagaacataaagtaattcacaattatagtgatgtcatcacagtagaaagtaattgcgattatatgcttcaaagtatagtcccatgatttattagtgcattagatttacactgacgtgataatcagcgataaatttacttacaccttggatatgtggtatgtcctttctagggtattggtaaagtatactagtatcggatgtatggagtatacatcagactggaccgatattaaacttgaataagatataataaacctagcgtaatatctgtaatatctttctaagttaatatcacttagttgatcttagatagatagatcttactcctaagatggttcggctcgagcttaactgtattatttatgtaacactctactagtttatgcgtgttttcgtaattttaacttaattgtgcaactcgttgctaatca

SEQ ID NO: 233670 - DNA, 2430 bp, Cannabis indica
taaaagtaataaaatgctaaaatacagtaaaccatgtaaaaatcccaaaaaacaatcttgagcttaacattaaggcccattactgtaaaagcccataagaaggtccaactcatataagccacaagatattttagacgttatggaccggtaggacaaagcccaaactaccagcccatcaagtccaccaacttaacattcatccatgtcaagtattagctcacattaaactgctacggtggtgacatcacatccatatataaatatgtttgacaactcccttaaaacaataaactaaccagtgatatttgtttttaaattctttaatcataaaaataaaaataaaattttttatatttttagttttgaaaaacaaattgtattctacaattatttttatttttgtaattttaaaaataaaaaacaaaagtgtattctggaaattttatttctattttcatttacaaaagtatgaaaaaatattagtttacatattatatttgagtcggatccgagactagagtccggatctaggtccagcattggggcgggtgtccagatatggttcacggtttgattccgaggtaggattcgagtctgggatctggatttcaaggtttaggttggggtcagagtttaaaatattaattaagaaaaaaaattgtttaaaaaaattttgaaagtgattttttaaaaaaaaaaaaatttgcttcttaattaaaaaattgagaattgaaaacaattttataaaacatgattttagaaaatattttcacttttctaattttaaaaataaaaatttgattaaaaattattaccaaacacacaaactattagggttgttcatcaaactgctcaaatcgcctgcatcgcaccgcactgcaaaaaaaatacagtttgaaattttttacggtgcggtcgcggtttgaattttacctaaatcgcgcagtgcggtgtaatttccggttttgaattgttaatatgcagttcaaatcgcactgcaccgcatatataaaaataccatttttatatttatttaggtccattatgtgaaggctcagcccaaagcccactaattattgtattgttaaaacttgaaactttttttcatatttattttcaagccttatggtatttttgacaagtgttgctcaagatttattgtatttgtgatagtttaattattttgtgatagtctaaaccacaaaaatcgtaccgtactacaccattttttacactgcgatttgttacagttttttagtttcgcggtgcagatgcgatttgggaaattagaaaaaacgcatgtgcgggttggtttaaaaaaaataatcaaaaactgtaccacccgcatcgcgaacatccctaccaactaataaatttaaaaattcaagattaaaagaaaaggaaaacctatattgacatatagttatctaaattttcattaaatttctacttagtagttcttaaaaaaaaaattggattttttaatatttactgactcacaaaaatagaaattaacaaaataccaacaaacaaaaccaaacaataacatagcaataattaaaattatattttataaaagtgtcttcactttttgattttttaattgataattaaaatttgaataattttgaataaaaaaaaggtcattttcaaaaaattttaaacaatttttttctttcttcatctatattttggacttcaacctcaatctagaccttggaactcagactcaaacctggatcccaaaccatgaccttggacccaaaccaagacctagacctagaccccgacccagatctcgacttcggacccgacataaataaaatcaactaatgaaaataaaaataaaatttatagaatacacttttgtttattatttttaaaattaaaaaacaagtggttataaaacacatttttattttttttaaaaaaaaaatacttttatttttgtgattaaaaaatttaaaaataaaagtattaccaaacgccacatatataaactaataaatctaaaaatttaagattaaaagaaaaagaaaacctatattcacgaattgcactctaaatttttatcaaatttttagggacttagtagtccaataagttttcgaatttttcaaatttttattgacccacaaaaatagaacttaacaaaatacaaacgaatgaacaaaattgaacaataacatagaaatattaacatatatatgtttgaactataattttaatatatatatatataacacttttcaatgggtattactcattgatactaaacaaatttaactataaatattaattttaaaaatattaaatcattaaatttgatcgatgatgaataataaaagaaaattttaaatttatatgtttaattaagctacttaattaaagaaaatatcagaaaatatatctttttgtactatattaaaa

SEQ ID NO: 233671 - DNA, 1044 bp, Cannabis indica
ttgcaacaaagcttttgagctctagaattcagaatacattacctgaaataatttctccttctcaagggggatttattaaaggtagatatattgggcataatatcataatttgtcaagacttggttagacactatggaaggaaagcaaataaaccaagttgtatgataaagctagaccttcaaaaggaatatgacactgttgaatgggattttattgaagagcttctagtaggacttgaatttcccaagacatttattcagctcattatgaattgtgttagaactcctaaattctatcttatgttcaatggatctttacatggattcgtttagtctaagagaggacttaggcaaggggaccctatgtctcctcttttgtttgtcctaggcatggaatatttttctagattgatgaagaaaattggtgagaaggatgattttaaattcaatagtggctgctcaaatattaagcttaatcacctagcttttgcggatgatgtgctcttatgttacaatggagacatgaggagtataaaatatatgctacaagctttgaagctttttttaggtacttctggtttatgtctgaatgcttctaaaactgcttgctattgtagcaatatggctcaaagataggtccatcagctgctggttttatctggttaccaacaacaggtattgcctttcacttatctgggaattccaatttcatccaaaaaaatatcagggaaggactgtgaattgcttgctaaaaagatgactgctagaattaagagctcgagctcgagaaagttgtcatttgtagggagaataactctaataaactagctgctcatagctattcaagcttactggagtcaaatgatgattttgcctaagaagattctaaagaacattgaggctatatgtagagcatttctttggaaagggcaaactgcctttcaagggggtggtgcagtggctggggaagatgtttgtcaatcaaaaaaaagagggaggtctgggtatcaaaagacttgaagagtggaatagggctgctatgtgt

SEQ ID NO: 233672 - DNA, 1185 bp, Cannabis indica
ataactaatcagattgtaaagggttttatttagggcacaaaacccaacacttatagctaatggcatgctgatctacaggaaaagaaaccactatccaagtctcattcttctctagagcatctatctctgtgtccataacattatcccattttgaaatgccttgaccttgactgaaaaattctgggttgaaatagctagaaatagccaaaacagtagctctaaaagtagcaaataacctgtgataagaaataacccgagacaaaggataaggagtggcagaaacaccctgagacatgtgagcagaaacattagtagccaaatagcaatgataatcctgaagataggaaggtttgttaacctatcttcctattctgatttgagtattggaaataggtttatcaaaattgacaacatcagaattgataacagatttatgggaattagaagtaggagcacatggaatagttgatggaataatgttagaattaacagtgtgaaggatgttttcttgagggtcacatggaacagttgatggaatttcaaaaaagaaattctcataggcagctagaagaccacctgaatgaacaaataaaaaaaatatgttcataaaagtaaacatccctagaatgttggaattgagatcaagtaatctataagccttcatgcctgtacggtaaccaagaaaaacacatggggcaaatcttggtgaaaattttgatctggattgacttaatgtggaagcataggctaaacaaccgaaggctttcaagtgctcctaggctagtggtttggaataaagaatatcaaagggagatttgtgttttaaattaggagtaggtgtcctattaagtattcagccgtggctatacactctccccattaacataaaggaatgcaagattggaagagaagagctctagcaagattgagaagatgctgatgcctcctttccactatagagttttttcgaggtctttgaacacaagagtgataatgcatgatgccaaggtctttaaacaacatatcaaattgtaattccttagcattattaaacctaaagcctttgatggtttgattaaactggttttgcactaaccttataaactgtggaataataatctatgcttcagatttatgtctaatgggatggatttatatgtatctagaacaattatctataatagt

SEQ ID NO: 233673 - DNA, 630 bp, Cannabis indica
tttatcttagttccaaaaatataaccccatcttttttccttttagaaaagttttcatagtattttaattctaatgcgaataattttttccatccaaaatttcacattgatcgcttgaagggaatcatgttcttgttctaaggtcaagatcgatgatgagtttgtcttgggagagctgccctgtctgtggtagcaaatttctagtttaatcttatgatagtttacttggcaaaaataaaattagtgtcataattattgttatattggcaagtttaacaattttatgattgttatagataatattaaatattaaactaatttgcggtgaaactctttatgttttaatttattacatttaatctctttattttttattttctttgtaaatttgacacgccagttaattattatcgttaaatatcaactgaatgatcattgtatatacctgtgtatatgtaacagtaaaagctcgaagtcgatatagtagtaatctagttagtatttaacggtaatatttaactacaactttaaatttgcaaaaaagtaaacttagggattttgccagcaaaaaaaaaaaagaaagttaggtgccgtttggtaacacttttttaatcagttttttgttttaaaa

SEQ ID NO: 233674 - DNA, 1440 bp, Cannabis indica
gcaatcttcatccaaatacaaaaatatggaaaaaaaaaattagtttgtggaaatgtggaaagtggaaatgtgaaggggaaatgtgaagggggttacctgaagcaatgaaatccgtggtggagcagtgccggtggtggagcagcgctggtggtcggggaaatagggaaatggggaaatgtggctgcaaaccgagagaggaagagggagaggaaaatttagagaagtgaagaaatggggaaactgggttgggttttttttatagaaaaattattaccggcggggcctgccggtattaatggtcccgccgatatttctattagtagcggcggacccccgccggtattggtccgccgctaataagaatagcggcggaccccgccggtattggtccgccgctaataaattttgaattacatcagttttatttccccgcacttaaatatcacctaatattagcggcgggatgtctgccggtattactaaatgcccaccgataattagtattttatttattttttttttaaaaaaaaatcagaaaactggattaataccggcggactcccacatctgtcggtaataacctcattattaggggcggaccttccccgccggtaataggtccgcccctaataatcaaaattgttgtagtgtgtataataatatttgataaaaattaaacataaagcatacaataatttattaaatgataggttcctatcagtattaaataattgatattgattattttcttcatttttttttataaatatgaaacaatacataattattttattattttttactttttattattatttttttttaaaaaaaacctctcaaaaatttcacaattgagtttctacaatttcaagcaatcttttcatacctaaattaatcttgcttttgtcctgccaactactattgtaatgactgtatgatctagatatggattagtggggctataaatattaattattataattattattattattattattaataataattatatgtgaatatttatattaaatgtaatgtaaaatatgttattttgtgattctaactcggtggcgatagaaaatataaaccggagaattatctaaatcacatggttgaacatagaaccttttattatagagaattatagtatgttaagtttgaattttgagttatttactcatttatataaatgtgacatataggacctccgttcagctcgtaaattttctatctaagtcgaccggcacgcttgaatctaaaaatgagataagattagcataaaatatatatatgcatgtgtgtatgcacatagttacatgttggttatattattatatactactgacactagtatagttatgatacgtagtgttagagattttattacaatggaagaaaattaaaatattacaactctattgcaatacaatacaagga

SEQ ID NO: 233675 - DNA, 1286 bp, Cannabis indica
tatatatatttatataacaaatgaaaaattattacttggagacgtacatgatcaatcaaaacacgaaaaaaaaataaaaataaaataaaccttaataaaacttaaatgaatatgtggacttctcttatatgaacgtacattactcaatgctctatattattaggccttagggggagcaagtccagctttgagcttttgaatggtatcaacatcagtcttgaaagagatagccaacacattatcatccaaaccagatgcaaacaaagtgtttggaagagacactgtcccagcattggcactcccaaaagccgaaacagccacagcagaattctgaggatcagagttgtactggaaatgcaccaatccctttggaaacacaaaaatgtctcctgcctgtagagactgcgtgtacaacttatttgctgtgtcgacgaaacccacttcaagactgccatcggtgaggaggagaagctcggcggagcggggatgagtgtgtggcgggttagcggtcatgggcgggaactgaagaacggcatagccaacgctttggccgttgagagcggggaactccgccatgctcactttggtggccttaaaggttgcgggcgggtccgctcccatcaaggattccaatccagtgaatgtgaagaaactcccatcgaccccttggctagtattgattggtagtacgaaatctgttaggatatctgggtcccctgccattgtcatttccagaaatccaaagcaactgagtattagtagtactgagaggacaatgtgggaataagctttggatgccatgattaataatttgggaactaattattattaaaaagttaagtttatgaattgtgtgtgtgttttgggatactgtaaaattaaaggtatttataaacatgtgtaatcgtataaatcaataatgaaatatattagtatatgtgtgggttttggacgtactctttaggcaggctttttctggatttgtattgatgggaacaacgtaataaaaatgttgttattgtagtttacagttgtgtttaataaccgtgttttgttattttcaaggcagagaacatacacaccaatcttccttatcatataataattggaatataattaaataacatgtatgatcacctaataatatgtaattaatgtttactaataaggaatgataagaatgagaatcaatactaaggtaatcattcctttacatttatttacttgcattattaaaattaggaaagagagaagttgattaaataagggagaaaagaaagggagaa

SEQ ID NO: 233676 - DNA, 605 bp, Cannabis indica
atcaatgtccccagcatttgtttcagcatcctccctagaaggttcagatcattccacaatgaccatcgcaaatagtcgagcaaagtgtgggtccttatctgaagctttcctaaaggtttgcttggtttttgctattactttattcctgggcggcaagtttggtttggaagtatgcctcgcgatagtgatataaatttatgctagtgcatattgctttatgaaaggctctagacgaccttttggcaatgtgtcagggacgtcagcccagaccttatacgtccaagtagtaggcaagtgcacctctagcctttgttaaattcctaaatgaaccggccatatccttttgcattttttctagtcgggataataattatgctgcaccaaagattcgggagattctgacaagtcactcgtaacctcccattcatcaaagctcgaagtggatcagttttcactcgatgaagatgagtctgaatgaagcctaggttgggtctcgaaagaagatgaagaaggtcactttcaatcctatggttacctccctagtattcatcaggattcatctacaaaagaatgaagacaaagaggtaagaaccggatagaaatat

SEQ ID NO: 233677 - DNA, 1746 bp, Cannabis indica
ttttttacatttttatgtgtaatttttttagcaatattttatacaaactaaaaaaataataaaataacaaaaattaatattgaaagatttattttttataaataaattttaaaaataataataaaaaattaaaatttagtacgatgtatttttaatgtttttttttttgttattttaatgtatgtatgagattacctttcttaactaaacaatatccttccaaacaattacacataatgtttattattttaaattaaattaaaaaaacttaaatatgtaatggcggaagaaattagctcgtaaaaaaaaaagagaacaaataataaataataattaatttaattttgtggctgtatagtgtttttgaagggggaatcacaggtgcgtattctttacacagccgccgctccctccgtctcagcccacaccccactcactttctctctccttctcttacctctcaactcaatcattctccgtccaccttctttgcctccgttttgcatccttgtcgaccttctttgcctcggcctcggttctaactgcttggtgaaatccctactggtaaacaaacttattacatgtgtttgtgtactgtaactattttttttgtcgttgttggttatgctgtagtactattaggatgttctcggttcttaacaaaagttgttttcggagttgttagtgttttgtgtaattagttttgtgctgaatgagtttttggattggttctcaacaccgttgggagttttgtagaagacgaatgcttaatcaattgatggtgttatgttttggtttcagattaattggacgaactgttcttttgagtgagaatggctggagttcgagaaattacgacttcagaattcttacaagtatgtttctgtgtgcccttttgcgtttgatttttcagtgatgtgaagtttgtctatgtagggagattgataagtgtatactatatatattgactgtttttttttttttgagttttttaaaaaattattgtaacattctgtttttccattgatgttgatttcagggaatacataagcaaaatcttgttttccatcgtaattcacgagctccaagatcaaatcccttatggggcatggttttgcgccctagaagaggaattccattgaatttgaggtgtcgtgctcaggcaaagcctaaagctgttgtttctgatggcttgggcagtccggtaactgagcaatccacaaccaagcctggtgctggagttgtacatttttatcgggtgccgctgattcaggatagcgctacatctgagcttctcaaatcttttcaaactaaagtctcaactcagattgttggtttaaaaacagagcagtgtttcaacattgggcttcaggcagaactttcagtcgataagttatccgttcttaagtggcttcttcaggagacttatgagcctgagaatttgggggttgagagttttcttgagaagaaaaggcaggaagggttgagtatggttataattgaggttggtccccggttatcatttacaacagcatggtcttcaaatgctgtatcaatttgtcaagcttgcggtttgacagaggtgaatcgattggaacgctcaggagatacttgttgtataccaaaggtcagttgcaggagcctcagatcaatgaggtagctgcaatggttcatgataggatgactgagtgtgtgtatactcagaagcttacatcttttgagacgactgtggttccagaggaggtt

SEQ ID NO: 233678 - DNA, 579 bp, Cannabis indica
ttccttcaacttacagcaatttcaatttgctctggaacactctagtttctctctggtccttccagtcccctttgttcatccgcgtgatgttctccgtcccctttctcttccctccttccctccattacccctatctaatcattacaatacatttattgccctctgctctcacctcgggccaacagttgcatttaatggagtattagagaactctaggttctccaccaccatggcctcaaatcttacatttaataaccatcactgtactcaggtgctctcacaagagatcaggaataatcatggttttaggatgctatggatttgggctaggcgaaaataggatcgatttagcatctcccttccttccagaggtcatttcctctaggtattttcttctcctttctttctatataaaggccataactaaggtttatctttatcacacttttacccactatttgccactatcttcttctactttttccatgcaaccagccatgaacaccaaccagaacccagcaaccattctcttcaactcacagccgaagaagccctgatccatgattttgatcatgtttc

SEQ ID NO: 233679 - DNA, 893 bp, Cannabis indica
gccgctaatttacctttttttttatcattttgtaacatgtggaaaagttgcttgttactataagtaacctccacatttatcaccaatattaagtgtgtaaaacacatcttaatttgaaaatcttaatgttatagaagttatggtgtgtgcatgaattacatttgagtccataacattcataggggttatcagtttgaatttttaaatggtaatattatacacactatataaagaggtctaaggtgctcatattgaaatagaccaagttttctatcaaaaaagtactttgctaaaaaatcctaaaaggctagaaaaccattcatgagtaggggtgcacacgggtcgagttttcgggttttcgggatttcgggttcgggttttcgggcatcgggtcttggaaatgtataaccgaacccagttttcgggtgcgccgggtttcgggtcgggtttttcgggttggttgtggtcggttttgggtcctattgggctcagcccgaattaatttatgggctgaaataaaatttaatttttaaaaatattatttttttttatttttaacattagttggacttttttttataattaatatagtagaacaatattagacaaaaagagtaaagtaataataatattgacaagtgaaataataaaatagttgcaagatagtttgtaaggtatatatttattagtatatgcatatatgtgtaagaatatatatgagatgaaaagaaaataaaaatacataaaagacaaaaacaaacgacttgtttaatatttatctattcttctatcaacatattagatatatatacagtagaacctttatttaagaatactctattcaagaataacctctaatttattataaaaaaatcaagtcccaatttgagcca

SEQ ID NO: 233680 - DNA, 1359 bp, Cannabis indica
aaactgactaagtttattcacagaataggctaagtcaggccttcttattgtcaaatattggagtttcccaatcattctcctatacaacttagggtctgtcagtttttcttcaccttcttgacttagttttagattggtttccttgagtgtgttgacaggtttgcttcctagaaaactaaaatcttctagcaactgtaatgcataaggtctttgtgtcaaaaatattccttctttagttcttgcaattttatcccaaggaaatacttcaagtcaccaagatccttgagtttaaatctgttgttaagtctggttttcaatttattcattgctgtaagatcattcccagcaagaatgacatcatccacatagacaagtaggatgataatgcttgctccatgctgtcttatggagagagaatgatttgaaatagagtgctaaaaatcttcttcattaagagttgtggaaaacttctcaaaccattgtcttgaggcttatttaagcccatacaatgatttttgaagtttacaaatagcattaggtggaagctcccccttaggactatactcttgaggtatagtcatatagacttcctcatgcaagtcaccatgtaagaatgcattgttgacatcaagtttgtgaagaaaccatcctttgatggtagccaaagcaaggataagtttgactgacaccaatttggtagctagagcagaagtttcatagtagtcaaccccttcttgttgattgtaacccttggcaactagtctagctttgtgtctctcaatgcttccatcagcattatacttgattttgtatacccatttacaaccaatagcatggtgatgagggggtaatgatacaataatcaaggtctgattgtcttctaaagctttgatctcagttgacattgcaccatcccaagcaggtatcccactggcgtgatgaaaaaattcaggctcataatggctggatatagctaatactagagcacgaaattgtggggacaacctggtatagttgataatttcaaagataacttgatcagtgacagatgaagagttctgatgttggacattgttggcagacaagagataatggtagtcctgtaggtatgagtgcctttttgtttttttcccaaaccgattgagtgaaacaggctcaatagtatgctgagtgggcagggacaaaacatcctcatgcagagtaacaacaggatgcacaatgtcaagaagcataggttcaatgatagaatctgtatgaacaacttcagaagatggatgaaactgaggtgtttatgtgtggaatcagtattgagagactcaatggtagtagggaaaaaatctgatatgtgaagtgtaaaaa

SEQ ID NO: 233681 - DNA, 1296 bp, Cannabis indica
cttggtgtttctaaacaaatttccttccaaaatcttgctaaatccttaactgaaatggatgaatttctggtctttgaagattggttcttttcttgggttttctagggctgagagagagagaatgtgtgagtgagtgaggagaaagagtataacttgattttgtttttatctcgaaagttctttttttatttattacttaattcaacataaatcccttattcttatattaaaatccactaaactaactataactataaaccaaataaagcttaagtgaaaaattaccataatgcctttactttatctttaagaaatctttaattttatgggtaaaatggtcataattatttgtcccgcataaccccaaaattctaactatccattaatcctaccttgctaattctaagatattgaatcatgtctaagtgactctaatgaatgaaccgtaaaattttactattatcgggtataaaatataaaaatttcataatttataaataacatgcatgacatataatttaataaaatcttcgtaattgagaaattatttcactaaaatacctatttttgacaataaagcttcatttctattaatgcacatattaataaatattaattaatttactaataaatatcaattatttgccaattccatttataaataaacagtcattacaataactaacatgaaacaagtttctaagacgaatagatgaaaacaaaaaatgtaaataatcttatcataacacatccaagttatgttattattatgttttataatttgataaaaattgagtttaatgtctattttgtactattttgaaaaatatgaagtctaaattgttatttaataaaataaatagttcaattagtaacttgtaaaatatatagtctaaaatagtatttagccttttgtatcataatatatattaaaattttaaattattattttttacattaattgtatatttaatattttttagtaaaacatataaatatgtgtaaatggatttctttttaaatgtgaatcaacattacaaatatagattttagattttttaatccaatttacataagttccgcactttacataaggaattagattagatcattagatagattaggtattggaacaccttacatttttgtttttaatttttttttctctataaaatttacaatattccattaaaaattatatatttttttaaatgatagtactctttttaaaaaaaataaaaaaataaaaaattattatgcccactagaatatgtctctggctccgccacctataac

SEQ ID NO: 233682 - DNA, 915 bp, Cannabis indica
tgtattttagggattcggataatcggaatcccttaggaagctaagcttgtcgcactttcgtagtaaaaggagaggtcccatgcagcttgtatatgggctttctccgctgctcgagtattttcaaagcttttaaaagcatgctttgatcaatactcctggctatgggagctgggactgctgcggctgcaagggttgtggctactgcggcgaggtttgctgggacattaaccccgatagtcgctgttggtgcgttaggcgggtttgtgcgagtgtgtacaccttgattgcccatttggggatcacggggtgtttcctcgtcacgaggggcgtgggagcgtgctctgaaaacaacgttaaggtgatcacgcagatcacccctatgaacctgatatcgtccccctactacgtctccacagaaccggacctcgtatacctgttaggtgtgcgaccatgcgaggacgaggaggtggattctacgtcgttgtctcgtgaaggcctgctgcgagggttacgtcgtttggggtcttcatcgatctgcgtctcttggttgggatacctcgcagattggtctcttgaggttggctgatttaggtccacaccttcggggttggtccttcgttccctgcgaatacgtttattacgatttcctagaattcgttacctgagggttttctgtgcgagtagttggggcttgaggggggtgtcgggccctgttctgtccatccacctcggtctgtagggcgcgtaattggtcctggatcacggtatactggtcagtggtgagctggacgattccctcggatactaccgctggagtgatgggtggaaagtgccccattgttgctgctggcgtggatgttcctcgacttgggggccagcagtttcagggaatagattgagaggtctgacattacc

SEQ ID NO: 233683 - DNA, 1038 bp, Cannabis indica
tacccaaaactcattctaagatttttgtattccattcttcccccatcagataaaatactttagaaaatagtttattcttgaaagatcaaaaccttctctgcaatcttcaacaatgatttcaggttagtactttcgctcatcttttatcttcttcttccttaatttagcaaatgctatatagatttatgatttagggttttgtatatttaaaaacattttttaagaatatatttagatctatgatatttatatttattaagtgttttataaatcttaacatttgtatgtaaaaccatgttagttatttcaatggttgttcgatggagatatgctagtctctctcgcggtgatgaaacattgtgtagcgtccctcattattaaatggaaatacataacaaatgaaggtttatgttggattttaattacttgtacctgttaccttggttatgaaaaacttattcttaggttaagctgaatttcttttctctattatgttaacttatcttgtctacaaagttgaaaatagttttgatggcaaaccaatgatactgattttagagttaattaagtatttattttatatttaggaggcaaatgaacacttttgtctacacttaaataaaatttacttgattaaatgtacacgtaaactttgtagcctaaaaaccattgaaacaatttattgccccctaaggattatgtgtcactactttatatgttcaagttaacagcatttgcttttataattcaaagttataattcagtgcagctagccttttaggtggcgtttggttggaggtaatgaaatagaatggaatggaaaggaaacaatttttattccattccttattagaatgacattccaatagaatgctctttccaccattttggtggaatgactattccattttaaaaagaaaagaatgaccatttcaatgtaacaagaaaaaaaattaatgatttttttatcaattttttttatgtattttaaattttattccattcctattcccattctcattcttatttttatatttt

SEQ ID NO: 233684 - DNA, 552 bp, Cannabis indica
attgacttgatggagcctactttgactgtcgtgccactgcaacaagtgcctattgaacaagttgaaaaggattcttcagactgtgatgggccagtccttatttccaagaagcaatctcggactttgaatggtgggatgaataagaaggcaaaagtggacattaaggagaagttgcaatagttggttgccttaaggaaacaagcttctaatcctcattcctggaagggatctgatgtcacagatggcaaaaggtcttccaggaggagtactcgatcaagcaaccaaacttaggatttgcctccaccacctttatcaccttaaaacattttgggtacttccattcaattgtcgtgggaaaagacaaatcttccttatcttcctcctccacgttttaatctctgtgtcaagtctatgtcgctgcttgaagaagtaaaagcgcagatggaggccatcaaacaattctatttaaaaaggtgaagagttgagtatgaggagaggaggaaattggcttccaacatatccactaggcgcaatgtagagtttttagattat

SEQ ID NO: 233685 - DNA, 558 bp, Cannabis indica
tcattttcccttacaagttttgtaaaataaaatatttatcatttagaatttatttttatttttattttttgagaaaaaccattagaattttctaatatagagaatttaagaatccttcaaacactttcattctatttaatatactcgagaataatatggataatatttttatatgaatatttataatgtaactttgtaaattttgtaaaataaaatatttattattatattaaaatgtttgaattctgccaaaattcttttaatatgatatttttgttttcattcgttcactttatatataatcacctataattatattataataaagattaaacagtcatattgaaaataagttattaagtttcatcaaaatcaagtaaaaaattaactcttgacattttcaatatataaattctcatttgatagataagtttttatcaaattgtcttcagttatataagttttaaattaaatttaattatctaattaaatacaacttagattaatttagtcaattgatctaatttgagttcataaaatacagaataataaatgtgt

SEQ ID NO: 233686 - DNA, 1520 bp, Cannabis indica
cttaatttatatatactttacctatatatgtgtaaattaaaaaattaccattaaacaatttttctatatataaattatacaaaagtaaactcaataaataaaatttatatcaaaagatataaaactgacattaaaatcaaataatcaaaacaaaaccagaattagaattccaataaagatagactacacaaaattaagaaggttaataaataattaaaaataattctgaataacttccaaatttataaaatgaatgtataagaagattcgttgaaagaaagtaaatgattgataattaaaataataggcgttaattataaatggcaaattaaataataaataaaatattttgctagccataaaatctatcacattaatcccgatcaacttctggtatttattatcacattttatcaaatctcgatagaaaatttttgaattaaaaaaacataccattaccaataccacaaacaagtaaaattcccaatttttctaataaagggttgtccaaatactgtgattgatagtcaagtgaaaatataaaaagcaaacacacctaatcccataaacatgaaaattgtaaacgttttgaacgcatcaagacaaaccaaaaacatgtattgactcattcttttatgattcatatatagaaatattatttaaaaaagaaatctaacttgaagatttatcaaagaagttgatggaagataaagaatacccctaatatttgtatactaaagagtataaaaataactcttatcttaaaacaatcaaaatacataactcacgcatatgccatcatgaaattgagccaccctccgctcatacatggcaactcaaaaattactcaacatttaagaagctaataatggtcaaaccgcaaaaatctcgggccatagagtgacaactagcgatctgcgccatcacttatggaccttcgactgaagtcgctaccacctccagtcatcggaggcaagggataggaccgagagtttccaccggatccaaaaaggtcgtcctttgtacaatcaaccatgcagtttaataatatcatataggaaaataaaatagaaaaaaattgtgttaaaggaaagaaaactgtggtagaattattaaaacataacagaacagttagaaaacactaaaaataatgaaaagatagaaaacttatcagcctagtcgatcgtagagaagaggcagacatgaaaacacagagattttaatggtgacaaactacataaaaaatcattgccactgactcgcccatgattgccctttgcacgtatgtcatgtgtactcttaactcattggtgaagatgaatcggaatgccggcgatgaagaatacttctcgatatctggagtctcctggaacctgcaaatatagtaatcattgccgaacaaagctctgagaccttcgacgggtttaatgattgcgtggcgaggacggaagggaacgctcatgctgaccaaggctttggggaaattcaatctctacagtcattgttggaatagtgtttta

SEQ ID NO: 233687 - DNA, 1121 bp, Cannabis indica
acacttttttagtggtccacgtaattgtaattattcaaatattataaaaaaaataatttaaaaatataaaaaatagataaaaatttaaaaacaattattttctttttcctttcttaaaaccctagctcatctcatccatcccagccgcctccccctctctctttgttcctttatctcggtgcaggcagaaggccagcggacgaccaggtgcacggtcgatgtaatgttttcgcttcaagcttctattgggccttcccccatggactcatggctcttatacacgggcacgccactctagctgcttcatgaactgacaactagccctacagactaatacgagtgtttccaacatactttattctcactctcacacttcttaagaaaatttcataggaggtcacccatcttgaaattatcccaggttaagcacgctttaccgtggagttctttcgtaataagccactagaaaataagatgcaccttgttgatataggtagtatcaatcaatatatttaattctcttcaactgtgtactcacatacctacacagcctcaaaatcatcacacttgacattttccaagcaatgtggaattgcacagcttactcagtattttcatgtacgaattacaggactactgactgtcacggtcgaatccaagccaaagtgatgaggatgtttatcatggtggctggttatgaagatcaggaaggaagaaagataaaaaagaaaaggaaatagaaaaaaaacgtttaatttccttttaacattttatttaatttttacttatttattttattttatttatttttctatattttaaaattattttataatatcttaataattaaattatatggaccattaaaaacgtactatgtgtacacttgtatacacgtaaacaatctacttaactgagatttttaaacgaaaatctaataagcaaaataggacttgagttcagtaagtttcactgcaaataccctttttataactatgtttaaacataaatagcatgatttgtaaatataaacacaataatacaactaatggcggagcgagggccaacatatgtaaaattataaaatatatattttaataacattttacatataatttttt

SEQ ID NO: 233688 - DNA, 2254 bp, Cannabis indica
caaggccttttacttttcccatttaggtatcttaggccggtcccggatgggtctcggacctcctgcacccatccctctggatcactcagcctacttgtcttctagttggtttctcccctcggacaactttctgggggattatgaagatagcattgtagttcaagactttgttagggctgagttagatagtcggggtaggactagctttaatgctttgtgtttcaggcgcatgcttttcttacagtttttctaacacttcgtttatttctttttgaagcagccaggcgaatggaagaccttttggcgactctagctgggacctatagcctggacccttctcttcccccggcgtctgcccagatggtgacctcggggaggtcatcttttagtgccccttaggcacaattgtcttgatcgacgaggaaagggaggacaaggaggaggaggaaggggagattgtggcttccctcgaccggaagcgcaagggcaaaatggttgaggctgagtcttccaagaagcccaggagaaaggacatcctggccgttagctcaaattcagggattccttctaaagcagaggagtacatcgtgccccccggcatcacccttactccggtccctgctgatgaggagaggcaacaacttcgaattgccaaacataattatgctatggatgagtacagcaggggaaatgctgaggtggaagccttgaagaaggtcttgcgggaggctcaacaaaattttttacgcgaggaggccttcaaaaatgcctaggacctaaacatggaccccctgacgtactggttcaaccgcttcgtcggccctgctcttgctccctttgcctctgaattgacgagcaaatttgtttcccatctgacccaactcccggccaaaagatacgcagccttcgcctccacaaacgctatttatcaggttcaggatattagcgctcactacaaaataatagacctatcttggcaggcccggccccccgttattgctctatctcggcggtccgtgcgtgtcgagattgaataaggggctatctcgacaatcctggcccgtcattattgttatgcaatctcgacgggccttaaaaggcccgtcaagataggtacaattctaatacatttctacacctttacataccaatatcggcaggcttaccccccgagattgatcaatctcggcagtacacattgagcccgtcgacatagaccttttttaatataaaaaaataatttacaaaattaaaaatacacctaatgtcaaaatatatacataatattcatcttgtacaatattcataccataataaccacaatcaaaataaacaaaaattaatttctatgccaatattatggcataactgataacaaaaatcttcccaaataaaatatacaattacacacaataaaataatacaagatttgatagctaaagaaaaaattctaatcatcataagataatcactaagattggcttctaatcttaaaaatttaaattcattacataataaaagtacctcaacttctctacatgggtatagctaaaactcataagaaataatacaatcactgcaattggccacatcaactctccataattttctctactatctcctaccttgcctcagctgatcaccttaatcacatgggaatatgggtttctccattgatttccgtatagctacagcacaaatttgaaatgtatttttaaataataagaaccgaagacactccaaacatgatagatattaggcaataaataagaaaacgagaaatatatcaacaatgttatgataaatacctttgaactttgatcttgtttaacatataacaaggcaagcatccccacctaatcaataccagatttcacatcacgacattcaataaaatgtatcaacaagtgtttcactaaacaaatattgtttttattagtctcacataccatcaatctaaattccgagacaatattttaaataacttaactaccaagcttagcttttatagcagcttttccaaaatccagcctcacatactatcactctactaaaaaataaaattacttcataagatccaagtccaataattctaagaaaaatctttaaaaatttatgagtgaattgcaatcatgtaattctaacatattatatacattatatacaaaagaatagtgttaatagtgcactaaactaaaaaaagaaagaatagatcatatgctacattccagaaacaaaatggaaagaaagaaaa

SEQ ID NO: 233689 - DNA, 1154 bp, Cannabis indica
ataatatccaaagtcattaagaccagtaaacttttcaacttcatatctggcagtagtcatttgtttacaccaaaagtaatcctgatgatgtggacattaatgtttgacacgtggcaagaaagaaaacatcctagagttgagtagtctaaaatcatagcaagtcgacctaagaggggtccctagccttacgcccatgttgacttcaggaactccgaaattgatgtttggataccaccatgttatttccaactcactatctttcagtattatgtaccatgaagacatgaagcatccaagtccaagccctaggagctgaaaatacaggaaacaccacctcaaaaaatcaacccaggcgcctagggctagcgcccaagttgacaacccttagggtttcagtttctgggaccgtcctagttcaaatgggttaaacttttcattcggtaatgaactatacataccacgaacatatttaaggcatcaaaatcaaattcggagaactttcatttttgagcacccagtgcccaagttgacaatttgtcaaactgggccactttatagcatcaaactaaaaatctgacttatgaatcttctttgtcttcatcgaaattgggggaacaagtgtgttcggggaataaataaaccaatctgggggctaaaataagggatcagcacccaagttaacacctggtgttggcctaacgctcaagttgacattttgtcaacctaggccgatttcgaggagtttttccaaaaattcttttgggaatatttgtcgttttcatcttagattaagattcaactatttataggaagcaaacgaaattgtccaaggacaataaattggacacaatgcccatgttgacacctggcactggcccatggcccaagttgacatattgtcaacctgggctgtttcgaattagtttttccaaaaaaagtgttctgggcatttttcagtcatcagaaataacgaaggtacaagtaaactcagggagaaaacaataataccaggggcttcaaaatttagcccagcacccaggttgacaatcaacatggtgcactagtttcgatcactcaaatgcaaattttgctccaagaattctctctaaaatagttaaaaatgcggtaggtgacctcatcctcaagctcaagaa

SEQ ID NO: 233690 - DNA, 937 bp, Cannabis indica
atgctatttgccttcgccccggagtagctccgatcagtatacggccttatcgttatcctcatgtgcagaaagaggagattgagaaattggtgtgtgaaatgttgcaaggggggatttgtcaacctagtacaagcccgttctcgagtcctgttttgcttgtgaagaagaaggatgggagttggcgtttttgtgtggattaccgggctcttaacaaggaaactattgcggataagtttccaataccggtcattgatgagcttcttgacgagttgtatggagccaagatcttttcaaagctcgatttgaaatcagggtaccatcaaattcgggtgcgacctgaggatgtgcctaagaccgcttttcggactcacgagggacactatgagttcttggttatgccgtttggactcactaacgcaccagcaacatttcaggccaacatgaatgaaatctttaggccatatcttcgtcggtttgtgcttgttttcttcgatgatatactggtttatagcccaaccatggaggcccacctctcacatttacaggtagttctggataccttggctaaataccaattttatgctaacaagaagaaatgttgttttgcccaacagcaattggaatacttgggtcacattgtctctgcttcgggggtctcggtggactccaacaaggtccaagcaatgttggagtggccgctgcccactaatttgagaagtcttcgaggcttcttgggccttacggggtactaccggaagtttgtcaaggggtatgggtccattgcaaggcctcttacagagcaattgaagaaagaccgattttgttggaatgatgaagctacagctgcttttgaagctctcaaacacgccatggtcaccgttccggttttagctcttccagatttttctaagcagtttgtgattgaggcggatgcctc

SEQ ID NO: 233691 - DNA, 1139 bp, Cannabis indica
atgggaatagttaatatacgatcaacatccagtggcgagaaccattctttgagaagaggaacattccattggcgttcatcagttattaattgggagaccataccatcacacgggccagtgtaacgaaggggggtaaaagtttctaaacctggtatccacggatcagtggagatatgaacaagtctcccttctccaattttccaccgtagccctctaatgagtaactctctaccccaaataattccttgccaagttaaacatgggttgtgaccatggtgagcatgaaggaagtcattgtgtggaaagtatcgacttttaagcagtctaccaagaagtgaatccgggtttgccaacaaccgccaagcttgttttgccaataaagcttgattaaattgctcaaaagatcgaaaccccattccgccttcatattttgatttgcaaagaagatgccaagctcgccaatgtattttggagccattttcattagacccccaccaaaaatttgccatcattgactcaagttggttgcaaatagtaaccggaagtcgaaagcagctcataatataggtgggaatagcttggacaacagcttttaggagtacttcacgccccccagcagagaagagtttttcattccagttatgcatcagacgccatatcttctccttaatatcactaaaaagttgttgcttatctctgccggtatacgatggaagacctaagtatttctcatgacattcacagataggcatggaaagagtcctatggaaaaaaacttgggctgccaaagtagtgttaggagagaaagacatcactgatttatcataattgagaagttgccacgaagcccgatgataaatatccaatactcttttaatggctaggcaagagctttcattggcatgacagaaaagcaaactgtcgtcagcgaaaaacaagtgtgagattggtgaagcattccttgtgagcttgaaacccgtcaaccgtcccgcaagttcttcatgttggagcattctagagaggccctccgaacatatcagaaataagtatggaaacaagggacaaccttgacgcaagcccctagttggtgttaatgaacccgagatctctccattaatagtgaaagaaaaggtgttggt

SEQ ID NO: 233692 - DNA, 631 bp, Cannabis indica
tagctagtagtaccagacggttttagaggattattattagacattagatattagatgagtgatgggttctattataattttttagttaaatttttttacttaaaaatacatattgagctgttaattttagttaagtattaaataatcgctacagtcgtgctggagagagaatacgcgtgttggagagagtcacgttctagggttttgtccttcgcttcagcccaaccgcttagacgatttgacgataacagtgcctccccattcccagacgacgacggtgtaagctcttccccattcgcagacgacggcggtgcacgatcttccaatcgcagacgacagcagcgagttccttccctctcgcaaacgtcaacgacggcagttccgtgttcttccgtgtcgttgatcaaagacagtaaaagattggttcaacctgtttccgtgagttacagtcaacgattggttggttttagttttctgttttcatgagttattagttggctttagttcttttgttcttttgttgaacaattggctttagtttattgtttccgtgagttacagtcaacaattggttgctttccagtgaaagattggtttttgttcatttattttaaattactcttttttttta

SEQ ID NO: 233693 - DNA, 1322 bp, Cannabis indica
gccccttcgcaaggacttcgagatatcaagcaacaccctaatacgaagataggggccaaagctttcgagaaaggacagaggttagatttcaatcagctcaccaagttcatcagcgataaactgagccagttgagggcttctatgcccaaaaggaatattgtgggcttgaacacagaatggaacatacaggattttattaggagttagggtaggagaaacatcgggatgggtgaaaactatgagaaacttgtcgaaatgccatggctgttcttctaagactctgcggcgatctctcacactgaaaagtggccagaaataagccagagggatactccgaaatttgaaaagggaaacagagagtccatgcatcagacatggccttctcaatccaagcaggcttgattgatttgggagtgagcagtttaaagattaaacagaaagagttggaatcatagggtggtttaaggaaatatgatcgaattcatgaaccgggttttcttcatcagtgagagaggcgagggtattgagtgtgtttgaagaagacgccatgaaaggaatatgatgaaggtcaggaagggacgatgattgtggatgtggtggtaggagttgaggacagagatttaattaaacaaacagataaagaagagagtttaagagatacttggaatgcaaaggtcgtctcgaggattgaatcgatctctgcaacatctcttcgattcctgcaagggttttctgagtgaactgaagtgaagcaatgattaccatgatgcttaacctaaagagaggaatgacggtgtgggtttttctttggattcgacggggaaagaggaagaaatatagagactacaaatgtattaattgcaaaagggattgtgccgccaaaattaaatgcaaatgagggagagagtgtgcattaaaaagttgttgcgcttgagagattagggagatactcataatgattacgggagacgtcgtggtaataaatgcgatttggttttgatgataaaatgaataaagagaggagaaatagtacaggacggagattagtgcatggtgaagaagaaaaaaggaaagattaaggtaaaagaagaggcaagaattgcacttagggttgtaccaaagccgagcctgtaggaagcttcaagaagaagaagaagatgaaattttttagtactatggttgttctagcattttcaagataagtgataatattttacttttcatatatatatatatatgatggtgtatataagggacccctattcaaaatattaggttcttaaaattatgattcaaaatttggggctttagcttcctttttt

SEQ ID NO: 233694 - DNA, 2423 bp, Cannabis indica
ggtaaaatatttccaacaaaaccctcctgatatatatcaaaaaaaaaaaaactttctccatggctgacaacggagaaaatgctaatactcctcatgaagaaaccactcactgtcctcgaaaagagccaatgggctcctggaggcctcctaactcacgatctacacggaccactcgttccaggaggacccaacctgaggctggcccaagtacacggaccacacgttcaaggaggacccataatccaggaacggggtatgaagaacctaaatgaacactggtggtgcccatcctaggccaactagtgaggatggtgcctacaatcctacaaggtacgtgccactcgtcaagttggaaaattgccaactcagacgtcacttggaggaggcaaaccaacggaacgctgagttggaacgtgagacagtcgcggtcaaggcgacacaggagaataatacacaaaatcaacgtgatcctggagtgagaagaccacgaggcagacctcgcggctcacggaccaagagtttggagacagctcaggagaaccctccaaacgcttaggatgaacaacctagggaaactgagggtccccctaaaaatgaacaaccaaatgatcagctagagccttttcacagaaatgagaatagaaggcaaccagaaaccaaggaacaagaaatccctagtggaaacgagggaaatcctgggacacaatggtcagcaacgaggcatcgcaaacccttcaaccaacagggaaggggcacgtacaaacaccaacagggggcacacaacaaaccatactcaagggagaaggacggaacgtgaagaggcaagtgttacctcagggtgtacaagaacccatagttgatcaatgcgatgaggagaaagtactcatggtaataatgatcgagaaagcacagacacaagtaaaagttactcaaggagaaggtccatgagcaggacgagatacgtgagtaggacaaagtccgtgagtaggacgaggtctgctagtaattataacaaattgggtctgtgagaacacttgaaccagaaaaaacctgatcttcgccaacaactcggtctaaagcaagaggatccaatctaattgcgaatagatgagttggaggataatttcaggaggtatcaagtcggggagcaaggaaaataattttgatatgacttagatgaggacctcgagccattccatccaaacatcatgaatactccttttccctagggattcaaaacccccacgtctcgttatacgatgggaccactcatctggtctcgcatttaaataatttcaatactataatgtgagctagcaatgttacaaacaatctacgttgtattttgtttcctacttcactagttggagcagtaagtagctggttcaatatatttactcattattccatcatttcctgggaacaattgtctaaggactttctaggctgcaagggataggcgacccgaagcgtcctcactcaccaacataaagcaatagtctggcgagatgcttaaggcatacttaagttgttttagctcagctgctgcgagattaagaaatatagatgatagtacccagcttactacccttcaggcagggatcactactgatctctccaatactagaggcaaactatgggacgacctacaaggttgtctagtaaaaaccatcatcgagttcaatgaaagggcttaggtgtttgttcgaaaggaagaagctcgaaaagagatgaacttgttaaaacctagctcaggaagcaaacccaacactgtttcaacaagtattgtctcgactgaagctgataacccaggggctctggttcaaagaggaaagacggctctaaggggtcagctcaagaccaaaagaaacaaaagaagcacgacaagtacgtgtcgatttacaccgtttacaccaagcttaatgaaactcgagaaatcatctatctcgcacatgagcacaaggttgcatttagtaaacctgaggccatgaggcacgcgatgcatagagatccaactagatactgcaagtatcacaaagacatcaggcatacgacagacgagtgtcatcagttgaaggatgagatagagtgtctcatcgcacgaggcaacttcaagcaataagtgaaaagatagggcaatggacataaccagcccaatccgcccaacaacccaggcaaccaaagattacaacctcctcctgttaaagaagaggatatcacggttatctcgggagaacacatattgcaggagagagcaataatgccctaaagaggtacgtgaaggaagtgaaaaacaagcagtcggcctttgatccagaaccttccaagaaagtaaggactgaagaacctcctattatattgtagaggaagataaaaaagacgtgagatactttaacgtctacccattggtaatcaccatccaa

SEQ ID NO: 233695 - DNA, 934 bp, Cannabis indica
caacaaatttattgggaatcttactgagttgagcatcaaagtccttttggctgacaccccactggtgctcccaattgaactcttgcctccttctttgttcttgacagattgttagtgcccaaattccataattgcagatttcgctctctacacttaccctgagaaaaagtttactgaaaaggaaataaatccatgggaagtcaactaggataccagttccccttaactttgaagtgatgactccaccattgcttctacaccgagtcaaaaccatcgatgatggataagttgtgcttgttggagtataaaatgagtgccaagcatgtttagcacttatattattacacgtcttcttaaagtacgagaatatgttcctaaaagatattgaaatctctttcaaatctcccataataaaagtttcaacaatgacgtatatggaattgggagtaagtggatcaacatgcaccttaccaatccatgcaaccaaattactatgcgaggtatgggaaacctagaacctcaatatgatgggactatgtataatctcgttagaggcacaataattcgtgaccctccaatcgagctcttcttcctgcataagaatggagagctccatcatcaagaaaggaatgtgacattcttatttttgttaatcaagcttcattgatgctgacatgattggagccattacagatgtagaaaagaaagtaaaagttgcaacttgaaattttgacaagaaacggaaacaaagcaagaaatgggaaaattttcttaatggtgaatgaaaatgactatttccttaaacttaaataaaaaactagaaaatgtgacacttaagaaaacaattcaacatttaaggcacgcccaatcgtatcctcttagttcccgaatgttgcactcaaaacaacgggtgagtggtaaacatgcgagtaat

SEQ ID NO: 233696 - DNA, 1894 bp, Cannabis indica
tctccactgtccaccacattcctctaccatctgctctatttacctctcatcagtcaccaatagaatagccaacaccaactcagtcaccaacttcaattccaccagatactgttatacctgctgcagatcccatattgcagcaacatgagccacctgctgccttaccaactggctctgctgctcccctttctcatacttcccatgtacctccaaccacatcctctcatcacatgactacctgttccaaatcaggtatttacaaacctaaaattcttgtagctgagttaaaagagtatgaatgttatctcaaagaacctacttctcttaaaatggccttaaataatcctttatggaacaaagctatgggagattaatactatgctcttaagaaaaacaatacatgggttctagtcccttatcatcatggtatgcatgtcatagataacaaatgggtgtacaagataaaactacaggcagatggaactgttgaaagactaaaggcttagctggtagccaaaggttttcaacaaactgttggagtggactactttgacacattcaaccctgttgtcaaagcaagtaccattcgcataatgtttactctagcagtcacctatggctgggacatacaacaaattgacataaataatgcctttctaaatggtgacttagaacaagcggtttacatgcaacaaccacaagggcttgaggatccgaattatccaacttatgtgtgtcaactgaagaaggcattggatggattaaacaggcacctcgagcttggtatgaaaagctcaagactgccttactagcttggggtttcactaattcggtttctgacagcagtctctttttcagcacaaaaaatggcactcctctcctcattttggtctatgttgatgatatcctcatcacgggtgccagttctaaagatgttcacaaagtaatcaatgatctccaagccaagtttgctcttaaaactctgagctcagtcagttatttccttggttttcaggcacacaaaaccaatgcatctctccatctgtcccaaactcagtatgctatggacattctaaaaagaaccaatatggaaacttcatagtcatgcatcacaccattatgctttggatacaaactgtatacctctgacagtgagttgttccacgatcccactctctacagaagcacaattggctcccttcaatatctcacaatgaccagacctgatcttgctttttcagtcaacaagttaagccaattcatgcaccaacctactgttgcacattggaatgcatgcaaacgggtacttcgatacattaaaggcactcttgacttgggtcttgtctttaaaccagccactcatctcactttagaagcctttttagatgcagattgggcctgcaatctggatgaccgcaaatcgactactggtttttgtgtaaaacttggtggaaatctcatatcgtggcgctcaaagaaacaaaaatcagtggctcaatcaagcactgaatccgagtataggtctttatcaactactgctactgaagtggtgtggataacctctgtgttgactgaaataagtatcaaacctagtggaaaacctgttatctggtgtgataatcagggggcacaacagcttgcctccaatcccgtgtttcactcaagaacgaaacacattgaagtggatgtccactttgttcgtgaattggtcactcaaggcaagttaactgtctgctacattcccactgaagaccagccaactgatctctttaccaaagctttaacttttcctaaatttaatttcttatgtagcaaactgtcactgggcaaatcccagtccagtttgaggggggatgttgatatagtaacagaatatggttaagtagttagacag

SEQ ID NO: 233697 - DNA, 799 bp, Cannabis indica
tctggtacatataagacattaacaagaacaatttcagaagaaattctaatagtactagtgcaagaaattctttccttggtaccatcaggaagagtgacaatagaaagaataggtttgtgacaaatattggtaaacaaatcaatgtaagggcaaacatgaagagtggcacttgtatcaataatccatttgtttttatgaataagatcagtcttaccagaaagatttgacacaagaggctgattggaagattaagtattctctaggtggaatttttgagcaagcatggccataattttctggcattgactgagggaaagaccagatagaggaccttgattagctccagatgctccttcattgttgtcattgtgtgtctcagacatgttagctgctggtttcccttgtgtagttctactctgagaattgtcaccatttttgctaggaaatatgtcatgtaacctatgccccggtggatagccatgaattttgtaacatctagacatggtgtgtccattaattccacaattattacaaaataacttggatctttgagattgaaatcctccagtaacctctgaattcgatttctgggattcaatttgaagattagtaatgcctctttgactttcctcttgaatgattgaggcataagccttattaattcctggaaggggttcttgcattagcacttgagatctagcaagactgtaggattcatttaaaccaacaagaaattcaagaactttatcttcttcttggtactgctgtatcactttcatagggtttttaacttggtaaa

SEQ ID NO: 233698 - DNA, 851 bp, Cannabis indica
taatatatggtactttgaatcatatcttattttctgcaatgtattttatccttctacagttatcaactcttgtaatatgggactgattttgccttttttttttaatattattaaaagtaatgtgtagcataaatactttaaatttaatttccaattataaataaatacttaaaaattttggcggcaataatacttaatttatatttttggaactctataggtacatgtccgttacatgttaagtcattatatccatgtattattttctcattggtatatttaaactaatttcttttaaaataataaacatttaatgatttggactaagcagggaatgtcacgtggcaatttacttaacacttaacagtcaagtacctatacaaaagttccagaattataacttaagtattattaccgcaaaaaattaaacttagacatttatttacaattaagagttaaacttagatatttatactacaaattactctattattaataataattactactataattttttttatataagtgtatgtaaaaacagaaaaattacaacaaattaaagtaatagttaagaaaaaaaataataaataatggttcaaaaagtgttttaactgaaaaaaacaaaataaaggagattttgttagtaaatagatcttagactcatgttagattaagattactctataaattaataagatagaagatatacatgattttattagatatgagataagataatgagtatatgatcttctacagactaatcttctcttgcgagttctcactcaattgatgggaatagaagaaaagagtagttaagattagccttagcaaactatagagtccca

SEQ ID NO: 233699 - DNA, 874 bp, Cannabis indica
tttgggtttttaaagtggttgcaacgctagttgcaataggagtttctgacgattttctgttgcaatttaggttgcagcgctagttgcaataggggtttctatgtagaattccgtaaatagaacgtcctagactgtcagaagttatatgcccctcagcgagttcacacacacaagcgtcaaaagttccactcgccaccgaccttctagacttttatttaccttggtctgcacatggtaatttgataagagtgagctactaaactcagtaagaaaatgtgcgtcaggtagtcacataaataaaaataaagcacaactagaacgtacatgcacatattcagacaaatagcaatacataaacataattttattactagtaactaataactaatttttaagttaaatcacataaaaatgattacgcccgagtctaactttggcaaataaatccgagatattggactaaatggcacagagctgggttcagtaaaatcgtacccactactaaatggccccctatctatcatatagaaccaacagtcaagtatttaatcattatcttctcggtcaaatcatatcacataagttacaatctatctaatttaaataatgtttaactactatacattatttaaatagcacaacatgtcatagccataactttgtttaaataatgtgaattcattgtattgtccattattcaaactacatgtacatatttattgcttaaataatgtgaatccatattgtaccgtctaatattcaaacaacataatataataatgaacaaataaaagaagatagaaatcttatacctcactcccactccttttgaacattatttctgttgggttttgtgccctaaataaaacccttt

SEQ ID NO: 233700 - DNA, 1094 bp, Cannabis indica
tgtttagttttgcctttacctgcacacagagtactcgtgagctaatgcccagtaagaagagctatgtaagacataaccccccaactagataacatatccataagtataacaatatcacaacatcaaatcaattcataccatgcttgcatacatatatatcaacatatcatatcacatattattctcacatacaatataacatcatatcacagtgtaatcttaatgcatgctatactcacacacataacacatagtatcttatcgcacattgtcctcacatacgataatctactcccactcatgttgatcagacatgaagtgtaacttgccctgccttgtgctgttctcacactcggcatccaatagggcaatcccttatcacaagttgtactcacccatgataggataacctgcaagtaaacccatacaagcagccaaaaatatatcctgcagtgctatgctcacaccagcagcagaaaacatatcctataagtgatattctcacacaaacagtcaaaagccttatcactatcacacactaataacattagcataaaacaacaatctaccatagaataaaacatgtaaatacaaacccataatacagttgtatgttttaacatacaccctgtgcacagatgtccactcttcttacctcagttgctaagtatatccttttctctccctcgaacctctcccccagtttctttgttgagaagaagatcctaaatccaataacgcaataacacttaaaacatattcaagcataacctaagattaacaatgaaatcttatgtcaaactacacaacacataggtcaatttcacttccatgacacacattacacaatcatttatcactatgattcacaccaacacatatgatgtactcaaacgaatatttttaacgtaaaacatgagctcatgcaaacactttttacgtgaaatctcactaaaatgccatttattaacaaaatatgcaaatatgtaattatttaccaaaatcagaagctagcatatttcttaatcatttatatagattataaaacatatttattctatctagaaataagtacaatttattatccatattta

SEQ ID NO: 233701 - DNA, 552 bp, Cannabis indica
ttcaactaaagaaagaaaattgagctactagatactaatatattgactatcgtatttatgatacaactataatccacaaatacaaaaatagagaaaaggaggaatgaagtaagaagagattaaccttctatctaatataggcatggatattggagaataatgaatatgactgatcaaataaaaaggaaagttgaatcgtagagatttgtgttttgtttttctatttataaattacatgatattcaaaataattaaaaattaaaaaaaatattaaaaaggggtaattatttattttttttttgaaaataagcgtaatcatccattaataccacaaaattagacctctcggtcattacaaaacaagttctccggaatgaaggaggtcggaatatagcagtacattcggtgggtaaaagcccacttagccacattatgggccataaagttacaagttctgctaactttcataaaattacaactaataaaagaaggagaagacttaatacaaactgagacatagttctcaagcgtccaatgagactccttcccatt
